United States Patent Application Publication US 2017/0114356 A1 - sequence listing, part 62

SEQ ID NO: 83838 - DNA, 1063 bp, Zea Mays
attccaacactacacacccacctagcctggcaaccagccgccgacctcctatctaccatggatatgtgccttggagccaaaagatccatcaccaatcttttccctcttctatacctcctcatgccgcggcatggatctccttgttcgtttgtcatctaggagtatctggctaggtcgccggccggaggaggaggaggagaaagaaatggaagtgtaactatggtgttggctcggctcactcagaagttgaagccgaatccaaatggtagctgccggcgtttctgattgagccgtgccaatatctcagtactctttcatgctgatctcgcgtcacacgtcgatctcttcctgaagtgctgtagtctctctcgtactctcatgcatcttggtcatgtgttcttatactgtctcttttgcttctgctgcctgccagtatgtggactgcacacgtacattgtttttttcgattcgtttataaagtttcatggcacggtttgtatcagtctgtgactaggctagctaaccattgacagtcttgcttgcgtgttgttgcaacagacaccagtcgtttggcgatgcagaaatcgctcgacagatcgagcaggagaaatagaaagagagacagcaggcagccaagcacatatgcaaattagcattcggttcaagctagccgcgcttcagagagctcagaagcatcatgaacgtcatagttgaaaccaacgccctaatttcattgcattgtttcttttcaggaaggacatggccggacgatatgatcaagctactagcatgtgtagtagtatatacttcgattagtttctgtaaccacatcatgcatgtgcccgtttcttaacttcttgagggagaaaaggagaaatgcataaattatggatgatctctgtacgttcatcatgtaccatcagttgtgagcatctgttgattctcttatgtattgcctgcagtagtcgtacacttgtactccatacatacaaaattcagtacaatatgaatttgttttcagtgtgcatccatacatacatatacaagacatgtctgttcgctt

SEQ ID NO: 83839 - DNA, 1960 bp, Zea Mays
cgaaaccgagtgctgacaaactagctgaagcgcgcagcttccgccgccacaccaggcatcttaccttcggggggcagcgatcggagcgggccgccggccgcgccactggcaccattgtttcctcagtaggaggaccccgcggcacccgcgcacgatgggggtaagtggaggcaccggcggcagcagcgggtgttgcatccatcggcgccggcggcgagaacggggaaagataaatatcctcttggcttggcttccgctttgcgagcgcggctgcttggtgcgttgacgttgctacgcaatcccacccgtccgatcagcatcctagggcttccgcttcacaagcgattggtcctggccggctgcgtttaccacagattggagttggacgtggaccacgatgagacgaccgtccccgccgtccgacccattcacccccactgtgccgcgccccgccccgccccgccccgcccacgccgccgtggcaacgccatggggaagcgatccggcggccggaagctgccgttcttcaccagatcctccccaagcaggacaacgcgacgagggctcttctcgcctccccctctgctgcctcgccgtccgcgaccccgggatcggcggcggcggggcagaccgcccagctgccccctcccctctcagttaccgcgggcggcggggttgccgtgtcggggaaggtcaacaagaagaaggccggcacgcgcctatggatgcggttggaccgctggagtgcctccgagatcgtcgagctcgacaaggcctccataatccgccgcgccggactgcccccgcgcgacctacgcatcctcggccccgttttctctcgctcctccagcatcctcggtcagggatgaaatagaacatcttctagatgataatgaagacatggaacatctgtatctaacaaggaagcaagtacaaaaccaacaggttgaggctttaatgtcatctgctgcttccaacagcattgttcttgccggaacaggtgtgcccaggctgaactctagcttccggcgtagcctgagcattgctactagcatgcatttggataatgatgtggaggacctagagatgttacttgaggcctacttcatgcagctggatggaattcgcaacagaattttgtcggttcgggagtatattgatgacacagaagactacgtcaacattcaactcgacaaccagcgtaacgaactcattcaactccagcttacacttacgattgcatcctttggcatagctgccaacactttcattgctggagcttttgcgatgaacatcccgggctctctgttcaacaccgatggcagcctcttctggccatttgtcgggagcacctcatctggctgctttgtaatcaccgtcctcttgttggggtatgcctggtggaagaagttgctgggtccttgaacatgaagcaagatggcagagagccttgtcatgcttgcagaaaggaagaaggcgtcctatcctaaggatattagagaaccgtggggatagcatgaaaacctgtatataacatctcaacagtgttcataagatgagtacgtataatatatcattagcataaacgagatgatgtgatgatcgatatacttccttgttaacatcattagctggcaactgaaaaatgttgccatgaaactatattatccagcagcggctggctttgtgtacaatttgcttttctttctgttttggaggcaccatcttctgtgcttcagtttttggtcaattggcaggtgatggttgtttagccactatagccgcatctcgtgcccagtctcactgatcgttcttctctctcacctgacgaattgtaaactctcatgatgagttggttgctgagttgagccctatctctctttgtttcaacagatcagctcttcgaatatttttgtgagcgcgttggttgctcagttgagccctatctgtttttgttgtc

SEQ ID NO: 83840 - DNA, 2174 bp, Zea Mays
gattaaagtttagtaactaaaatacctcgtttggttctagtgactaaatctgattaaatagtattaattggtgccaataataactgcattatttctattaattagtggatgtcaaaaaaaatgagaggtcaaataaaataaaaaacctgctgactaaagagattaaaaataactagtcacctaaacctaagaaaagagaaactgccaaaaaaaaaagggacaaaagtcggcccaggagtccaggacaaggtccctgcgggtgcgctgcgctccctccgagcccgagcccgagcccgaggaccgggctactgccgtccgccgcaagccccgtcctgcactcctgcatccgttcacgttttaccccgtccggccgtccccctcgttctttctctcccccttctctctcgctgcgacgactgggtaggctgccgccgccgccctacgccaggtcccgaggaccaaggcattcgtattcgtcagtctcttcgccgggcgacgccagaaagaagaccagaggtttgtgggagtatcgaaggtggtggtgattttgtagcgtggtgttgcagtttggttggaacttggagtgtagagggaagatttggtgatgagcagccgcagcccgccgccgaaggaccgcaggatgcgtactgaacgcacctcataccgtggcgcaccatatcggagggacagccgccatggtccaagcaggtttgagctaatctaagtcaaacaggacgagtgtttggcattgttcttccaaacatcactgcttcctcttgttatcatgtatatatttggctaaatgctatgtgaaattaccataattgttattttatttagatgtaaactttgcctatatttatcccattgcaaccacttatgcatgtatgtagcttaaataagggcacttgatattggttaatgtagcactatttttttttctgaaagtctagtaaaaagtgtatggtaaagtgatctgggattgaaattttttggatgaattcatgttgtgccatggttttaggagaaagcctatgcaggattgtaactagaaatgagtcatgacaagaatggtgaaattacttaaaaatttatgtgaatggaactgtaatatcttattattcagacatttggaatcttatgtatcctttagttatttccctttccattgtgcaggtttcggaatgatttgtgcaacaattgtaagcgtcctgggcattttgctagagagtgtcctagcgtggctgtctgtcatacctgcgggcttcctgggcacattgcagctgaatgttcttccaaaggtacctgctggaactgcaaagagcctggccacatggctaacagctgcccaaatgaagggatatgccgtaactgtggcaagtccggacatattgcaagagactgcactgctccaccagtgccgccaggagaagtgatcctttgcagcaactgctacaagccagggcattttcgtgaggaatgcaccaatgagaaggcctgcaacaattgccggcagagtggccatattgcccgtaactgcaccaatgatcctgtttgcaacctgtgcaatgttgctggccacctggcccgtcagtgccccaagtctgatacattgggcgagaggggtgggcctcctcccttccatggtgttggcgctcccttccgtggtgttggcgttcccttccgtggtggcctcagtgacgtgatctgccgggcctgcaaccagattggccatgcgagtcgtgactgcatggctggtgctttcatgatctgccacaactgtggcggccgtggccacacggcatatgagtgtccctctgtgagtctcattgagaggttcccacctcgccgtttctgaaggacgtccaagggctatccagatgactgttgttttcagcccattgtgtcaagaacactcatttccgttttcttttttttttccaaaccctaatggattctagatctttcagattcttaacttgtcagcactatttgtgattccctaatggattctagatatttcagattaataactcgtcagcaccatttataattctggattttctacttgactcagatgttctgttgatgataatgtttgaagacatatggtacttgtcgttatgaactcaaattcatctcgtgagttttaacaccattcgaactggaacatc

SEQ ID NO: 83841 - DNA, 2383 bp, Zea Mays
cgctcgttattttgcagagcccataaacgaaagcccatgaaatcttccgactcgtgcgcgccaacctttttgttgctcgctcaccgaccggcgccatcactcgctgaaatttcttttcccaatccagttcattctgccgctctccaatagtccaatccggtcgcggcgaagctcggccagacggccaccccaatgccgtcacggtcgggctcccggggcaggcggccgcggccggccccagaggtggctgctcccacggctgtacaagtgagctcgtccggctcgagtgaggaagggagcgatgaggaggaggaggggagcgagggatccggtgacggtgcgaggagcccgggcggctctgccagcaagtataaggcggcggagagtgaagccgaggcggaggacccatgccttcccagctgccccatttgtatggtcgtgtggaccgctgatggtgcgcatcgcgtgagttgcatcccttgtggacatgtctacggcagacattgcttagagatgtggttactgcagtacggcaagaaaaaggcaccgtgtcctcaatgtggcaagagatatacacagaacaacatcatcaacctctatgtaccagagattgttgttcccaataatgatcttgaaaatcaagtattgtccttgagagagagaaatgaatatcttgagaagcaacaagcaaaattacttgaggagataaaagagcataagaggcagattatgttgcaacaaaatgtaatatatgaatcaaacaaaaagagacagagagtggcagagcagtcatcagatggaatactaggggctgagctaattgcctcacatacaaaggacattgaccacagcaatctgtcaagttttgctctccagaatgagtttttggtcgatggagctcgggtcatgggtatagatgcatccagtcaaattatattcacttcgggaagggcacatggagttagtgctgaacacatacttacaaaggttagcatgtttcatggacatggaatggagaaaatccaccttcctcctggtactaaagctattagggatatctgtgtactgcctgggggccatgttgtttttgcatcactgggcaggaagttgtctattttcagtgtggctaccaacaatgttgtccttcaatatgatctgccggctcctggttggtcctgttcaggggattatactacttcaagtcatatttatgctgggttacagaacggcatgctattagtctttgatatccgtcaaacttcagcacctttgcattctagcatgggtctatcaacacacccagttcatacaatacactgcgctgtagatggcagtggttccaggaaggttttttctgcttcttctataggaccctgcgtttgggatgccagcgaaaacaggccgagtttggtaagtgggatggaaaaccaaggggtctgcatatctcttgcgtgcagctctccatcaagtgatgtcctggtggcttcatatcgcccgagagttgagctgccagacgctatcgccacatctcaagcgtctacaccacaatcaccggcacccaccggttcaggaaaactaggatgccacacactccttaggagaaccaccgccacatcctttgccagggaccatatctgcagtggtagcgtaagtgagttgcgaatgtcgaagtctgcaataataccctgcagagacaatcagcatctatttgcctatggagatgaatcgttgtacggagtccggacttggcggctgccttcgtttcagcggtacaccgatctcaagccccacaggcaaccggtccttgatctaaggtatgctgaaagttcaactggggagaggtaccttggttgcttaagtgccgaaaagctacaggttttcacaattaggtagcttgacagaggcattagcttggtttctggaattctggtagttgtgcttgtgcatgctaacatttgtttcttcagcagctttgctgtataagtaaaggccattgtccatccgtacagtcttcacttaaaacagcgtgtaaaaccatgctgtacatttcaaacaatctgttgtaacttgtaagaggctccagcatacaatacaccagcgggtgaaggattgcatatgctgtagtgttgtactgatgcagcattgcattttgtcatgaatcaaggaaacaaatgggtagcaatctgtcacacctttgaagcttcctgctgtgctcactcgctgatgttttcagtttgtaatcgtcattgtacttcactacaaaacgtaacgtaacatcaggcatgcacttcttcgtgtaccttatattcttctttccatgaaattgtactttcatttttcataacataacttgataatgataattctgccagattggactgtt

SEQ ID NO: 83842 - DNA, 1970 bp, Zea Mays
gaagcggcgggaggctgggagagcgggcgggaaagcgcgggaatggaaggcggcgggagggcgagagggggatatggcgagtcctacagcctcggcaaatgtaccgagcgaagggcaggcgatggcgagcattccacgtctagttgcatcccctgtggacatgtctacggcagacattgcttagagatgtggttactgcagtacggcaagaaaaaggcaccgtgtcctcaatgtggcaagagatatacacagaacaacatcatcaacctctatgtaccagagattgttgttcccaataatgatcttgaaaagcaagtattgtccttgagagagagaaatgaatatcttgagaagcaacaagcaaaattacttgaggagataaaagagcataagaggcagattatgttgcaacaaaatataatatatgaatcaaacaaaaagagacagagagtgacagagcagtcatcagatggaatactaggggcagagctaattgcctcgcatacaaaggacattgaccacaacaatctgtcaagttttgctctccagaatgagtttttggtcgatggagctcgggtcatgggtatagatgcatccagtcaaattatattgacttcgggaagggcacatggagttagtgctgaacacatacttacaaaggtacaagtcttaagagaaggttttgcttaatgacttaaggttagcatgtttcatggacatggaatggagaaaatccaccttcctcctgatactaaagctattagggatatctgtgtactgcccgggggccatgttgtttttgcatcactgggcaggaagttgtctattttcagcatggctaccaacaatgttgtccttcaatatgatctgccggctcctggttggtcctgttcaggggattatactacttcaagtcatatttatgctgggttacagaacggcatgctattagtctttgatatccgtcaaacttctgcacctttgcattctagcatgggtctatcaacacacccagttcatacaatacactgcgctgtagatggcagtggttccaggaaggttttttctgcttcttctataggaccctgcgtttgggatgccagcgaaaacaggccgagtttggtaagtgggatggaaaaccaaggggtctgcatatctcttgcgtgcagctctccatcaagtgatgtcctggtggcttcatatcgcccgagagttgagctgccagacgctatcgccacatctcaagcgtctacaccacaatcaccggcacccaccggttcaggaaaactaggatgccacacactccttaggagaaccaccgccacatcctttgccagggaccatatctgcagtggtagcgtaagtgagttgcgaatgtcgaagtctgcaataataccctgcagagacaatcagcatctatttgcctatggagatgaatcgttgtacggagtccggacttggcggctgccttcgtttcagcggtacaccgatctcaagccccacaggcaaccggtccttgatctaaggtatgctgaaagttcaactggggagaggtaccttggttgcttaagtgccgaaaagctacaggttttcacaattaggtagcttgacagaggcattagcttggtttctggaattctggtagttgtgcttgtgcatgctaacatttgtttcttcagcagctttgctgtataagtaaaggccattgtccatccgtacagtcttcacttaaaacagcgtgtaaaaccatgctgtacatttcaaacaatctgttgtaacttgtaagaggctccagcatacaatacaccagcgggtgaaggattgcatatgctgtagtgttgtactgatgcagcattgcattttgtcatgaatcaaggaaacaaatgggtagcaatctgtcacacctttgaagcttcctgctgtgctcactcgctgatgttttcagtttgtaatcgtcattgtacttcact

SEQ ID NO: 83843 - DNA, 1931 bp, Zea Mays
gaagcggcgggaggctgggagagcgggcgggaaagcgcgggaatggaaggcggcgggagggcgagagggggatatggcgagtcctacagcctcggcaaatgtaccgagcgaagggcaggcgatggcgagcattccacgtctagttgcatcccctgtggacatgtctacggcagacattgcttagagatgtggttactgcagtacggcaagaaaaaggcaccgtgtcctcaatgtggcaagagatatacacagaacaacatcatcaacctctatgtaccagagattgttgttcccaataatgatcttgaaaagcaagtattgtccttgagagagagaaatgaatatcttgagaagcaacaagcaaaattacttgaggagataaaagagcataagaggcagattatgttgcaacaaaatataatatatgaatcaaacaaaaagagacagagagtgacagagcagtcatcagatggaatactaggggcagagctaattgcctcgcatacaaaggacattgaccacaacaatctgtcaagttttgctctccagaatgagtttttggtcgatggagctcgggtcatgggtatagatgcatccagtcaaattatattgacttcgggaagggcacatggagttagtgctgaacacatacttacaaaggttagcatgtttcatggacatggaatggagaaaatccaccttcctcctgatactaaagctattagggatatctgtgtactgcccgggggccatgttgtttttgcatcactgggcaggaagttgtctattttcagcatggctaccaacaatgttgtccttcaatatgatctgccggctcctggttggtcctgttcaggggattatactacttcaagtcatatttatgctgggttacagaacggcatgctattagtctttgatatccgtcaaacttctgcacctttgcattctagcatgggtctatcaacacacccagttcatacaatacactgcgctgtagatggcagtggttccaggaaggttttttctgcttcttctataggaccctgcgtttgggatgccagcgaaaacaggccgagtttggtaagtgggatggaaaaccaaggggtctgcatatctcttgcgtgcagctctccatcaagtgatgtcctggtggcttcatatcgcccgagagttgagctgccagacgctatcgccacatctcaagcgtctacaccacaatcaccggcacccaccggttcaggaaaactaggatgccacacactccttaggagaaccaccgccacatcctttgccagggaccatatctgcagtggtagcgtaagtgagttgcgaatgtcgaagtctgcaataataccctgcagagacaatcagcatctatttgcctatggagatgaatcgttgtacggagtccggacttggcggctgccttcgtttcagcggtacaccgatctcaagccccacaggcaaccggtccttgatctaaggtatgctgaaagttcaactggggagaggtaccttggttgcttaagtgccgaaaagctacaggttttcacaattaggtagcttgacagaggcattagcttggtttctggaattctggtagttgtgcttgtgcatgctaacatttgtttcttcagcagctttgctgtataagtaaaggccattgtccatccgtacagtcttcacttaaaacagcgtgtaaaaccatgctgtacatttcaaacaatctgttgtaacttgtaagaggctccagcatacaatacaccagcgggtgaaggattgcatatgctgtagtgttgtactgatgcagcattgcattttgtcatgaatcaaggaaacaaatgggtagcaatctgtcacacctttgaagcttcctgctgtgctcactcgctgatgttttcagtttgtaatcgtcattgtacttcact

SEQ ID NO: 83844 - DNA, 2168 bp, Zea Mays
actcgctgaaatttcttttcccaatccagttcattctgccgctctccaatagtccaatccggtcgcggcgaagctcggccagacggccaccccaccccaatgccgtcacggtcgggctcccggggcaggcggccgcggccggccccagaggtggctgctcccacggctgtacaagtgagctcgtccggctcgagtgaggaagggagcgatgaggaggaggaggaggggagcgagggatccggtgacggtgcgaggagcccgggcggctctgccagcaagtataaggcggcggagagtgaagccgaggcggaggacccatgccttcccagctgccccatttgtatggtcgcgtggaccgctgatggttcgcatcgcgtgagttgcatcccctgtggacatgtctacggcagacattgcttagagatgtggttactgcagtacggcaagaaaaaggcaccgtgtcctcaatgtggcaagagatatacacagaacaacatcatcaacctctatgtaccagagattgttgttcccaataatgatcttgaaaagcaagtattgtccttgagagagagaaatgaatatcttgagaagcaacaagcaaaattacttgaggagataaaagagcataagaggcagattatgttgcaacaaaatataatatatgaatcaaacaaaaagagacagagagtgacagagcagtcatcagatggaatactaggggcagagctaattgcctcgcatacaaaggacattgaccacaacaatctgtcaagttttgctctccagaatgagtttttggtcgatggagctcgggtcatgggtatagatgcatccagtcaaattatattgacttcgggaagggcacatggagttagtgctgaacacatacttacaaaggttagcatgtttcatggacatggaatggagaaaatccaccttcctcctgatactaaagctattagggatatctgtgtactgcccgggggccatgttgtttttgcatcactgggcaggaagttgtctattttcagcatggctaccaacaatgttgtccttcaatatgatctgccggctcctggttggtcctgttcaggggattatactacttcaagtcatatttatgctgggttacagaacggcatgctattagtctttgatatccgtcaaacttctgcacctttgcattctagcatgggtctatcaacacacccagttcatacaatacactgcgctgtagatggcagtggttccaggaaggttttttctgcttcttctataggaccctgcgtttgggatgccagcgaaaacaggccgagtttggtaagtgggatggaaaaccaaggggtctgcatatctcttgcgtgcagctctccatcaagtgatgtcctggtggcttcatatcgcccgagagttgagctgccagacgctatcgccacatctcaagcgtctacaccacaatcaccggcacccaccggttcaggaaaactaggatgccacacactccttaggagaaccaccgccacatcctttgccagggaccatatctgcagtggtagcgtaagtgagttgcgaatgtcgaagtctgcaataataccctgcagagacaatcagcatctatttgcctatggagatgaatcgttgtacggagtccggacttggcggctgccttcgtttcagcggtacaccgatctcaagccccacaggcaaccggtccttgatctaaggtatgctgaaagttcaactggggagaggtaccttggttgcttaagtgccgaaaagctacaggttttcacaattaggtagcttgacagaggcattagcttggtttctggaattctggtagttgtgcttgtgcatgctaacatttgtttcttcagcagctttgctgtataagtaaaggccattgtccatccgtacagtcttcacttaaaacagcgtgtaaaaccatgctgtacatttcaaacaatctgttgtaacttgtaagaggctccagcatacaatacaccagcgggtgaaggattgcatatgctgtagtgttgtactgatgcagcattgcattttgtcatgaatcaaggaaacaaatgggtagcaatctgtcacacctttgaagcttcctgctgtgctcactcgctgatgttttcagtttgtaatcgtcattgtacttcact

SEQ ID NO: 83845 - DNA, 2207 bp, Zea Mays
actcgctgaaatttcttttcccaatccagttcattctgccgctctccaatagtccaatccggtcgcggcgaagctcggccagacggccaccccaccccaatgccgtcacggtcgggctcccggggcaggcggccgcggccggccccagaggtggctgctcccacggctgtacaagtgagctcgtccggctcgagtgaggaagggagcgatgaggaggaggaggaggggagcgagggatccggtgacggtgcgaggagcccgggcggctctgccagcaagtataaggcggcggagagtgaagccgaggcggaggacccatgccttcccagctgccccatttgtatggtcgcgtggaccgctgatggttcgcatcgcgtgagttgcatcccctgtggacatgtctacggcagacattgcttagagatgtggttactgcagtacggcaagaaaaaggcaccgtgtcctcaatgtggcaagagatatacacagaacaacatcatcaacctctatgtaccagagattgttgttcccaataatgatcttgaaaagcaagtattgtccttgagagagagaaatgaatatcttgagaagcaacaagcaaaattacttgaggagataaaagagcataagaggcagattatgttgcaacaaaatataatatatgaatcaaacaaaaagagacagagagtgacagagcagtcatcagatggaatactaggggcagagctaattgcctcgcatacaaaggacattgaccacaacaatctgtcaagttttgctctccagaatgagtttttggtcgatggagctcgggtcatgggtatagatgcatccagtcaaattatattgacttcgggaagggcacatggagttagtgctgaacacatacttacaaaggtacaagtcttaagagaaggttttgcttaatgacttaaggttagcatgtttcatggacatggaatggagaaaatccaccttcctcctgatactaaagctattagggatatctgtgtactgcccgggggccatgttgtttttgcatcactgggcaggaagttgtctattttcagcatggctaccaacaatgttgtccttcaatatgatctgccggctcctggttggtcctgttcaggggattatactacttcaagtcatatttatgctgggttacagaacggcatgctattagtctttgatatccgtcaaacttctgcacctttgcattctagcatgggtctatcaacacacccagttcatacaatacactgcgctgtagatggcagtggttccaggaaggttttttctgcttcttctataggaccctgcgtttgggatgccagcgaaaacaggccgagtttggtaagtgggatggaaaaccaaggggtctgcatatctcttgcgtgcagctctccatcaagtgatgtcctggtggcttcatatcgcccgagagttgagctgccagacgctatcgccacatctcaagcgtctacaccacaatcaccggcacccaccggttcaggaaaactaggatgccacacactccttaggagaaccaccgccacatcctttgccagggaccatatctgcagtggtagcgtaagtgagttgcgaatgtcgaagtctgcaataataccctgcagagacaatcagcatctatttgcctatggagatgaatcgttgtacggagtccggacttggcggctgccttcgtttcagcggtacaccgatctcaagccccacaggcaaccggtccttgatctaaggtatgctgaaagttcaactggggagaggtaccttggttgcttaagtgccgaaaagctacaggttttcacaattaggtagcttgacagaggcattagcttggtttctggaattctggtagttgtgcttgtgcatgctaacatttgtttcttcagcagctttgctgtataagtaaaggccattgtccatccgtacagtcttcacttaaaacagcgtgtaaaaccatgctgtacatttcaaacaatctgttgtaacttgtaagaggctccagcatacaatacaccagcgggtgaaggattgcatatgctgtagtgttgtactgatgcagcattgcattttgtcatgaatcaaggaaacaaatgggtagcaatctgtcacacctttgaagcttcctgctgtgctcactcgctgatgttttcagtttgtaatcgtcattgtacttcact

SEQ ID NO: 83846 - DNA, 2051 bp, Zea Mays
actcgctgaaatttcttttcccaatccagttcattctgccgctctccaatagtccaatccggtcgcggcgaagctcggccagacggccaccccaccccaatgccgtcacggtcgggctcccggggcaggcggccgcggccggccccagaggtggctgctcccacggctgtacaagtgagctcgtccggctcgagtgaggaagggagcgatgaggaggaggaggaggggagcgagggatccggtgacggtgcgaggagcccgggcggctctgccagcaagtataaggcggcggagagtgaagccgaggcggaggacccatgccttcccagctgccccatttgtatggtcgcgtggaccgctgatggttcgcatcgcgtgagttgcatcccctgtggacatgtctacggcagacattgcttagagatgtggttactgcagtacggcaagaaaaaggcaccgtgtcctcaatgtggcaagagatatacacagaacaacatcatcaacctctatgtaccagagattgttgttcccaataatgatcttgaaaagcaagtattgtccttgagagagagaaatgaatatcttgagaagcaacaagcaaaattacttgaggagataaaagagcataagaatgagtttttggtcgatggagctcgggtcatgggtatagatgcatccagtcaaattatattgacttcgggaagggcacatggagttagtgctgaacacatacttacaaaggtacaagtcttaagagaaggttttgcttaatgacttaaggttagcatgtttcatggacatggaatggagaaaatccaccttcctcctgatactaaagctattagggatatctgtgtactgcccgggggccatgttgtttttgcatcactgggcaggaagttgtctattttcagcatggctaccaacaatgttgtccttcaatatgatctgccggctcctggttggtcctgttcaggggattatactacttcaagtcatatttatgctgggttacagaacggcatgctattagtctttgatatccgtcaaacttctgcacctttgcattctagcatgggtctatcaacacacccagttcatacaatacactgcgctgtagatggcagtggttccaggaaggttttttctgcttcttctataggaccctgcgtttgggatgccagcgaaaacaggccgagtttggtaagtgggatggaaaaccaaggggtctgcatatctcttgcgtgcagctctccatcaagtgatgtcctggtggcttcatatcgcccgagagttgagctgccagacgctatcgccacatctcaagcgtctacaccacaatcaccggcacccaccggttcaggaaaactaggatgccacacactccttaggagaaccaccgccacatcctttgccagggaccatatctgcagtggtagcgtaagtgagttgcgaatgtcgaagtctgcaataataccctgcagagacaatcagcatctatttgcctatggagatgaatcgttgtacggagtccggacttggcggctgccttcgtttcagcggtacaccgatctcaagccccacaggcaaccggtccttgatctaaggtatgctgaaagttcaactggggagaggtaccttggttgcttaagtgccgaaaagctacaggttttcacaattaggtagcttgacagaggcattagcttggtttctggaattctggtagttgtgcttgtgcatgctaacatttgtttcttcagcagctttgctgtataagtaaaggccattgtccatccgtacagtcttcacttaaaacagcgtgtaaaaccatgctgtacatttcaaacaatctgttgtaacttgtaagaggctccagcatacaatacaccagcgggtgaaggattgcatatgctgtagtgttgtactgatgcagcattgcattttgtcatgaatcaaggaaacaaatgggtagcaatctgtcacacctttgaagcttcctgctgtgctcactcgctgatgttttcagtttgtaatcgtcattgtacttcact

SEQ ID NO: 83847 - DNA, 2132 bp, Zea Mays
cgctcaccgaccggcgccatcactcgctgaaatttcttttcccaatccagttcattctgccgctctccaatagtccaatccggtcgcggcgaagctcggccagacggccaccccaccccaatgccgtcacggtcgggctcccggggcaggcggccgcggccggccccagaggtggctgctcccacggctgtacaagtgagctcgtccggctcgagtgaggaagggagcgatgaggaggaggaggaggggagcgagggatccggtgacggtgcgaggagcccgggcggctctgccagcaagtataaggcggcggagagtgaagccgaggcggaggacccatgccttcccagctgccccatttgtatggtcgcgtggaccgctgatggttcgcatcgcgtgagttgcatcccctgtggacatgtctacggcagacattgcttagagatgtggttactgcagtacggcaagaaaaaggcaccgtgtcctcaatgtggcaagagatatacacagaacaacatcatcaacctctatgtaccagagattgttgttcccaataatgatcttgaaaagcaagtattgtccttgagagagagaaatgaatatcttgagaagcaacaagcaaaattacttgaggagataaaagagcataagaggcagattatgttgcaacaaaatataatatatgaatcaaacaaaaagagacagagagtgacagagcagtcatcagatggaatactaggggcagagctaattgcctcgcatacaaaggacattgaccacaacaatctgtcaagttttgctctccagaatgagtttttggtcgatggagctcgggtcatgggtatagatgcatccagtcaaattatattgacttcgggaagggcacatggagttagtgctgaacacatacttacaaaggttagcatgtttcatggacatggaatggagaaaatccaccttcctcctgatactaaagctattagggatatctgtgtactgcccgggggccatgttgtttttgcatcactgggcaggaagttgtctattttcagcatggctaccaacaatgttgtccttcaatatgatctgccggctcctggttggtcctgttcaggggattatactacttcaagtcatatttatgctgggttacagaacggcatgctattagtctttgatatccgtcaaacttctgcacctttgcattctagcatgggtctatcaacacacccagttcatacaatacactgcgctgtagatggcagtggttccaggaaggttttttctgcttcttctataggaccctgcgtttgggatgccagcgaaaacagctctccatcaagtgatgtcctggtggcttcatatcgcccgagagttgagctgccagacgctatcgccacatctcaagcgtctacaccacaatcaccggcacccaccggttcaggaaaactaggatgccacacactccttaggagaaccaccgccacatcctttgccagggaccatatctgcagtggtagcgtaagtgagttgcgaatgtcgaagtctgcaataataccctgcagagacaatcagcatctatttgcctatggagatgaatcgttgtacggagtccggacttggcggctgccttcgtttcagcggtacaccgatctcaagccccacaggcaaccggtccttgatctaaggtatgctgaaagttcaactggggagaggtaccttggttgcttaagtgccgaaaagctacaggttttcacaattaggtagcttgacagaggcattagcttggtttctggaattctggtagttgtgcttgtgcatgctaacatttgtttcttcagcagctttgctgtataagtaaaggccattgtccatccgtacagtcttcacttaaaacagcgtgtaaaaccatgctgtacatttcaaacaatctgttgtaacttgtaagaggctccagcatacaatacaccagcgggtgaaggattgcatatgctgtagtgttgtactgatgcagcattgcattttgtcatgaatcaaggaaacaaatgggtagcaatctgtcacacctttgaagcttcctgctgtgctcactcgctgatgttttcagtttgtaatcgtcattgtacttcact

SEQ ID NO: 83848 - DNA, 593 bp, Zea Mays
gctattaacatgtgacattccagggttgtgttctgtgattcagtagcagtgagtttttgggtgcagccagccaccggccaccgctatatcttccacggcttgtaaaaagcctgccaatttgccacagtacgaggtccaacttgtgctcggatgttctcagactatctatcggagaccaaggaggattcagggataaagaacatcatggtactggagcgcgggtttaacggatgggaggtttcagggcagcctgtctgcagctgcaccgacgctcattgcaaagggacgtgttcttaagcacacgagtttatatctctcttaggccttgaacaaccaaggatcggcatggtctccgtttctcttgtcggtggttacttcacctcattaaaactcattaaaatgattgacacgcgacagattattgggttggcaactcctttgtgggaactgcatgcataactaccaccagaccactgtcagacataagacacttcacggtgtactgccaggtggcagtattcgtttcagaattcacagttttttgcttctgcatgtgccttgcagctctgtgcatcgaactgagttagtgtttg

SEQ ID NO: 83849 - DNA, 923 bp, Zea Mays
cgagagccgagaggctccagttgtttatataagaaaaaaaaaaaggaagacctcaaattctgattttttgttcccttcaccgacggcgaggagtgagggttgacaacgggatggcgcggagcgtatcgtacgtttcggcggcgaagctggtatccatggcgcgaggcaatccccgcctcgccatcatcgacgtcagggatgaggagaggagctaccaggctcacatcgcgggttcgcaccacttcgccagcggcagcttcgaggcgcggatgccggagctggtgcgggccgccagcggcaaggacaccctcgttttccactgcgcgctgagccagggaaatatatatttgttggtctcaggctctcagccactaattgattgtatgatgaaccaacagtgatagcgtggatcttctgggaaaaccgatgttgtcatgctcaccagcctaaagaatagtacgaggtccaacttgtgctcggatgttctcagactatctatcggagaccaaggaggattcagggataaagaacatcatggtactggagcgcgggtttaacggatgggaggtttcagggcagcctgtctgcagctgcaccgacgctcattgcaaagggacgtgttcttaagcacacgagtttatatctctcttaggccttgaacaaccaaggatcggcatggtctccgtttctcttgtcggtggttacttcacctcattaaaactcattaaaatgattgacacgcgacagattattgggttggcaactcctttgtgggaactgcatgcataactaccaccagaccactgtcagacataagacacttcacggtgtactgccaggtggcagtattcgtttcagaattcacagttttttgcttctgcatgtgccttgcagctctgtgcatcgaactgagttagtgtttg

SEQ ID NO: 83850 - DNA, 922 bp, Zea Mays
tattttttttataatgacataattccttccaaatatctcgcagtgacggcctgacggggacgcgagagccgagaggctccagttgtttatataagaaaaaaaaaaaggaagacctcaaattctgattttttgttcccttcaccgacggcgaggagtgagggttgacaacgggatggcgcggagcgtatcgtacgtttcggcggcgaagctggtatccatggcgcgaggcaatccccgcctcgccatcatcgacgtcagggatgaggagaggagctaccaggctcacatcgcgggttcgcaccacttcgccagcggcagcttcgaggcgcggatgccggagctggtgcgggccgccagcggcaaggacaccctcgttttccactgcgcgctgagccagtgatagcgtggatcttctgggaaaaccgatgttgtcatgctcaccagcctaaagaatagtacgaggtccaacttgtgctcggatgttctcagactatctatcggagaccaaggaggattcagggataaagaacatcatggtactggagcgcgggtttaacggatgggaggtttcagggcagcctgtctgcagctgcaccgacgctcattgcaaagggacgtgttcttaagcacacgagtttatatctctcttaggccttgaacaaccaaggatcggcatggtctccgtttctcttgtcggtggttacttcacctcattaaaactcattaaaatgattgacacgcgacagattattgggttggcaactcctttgtgggaactgcatgcataactaccaccagaccactgtcagacataagacacttcacggtgtactgccaggtggcagtattcgtttcagaattcacagttttttgcttctgcatgtgccttgcagctctgtgcatcgaactgagttagtgtttg

SEQ ID NO: 83851 - DNA, 1854 bp, Zea Mays
ctgctctgctcgtgtgcctgcacttggcgctgctgtgcgtatattaaagccaaggcagcagccacggcgtgagcttccttccctcgttcattccctcccggttcaggccctgtagtcctgtaccaagttttcgtaggcattcggatcgaggcaggctaggctttcgtttcgtccggaagaagcaagctaaaggaaggcgatcggatcggaggccatcgggaacggaacggaacggaagaagcctcagctcgaggcgtactgatggcttcagaaagctcttcgtcagagtttgccaagatcgttcagtctaagcagacgaggcaagctcggctgtgcggagcggactctgagctactgagctccctggcgggcagcgacgcggaggtcatggtcaccatccccaacgagcagctggagcacgtggccgagttccaggaggaggccgacctctgggtcgccgccaacgtcgcgcggttcctcccgtcgaccaggatcacgcacgtcgtggcgggcgacgacgtgccggcgaactcccccggcagcgcccacttcctggtcccggcgatgctcaacctccggtcggcgctcgtcgccgcgggcctcggcggccgcgtcaaggtgtccagcgcgatgtccggcgaggcgctgtccgcgccggcgtggtccggcgtcgtgggccacgtcctgcggttcctcgagtcggccggctcgccgctgctcctcaagtcgtcgtcgcgcccgtcggaagaagccagcgacgccagggtcggccgcgcgtacgccgcgatgcgcgcgctgggcgtctcgggcgtccccgtgatcgcgacggacctcgcggccggcggcgacgccgtgccgtactactactcctactacggctacggctacccgggcggtcacggtcggcggcggtcgctggcgacgacggggacgttctgcgtggcgctgcaggacgcggaccccgcggcgctgcaggccgggctcaactgggcgtgcgggccgggccacgccgactgctcggccatccagcctggcggcgcctgctaccagcagaacaacctgccggcgatcgcgtcgtacgcatacaacgactactaccaggagatggccagcaccggcgccacctgctccttcaacggcaccgccaccaccaccaccaatgacccaagttcagggtcttgcgttttcgcgggaagctccacagcgggaggctcctccaactcgagcgtgccggtgggcgcaagcccgccgaccagcctctcccctccgacgggcttcgcacctccagtcggctccagccccccgtcgtcgtcgtcggagtttagccccccggcggtcggcaccgcccctttgtccggcttcaccccgccggacggaggcggcttcggcaccccgccgggttccttcaatggcaccgggacgttcgggccgagcggcacgctcagcccttacaacggcggggcccctgggctgtcgcgcgccggcttgagcttgacggctctgtccgccgctgcggtcgccgtgcttctcgcgtccattgatgcgatgtgaatcaaatcatcgatgcagagactagacatcccttttctctcgcgccgcaacatgttcttagttgttgatctactggtcatgtcatgtagatgtcaggtcagatttgtacgtattatttaggtgccgtgaatgtgaagcgaatgtctctgtatgcgtgtgcgttgggtgccgtagttctgatgagcgcatgtggatatacgcttatatgtatgtatgacacgacacaaaacttcagtacagtgatggattatatatttaccggtttggaatcagaaatggaggatgcagcatcctggttttttt

SEQ ID NO: 83852 - DNA, 215 bp, Zea Mays
cgcttccagccagtgctgcaacgcaagcttctgagcattctcgtccttcagcaacccctttccaacctgagagagaggcgtccaaattccaacagaaatgttagcagcccaacccacaaacattataaattcgttccacaatactggcactagcacaaaaagaaaaagaaaaaaaaaactgtgttaccttggcgactcgcgttcttgcccttgac

SEQ ID NO: 83853 - DNA, 380 bp, Zea Mays
ctcagaattatttattaggttgtgactcctttttagtcatcttctggagttgctcttataggtcaaaaagaaccagaatgaaaaaaatggaccctacgacatctactactcaaacagtatgttccattattctccttgttggcccctacctacctagtactgtacaccacttcatcatcgaactgtctgatgattttttcaaaacttttcatatcttcaataatgaattatccgaggactattcaagaaatgtttcagctgatgcaggtgcaactgcgtgcgtcactcagactcaactgcggctgccacggccagtgctccgtgctgcagaggcgaccggagcgcctccttcggcgtggacgcctcgcacccccttgctg

SEQ ID NO: 83854 - DNA, 3322 bp, Zea Mays
cttgcagaacgaaattactagctggagatcctaatcgtaacaatctagataatgttcaccagagatcctaattcctagccgtatcaatctgggagctccatcaatctagaccaaagatcctaaccatattgtcagcatgctctccaaatagattatagagtccagtttcaccacgttttcattcttcctattgtcagcatcgctctccaaatcccaaaaccctaacctatccatcgtcgccaccgtttaccgtcgctgccgccaatatgggagcaagaggaggaggaggaggcggccgcaaggcccgcaactttgcgaccttccgcctcttcccgcgcgccggcgccgccgaccccaacgaccgcgtgttcgtacgcgtcgacaacaacgactacactgtccccgggttcgccgacgaggactccttcgacccatcccggtccgacccttccgccggcaatggaaacttcggctccgcatccggccccctcccggagcacgtccgccgcgagatcctcgagctcggcctccctgacgacggttacaactacctctcccacctccgcgagctccgtcccgccgccgccgcagcctcatccttcgtccccagctccaccggtcgcccggagcccctcccgctcgatgtcaaggcttatgatgcaagcagggtacgcattggtctcagcgagggtgaactggacgaggggaagacgatgtgtaaggtggctgccaagactgcgccagtgaggcgaattgagaaggctgtcgacccagatatcgccaggttgctcgatgagagcgatgtgtctcatgttgggtccgaggatgaggggctggaggaggattttgtcatcatagctaaccaagctgaggaggaggaggaggatgaggatggagacatggaagaaaagcaagagtggaatggtgtcttcagtgatgttgaagaggaggagttcgattttgaggaggatgagccaaagccaagagtgagacgattgctggatgaacaatttgatttgcttgctttagaggaatatggagacagtgatgatgatgacatgggtgttaaaggtggggaatatgaactgccaaatgaggctattgatgaactgaaactgttccaaaatcagaatgtatgtgttgatgaagaatatagaacaccagcagattttgttcgtcaaaaactggattcaagcatggctgatgaggtggatgaatctgctcgtgtgataaaaaaatgtgctgaatatgctgaaatatatttaaatgaaactgcagaagaggaggtggttgtgcttgtttcggaaagcagtgatgaatctgaagtttgggactgtgagaccattgtttccacattctctaaccttgataatcatcctgggacaattgaaactccaggaatctccagagcgcggttccctagggttttccctggagaaacaactacaacaaatggcatcatcaagcttcatgggaaagagaaactgccagtagaatacctgccacagaggagaagaaatggtgaaaaggagaagaaagtaaagcctgtagaagcttctgtcactgataaatttaaaaaaggagctgagaaggaaacaaaagaggagaagaaggcaagaaaggcagcagtgaaagaagaaaagagagaagcccggaaagcaaagaaagagctcaaaggcctgtataaatcagaaacgcagaaggctcagaaagttgccgctgttactggaccttcttccattcgactaatgtgatggttgatctgtggcacgtttactgatgagcgacgactatgacagtcttgaatccaaaagatcgcctggacaaatgcatcaaagctacgaacgataggcgaagaggcagtggtagacatgccaaggtcatcagccggggcgtcatgcacagcagttgaccattctgagcagagcagaaaggatgatgaatatgagaggctggttacaagagctcaacatgcaacatctgatgttggcacgacaattttatctgagcaaccaaagtcaagatctttcatttggtggatgaaagttctgcttggctgcttccttcttatattagtgggctatgtcttcgtgaaatggggggtcccctttgtctttgagaaggttctcttgccaatcatgcaatgggaagccagtgcttttgggcgtccagtattagctattgttctcgttgcatctttggctctctttccagttattctagttccttctggaccttctatgtggttagcaggaatgatctttggatatggttggggtttcttgattataatggccgggagtactattggcatggtggttccatattggattggttcattgttccgtgaacgtctgcatgtatggctgacaaagtggcctcagcagatagcactaataaaactcgcgggtgaaggaaattggttccagcagtttcgggttgtcgcgcttttcagaatctcaccattcccatatacaatttttaattatgccgtgactgtgacagaaattaagttcaacccttatctatgtggttctgttgctggaatggtacctgaggccttcatttatatctacagtgggcgtttaatacgtacattggctgacatgaagtacggcaactataaaatgacaccagtggaaatagcatacaacgccatttccttcgtcatcgctatcgccctcacggtcgccttcacggtgtacgcgaagagagctctgggtgacataaaaagtccggacgatggcatcggtaaagacgaagaagatcacggcccaaatggctcaggggtgcgtatgaatcgtcgtcaggagcgtgccgacgcacgttacatagaactagatgatatgtgatggtgtgttggcccggatcttgcttggaaggaggcaccagtaggtcattaggtgcacggctacggtaggtagctagctatagtttacaagaggaggctaaaataatccacacccagctgacgtggtttgcgtgattcgtttcgtgtgctttgcctactgcactgccatactgtctgaatctgaaggtgcagggctactcactactgagttactgaccgagcgatgctgctctcaacgatgtttctgtgaccatcagcgtatcaatcagtccttgatctgaagcctacactggagcttcatgttgaagcatacattggacttgagtagtacatttgtatataacgtaactgctaatagagttagcatatgatctagttttgaacatgaagctcgtgggctgttcagccatgttcggtcccatcctgtctctgtctcaaattatatgttattatgggttttgttttttctgt

SEQ ID NO: 83855 - DNA, 1851 bp, Zea Mays
aaatagattatagagtccagtttcaccacgttttcattcttcctattgtcagcatcgctctccaaatcccaaaaccctaacctatccatcgtcgccaccgtttaccgtcgctgccgccaatatgggagcaagaggaggaggaggaggcggccgcaaggcccgcaactttgcgaccttccgcctcttcccgcgcgccggcgccgccgaccccaacgaccgcgtgttcgtacgcgtcgacaacaacgactacactgtccccgggttcgccgacgaggactccttcgacccatcccggtccgacccttccgccggcaatggaaacttcggctccgcatccggccccctcccggagcacgtccgccgcgagatcctcgagctcggcctccctgacgacggttacaactacctctcccacctccgcgagctccgtcccgccgccgccgcagcctcatccttcgtccccagctccaccggtcgcccggagcccctcccgctcgatgtcaaggcttatgatgcaagcagggtacgcattggtctcagcgagggtgaactggacgaggggaagacgatgtgtaaggtggctgccaagactgcgccagtgaggcgaattgagaaggctgtcgacccagatatcgccaggttgctcgatgagagcgatgtgtctcatgttgggtccgaggatgaggggctggaggaggattttgtcatcatagctaaccaagctgaggaggaggaggaggatgaggatggagacatggaagaaaagcaagagtggaatggtgtcttcagtgatgttgaagaggaggagttcgattttgaggaggatgagccaaagccaagagtgagacgattgctggatgaacaatttgatttgaggaatatggagacagtgatgatgatgacatgggtgttaaaggtggggaatatgaactgccaaatgaggctattgatgaactgaaactgttccaaaatcagaatgtatgtgttgatgaagaatatagaacaccagcagattttgttcgtcaaaaactggattcaagcatggctgatgaggtggatgaatctgctcgtgtgataaaaaaatgtgctgaatatgctgaaatatatttaaatgaaactgcagaagaggaggtggttgtgcttgtttcggaaagcagtgatgaatctgaagtttgggactgtgagaccattgtttccacattctctaaccttgataatcatcctgggacaattgaaactccaggaatctccagagcgcggttccctagggttttccctggagaaacaactacaacaaatggcatcatcaagcttcatgggaaagagaaactgccagtagaatacctgccacagaggagaagaaatggtgaaaaggagaagaaagtaaagcctgtagaagcttctgtcactgataaatttaaaaaaggagctgagaaggaaacaaaagaggagaagaaggcaagaaaggcagcagtgaaagaagaaaagagagaagcccggaaagcaaagaaagagctcaaaggcctgtataaatcagaaacgcagaaggctcagaaagttgccgctgttactggaccttcttccattcgactaatgtgatggttgatctgtggcacgtttactgatgagcgacgactatgacagtcttgaatccaaaagatcgcctggacaaatgcatcaaagctacgaacgatgtatgataccagttcatatttgtgctatactcatggattttgtcgacaggatacccaatgcttgcttactatatattagttagttgaaggagaagataattatacacacttatcgaaagcatgaaagatccttaaaagaaactttacgtcagaaaca

SEQ ID NO: 83856 - DNA, 3955 bp, Zea Mays
tgcaaaccaccagctccccctctggagtctcgtctcgcttccactccactgcgctgtgctcttccactccactgcctcctccctccctcgctcacacagcttccaacgattccattcccagctccctccctcctctccccaactttttcctccgtcccccgttcctcccctcccaacccatttcaaatcgcaccaaaacccccccgaggacctgcagcgaggcctcccctctccgcgctcgccctagcctagccaggcatccgccccccgcgtagatcccccattcctcggccccatcgctctctcgcccgcccgccgccggcggccagattccggatccgccgggaggtctcgttcggagacgggaggcgccgcccgtgcctgcctgatcggtcgctgagacttggcggcgggtcctggcatgggattgcggcgccggggcatttccccgaccaggcggcgggcggcggcctaagatgcgagggcggctggcccggggtgtggggcaccagctcggggaccgcttctcgccgtgcgccggcgtccgcctgctcatgctgccggccgcccggggccctcggcgacgggcattggggcgcgctcttcccgcgggctgctgagacgcggacgcgccgtgccaccagcctcccgccggccatgggcaacagcacgtcccgcgtcgtcggctgcttcgcgccgcccgacaaggccggcggcgtcgacctcgacttcctcgagccgctcgacgaagggctcggccactccttctgctacgtccgcccgggcggcggcgccgccgcagactcgcccgcgatcacgccctccaactccgagcgctacacgctcgattccagcgtcatggactcggagacccgcagcgggtccttccgccaggagcctgccgacgacctggccgccgccgccgccgctgccgccggtctgcagcggccctgcaggagcttcggcgagactaccttccggaccatatcgggggcctccgtcagcgcgaacgcgtcctccgccaggacgggcaacctcgccgtctccctcgccggtgacgtgcaggagcccgccgccgcgttcgagagcaccgcctccttcgccgccgtgcccttgcagccggtgccgcgaggctcgggggcgctcaacaccttcctgtcgggcccgctggagagaggattcgcgtccggcccgctggacaagggctccggcttcatgtctgggccattggacaagggagccttcatgtcaggccccatcgatggtggcagcagaagcaacttctcagcacctctttcctatggcgggaggaaggctcgtctcgggcgtcttgtacataggatcagcagacccatgaaaaccgcattgtccagaacattcagcaggagctcacaaaatccaggctgggttcaaaagtttctctcgcatcctatgactcaactgccctgggcaagggacgcaaagtccagatcagaaggctcacagaatggcttggaacccgggatacctgaacatgagtataatgtgacaaggaaccttcagtgggctcatggaaaggcaggggaagatagggtgcatgttgttctatccgaagagcaaggatggctattcattggaatttacgatggttttagtggccctgatgcacctgactttctaatgagcactctatacaaggccatcgataaagaactggaaggactgctctgggtctacgaagacagctctgaaaggagtgatcatgtatctactcatgaagagggtgaatcagttgctgcttctgtggatgctcctcatggtgatagtgaccagttccagagtgacagtgggaaacaagaacaagttggtaattttggaaaacaaaatatttcacctggaaagggttgtgatgaaagtgtcttgcaggttcagccaaactgtaccagcagtgaagagaaaaatttggctacacagggttcaactagtgagaagttggccagggatgagatagttgaggaaatggctggagctgatctgggaaatgatctccaaagtagagaatctcaaaactcaaacagaggtctttcagatacagatctaaacaacaattgtagctgtgcaacagaaaccacttcctattgtgatcagcatgccaaattcttgaaagaaaacagaaagagcaagcgtctttttgagcttcttgagatggaattgctagaagattataacaaaaggttatctaaggcatcaccaaaggaaaggaaaataccgaacttgcatgttacacaggcgggcactgcagaagtgttctcaagaaacacagctgaagtctccaggtgttcattggcagcaactggagaatgttttgatgattctgaagatcttggaagttcaagacacgctgatagtgtacttggcatagatattaaagagtgtactgggtgttccatatctacatcttcatcagggcacaagcaagttacgagaagatttgtgttcggatcaaagttgaggaagatgtacaaaaagcaaaaaatgctgcaaaagaagtttttcccgtggaactacgattggcacagagatcaacctcatgttgatgaaagtgttataaaatcttcagaggtcactaggagatgtaagtcagggcccgtagagcatgatgctgtattgagggcgatgtcacgggcgctggaaacgacagaggaagcatacatggatattgtggaaaatgagcttgatagacacccagaacttgcattaatgggttcttgtgtccttgtaatgttaatgaaggaccaggatgtatatgtcatgaatcttggggacagccgagctatcttggcacaggacaatgatcagtacaatagctcaagtttctcaaaaggagatttacgacatcgaaacaggtcaagggagtcacttgttcgtgttgaacttgataggatatcggaagagtcgccgatgcataatcctaacagtcacctaaacagcaacacaaaagctaaggaactgtcaatatgtagactaagaatgagagcggtgcaactgtcaactgaccatagcacgagtattgaggaggaagtcttgaggattaaagtagagcatcctgatgatccccattctgtctttaatgatagagtgaagggacagctgaaggttactagagcttttggtgctggttttctaaagaagccaaaatttaacgaggcactacttgagatgttcagcatcgactatgttggaacatcaccatatatcagctgcaacccttctgtacttcaccatcgtctctgtgcaaatgatcggtttcttgtactgtcctcagatggattgtatcaatatttcagcaatgatgaggtagtttcgcatgtgttgtggttcatggaaaatgtaccagagggagacccagcgcaataccttgtagctgaacttctttgtcgggcagccaagaagaatgggtgatcgtcggaaataccatgatgatgtttctgttatggtaatctcacttgaaggaagaatctggcgatcttctggatgagtgttgaaacatgacctggtctgttccttgcagccttgcttagtgtagtaaatcgactcaatcaggaaaggcaccaatgtcttgctgtctttatttttcaaccatgttcaaattctggcaatccatgtgccttctctgtcttatacgttttggatttgcgctgcattcttgggcagtccgaattgacgtatacatgtttttctcttttgttattaggaagaaaaggttctttggagggcagatatgttttcccggtgttcccttaaaatttatttttgtattgtggggttattattttattttttctatttttttacatttgctaaaaaaaggaccgttcttttctgagttggggcacagccgcacaggtgacgggtgtccatggtgttgtggatcgatgctaagcaattatgcattatgtttatgtgataaattgtt

SEQ ID NO: 83857 - DNA, 2307 bp, Zea Mays
tatagcttctaaaaattaaaagacaattaataaagcggatgattatcatctactgccttcaacaaaagaagcttttaatttggctagtgaaagagaggacaaagcagcagtaatcaaagtgaccaatccttttagcaaatattttacacaaatatattttagagaatgatatctacacaagaaaatatgaatagtatacaacagctttatcaatcttatcttctattccaaagctagaggcctatatatcacacaacaagtagcttcatgtaccaagtaatcttatcttctattccagagctagaggcctatcacacaagtaccttctataccaagtactggctatctcggtcatgaaaacgatgtgatcctagttttgtcttttattatatcacacagcttacctcggtcatgaaaacaatgtaattctagtttttatcttttgtcttttactaaagtatttaattatattacacaggttatctcggccatgaaaacgatgtaattctagttctctcttgtctttttattgaagtatttaattatatcagcagcctgcgaggaaggaccagctagtcttgtcatgagaaccatttctatattggtacggggcacaagcccgaatttgcatatttgactacgaactagcaaggcaaatcctttcgagcaagtctgggcatttcgtgaagaacgatgcgcaccctactttgttggctctggtcggcaagggactcgggttcatggaaggctctgactgggtgcgccatcgcagggtgatcaaccctgctttcaccattgacaagcttaagattgtgaccgagacgatgctggacttcgccgatagcatggcaggtgagttggaagctgaagcatcccagaacgagaacggagaaacacaagtggatatatacaaacatttcagcgatctgacagttgacaatatcgcctacgccatctttggaagcagctacaagttaggcaaacaagtgttcgaggcacaaactgagctgctggggatcaccatggctactttccttgacgtgcccataccaggatccaaataccttccaacccaagcgaatcggcgaaaatggatgctggagacgaagctcaagagcttactcacgcggatcatacagccacggttagcaagcggtgagcacggaaacgatctgctgggcgtgatgctggactcctgcactgagaccaagcaaggagggaagcagcagcaagtggatcgtctgcgtctcagcttgagcatggaggagatcatacacgagtgcaagctgttcttcttcgctggccacgagaacacagcccttctcctcacgtggtccgtgtatttgctcagcatataccccgagtggcaagaaaggctccggaaggaggtcttgagggagttcgggagggacgctcctaaccccaacgcgctcaacagattgaaagagatgacaatggtgttgttcgagaccttgaggctctactcgcctgctctcttcatgcaaaggaagaccctggccgacatgaccgtggggccaataaaactgcccaaaggcactgcaattgtgatacccattccgatcatgcatcgagacaagcaggcatggggcgacgacgcagacgagttcagtccgatgagatttgcgaatgggatcacgggagcagcgaaagttcctcacggcctgctggcgttctcgatggggccaaggtcttgcatcggccagaacttgtcgatgctggaagccaagtcgacgctggccctgatgctccgcaagttctccttcgctctctcccctgactacgtgcacgcgcccgtggatctcttcactctcaaacctaagtttggccttcccgtcattctgaggccactggataatgttttgatttgagttgggcatatagtacaacaggaagtaacttaggtacatatcaaatttgctagctggtcaaaacgttatatgatgttctcaaccctccgttgttctatatcgttgaaaacaagtattttaatttaggtgcggtttggtttggcgctgcaagcgaaaatggggacgtaaatccggaattaattatagcaaaacatctcttcaagcttgaagtagttcataaatgaagactggtaaagtgtctgtaagttgctacagattctatttatgtctaagtatagaacataaaacataaaaacacggctgatttgttagctaggtggatgtaaatataggtttagagccaataactatggttcaaatcaccatttgtgcataattttaatatttttattatttaatcactactggaatcttcggc

SEQ ID NO: 83858 - DNA, 1894 bp, Zea Mays
ctagcctcggatccagctgcggatcatcatcaggttctccgttccactccatggccttccctgctgtgcccctcctcgccgctctgctcctggtcgccgccacgcggctgtgggactacgtcttcgtgcgcctcgtatggcggccgtacgccatcaccaaggggttcagagagcaagggatccatggaccctcctacaggttcttcaagggctgcaacgaggagatcaggagcatgaaggagaagaccgacggtctcgtgctggacgtcggcgaccacaagtacctcccgcggatcgcgccgcactacctcgaatggagggctcagtacggagaaccatttctatattggtacggggcacaagcccgaatttgcatatttgactacgaactagcaaggcaaatcctttcgagcaagtctgggcatttcgtgaagaacgatgcgcaccctactttgttggctctggtcggcaagggactcgggttcatggaaggctctgactgggtgcgccatcgcagggtgatcaaccctgctttcaccattgacaagcttaagctacaagttaggcaaacaagtgttcgaggcacaaactgagctgctggggatcaccatggctactttccttgacgtgcccataccaggatccaaataccttccaacccaagcgaatcggcgaaaatggatgctggagacgaagctcaagagcttactcacgcggatcatacagccacggttagcaagcggtgagcacggaaacgatctgctgggcgtgatgctggactcctgcactgagaccaagcaaggagggaagcagcagcaagtggatcgtctgcgtctcagcttgagcatggaggagatcatacacgagtgcaagctgttcttcttcgctggccacgagaacacagcccttctcctcacgtggtccgtgtatttgctcagcatataccccgagtggcaagaaaggctccggaaggaggtcttgagggagttcgggagggacgctcctaaccccaacgcgctcaacagattgaaagagatgacaatggtgttgttcgagaccttgaggctctactcgcctgctctcttcatgcaaaggaagaccctggccgacatgaccgtggggccaataaaactgcccaaaggcactgcaattgtgatacccattccgatcatgcatcgagacaagcaggcatggggcgacgacgcagacgagttcagtccgatgagatttgcgaatgggatcacgggagcagcgaaagttcctcacggcctgctggcgttctcgatggggccaaggtcttgcatcggccagaacttgtcgatgctggaagccaagtcgacgctggccctgatgctccgcaagttctccttcgctctctcccctgactacgtgcacgcgcccgtggatctcttcactctcaaacctaagtttggccttcccgtcattctgaggccactggataatgttttgatttgagttgggcatatagtacaacaggaagtaacttaggtacatatcaaatttgctagctggtcaaaacgttatatgatgttctcaaccctccgttgttctatatcgttgaaaacaagtattttaatttaggtgcggtttggtttggcgctgcaagcgaaaatggggacgtaaatccggaattaattatagcaaaacatctcttcaagcttgaagtagttcataaatgaagactggtaaagtgtctgtaagttgctacagattctatttatgtctaagtatagaacataaaacataaaaacacggctgatttgttagctaggtggatgtaaatataggtttagagccaataactatggttcaaatcaccatttgtgcataattttaatatttttattatttaatcactactggaatcttcggc

SEQ ID NO: 83859 - DNA, 2017 bp, Zea Mays
ctagcctcggatccagctgcggatcatcatcaggttctccgttccactccatggccttccctgctgtgcccctcctcgccgctctgctcctggtcgccgccacgcggctgtgggactacgtcttcgtgcgcctcgtatggcggccgtacgccatcaccaaggggttcagagagcaagggatccatggaccctcctacaggttcttcaagggctgcaacgaggagatcaggagcatgaaggagaagaccgacggtctcgtgctggacgtcggcgaccacaagtacctcccgcggatcgcgccgcactacctcgaatggagggctcagtacggagaaccatttctatattggtacggggcacaagcccgaatttgcatatttgactacgaactagcaaggcaaatcctttcgagcaagtctgggcatttcgtgaagaacgatgcgcaccctactttgttggctctggtcggcaagggactcgggttcatggaaggctctgactgggtgcgccatcgcagggtgatcaaccctgctttcaccattgacaagcttaagcatggcaggtgagttggaagctgaagcatcccagaacgagaacggagaaacacaagtggatatatacaaacatttcagcgatctgacagttgacaatatcgcctacgccatctttggaagcagctacaagttaggcaaacaagtgttcgaggcacaaactgagctgctggggatcaccatggctactttccttgacgtgcccataccaggatccaaataccttccaacccaagcgaatcggcgaaaatggatgctggagacgaagctcaagagcttactcacgcggatcatacagccacggttagcaagcggtgagcacggaaacgatctgctgggcgtgatgctggactcctgcactgagaccaagcaaggagggaagcagcagcaagtggatcgtctgcgtctcagcttgagcatggaggagatcatacacgagtgcaagctgttcttcttcgctggccacgagaacacagcccttctcctcacgtggtccgtgtatttgctcagcatataccccgagtggcaagaaaggctccggaaggaggtcttgagggagttcgggagggacgctcctaaccccaacgcgctcaacagattgaaagagatgacaatggtgttgttcgagaccttgaggctctactcgcctgctctcttcatgcaaaggaagaccctggccgacatgaccgtggggccaataaaactgcccaaaggcactgcaattgtgatacccattccgatcatgcatcgagacaagcaggcatggggcgacgacgcagacgagttcagtccgatgagatttgcgaatgggatcacgggagcagcgaaagttcctcacggcctgctggcgttctcgatggggccaaggtcttgcatcggccagaacttgtcgatgctggaagccaagtcgacgctggccctgatgctccgcaagttctccttcgctctctcccctgactacgtgcacgcgcccgtggatctcttcactctcaaacctaagtttggccttcccgtcattctgaggccactggataatgttttgatttgagttgggcatatagtacaacaggaagtaacttaggtacatatcaaatttgctagctggtcaaaacgttatatgatgttctcaaccctccgttgttctatatcgttgaaaacaagtattttaatttaggtgcggtttggtttggcgctgcaagcgaaaatggggacgtaaatccggaattaattatagcaaaacatctcttcaagcttgaagtagttcataaatgaagactggtaaagtgtctgtaagttgctacagattctatttatgtctaagtatagaacataaaacataaaaacacggctgatttgttagctaggtggatgtaaatataggtttagagccaataactatggttcaaatcaccatttgtgcataattttaatatttttattatttaatcactactggaatcttcggc

SEQ ID NO: 83860 - DNA, 1968 bp, Zea Mays
ctccacgcgtgtcacactgctgcgccgctcgctagcctcggatccagctgcggatcatcatcaggttctccgttccactccatggccttccctgctgtgcccctcctcgccgctctgctcctggtcgccgccacgcggctgtgggactacgtcttcgtgcgcctcgtatggcggccgtacgccatcaccaaggggttcagagagcaagggatccatggaccctcctacaggttcttcaagggctgcaacgaggagatcaggagcatgaaggagaagaccgacggtctcgtgctggacgtcggcgaccacaagtacctcccgcggatcgcgccgcactacctcgaatggagggctcagtacggagaaccatttctatattggtacggggcacaagcccgaatttgcatatttgactacgaactagcaaggcaaatcctttcgagcaagtctgggcatttcgtgaagaacgatgcgcaccctactttgttggctctggtcggcaagggactcgggttcatggaaggctctgactgggtgcgccatcgcagggtgatcaaccctgctttcaccattgacaagcttaagattgtgaccgagacgatgctggacttcgccgatagcatggcagctacaagttaggcaaacaagtgttcgaggcacaaactgagctgctggggatcaccatggctactttccttgacgtgcccataccaggatccaaataccttccaacccaagcgaatcggcgaaaatggatgctggagacgaagctcaagagcttactcacgcggatcatacagccacggttagcaagcggtgagcacggaaacgatctgctgggcgtgatgctggactcctgcactgagaccaagcaaggagggaagcagcagcaagtggatcgtctgcgtctcagcttgagcatggaggagatcatacacgagtgcaagctgttcttcttcgctggccacgagaacacagcccttctcctcacgtggtccgtgtatttgctcagcatataccccgagtggcaagaaaggctccggaaggaggtcttgagggagttcgggagggacgctcctaaccccaacgcgctcaacagattgaaagagatgacaatggtgttgttcgagaccttgaggctctactcgcctgctctcttcatgcaaaggaagaccctggccgacatgaccgtggggccaataaaactgcccaaaggcactgcaattgtgatacccattccgatcatgcatcgagacaagcaggcatggggcgacgacgcagacgagttcagtccgatgagatttgcgaatgggatcacgggagcagcgaaagttcctcacggcctgctggcgttctcgatggggccaaggtcttgcatcggccagaacttgtcgatgctggaagccaagtcgacgctggccctgatgctccgcaagttctccttcgctctctcccctgactacgtgcacgcgcccgtggatctcttcactctcaaacctaagtttggccttcccgtcattctgaggccactggataatgttttgatttgagttgggcatatagtacaacaggaagtaacttaggtacatatcaaatttgctagctggtcaaaacgttatatgatgttctcaaccctccgttgttctatatcgttgaaaacaagtattttaatttaggtgcggtttggtttggcgctgcaagcgaaaatggggacgtaaatccggaattaattatagcaaaacatctcttcaagcttgaagtagttcataaatgaagactggtaaagtgtctgtaagttgctacagattctatttatgtctaagtatagaacataaaacataaaaacacggctgatttgttagctaggtggatgtaaatataggtttagagccaataactatggttcaaatcaccatttgtgcataattttaatatttttattatttaatcactactggaatcttcggc

SEQ ID NO: 83861 - DNA, 1837 bp, Zea Mays
ccaccgcgctcgccctcttcgtcgttgccgtccgtctccacagtccccacccatattccattttggttatcctcttgcgtcacacctcctccctcctggcctcctcctgcggcccacttatatataccaccacgtcgatgcgctgctccgccggcatctccatcgccgtcgcgccgccgtagatggcctgacatttttcacttcatttgtcatcccaattccacaaacctcgcgcgcggcggcggagggaaacaaaaaaaaaaaggaaggatggcgttggagccggtggcgcgggcggtggcggaggaggtggcgcgctggggcgcgatgcgccagaccggggtcagcttgcgctacatgatggagttcggggtgcgccccacggagcggaccctcctgctcgccgcacagttcctgcacaaggagctccccatccgcatcgcgcgacgggcgctcgacctcgactcgctccccttcggcctctccaccaagcccgccatcctcaaggtgagagattggtatgtggagtcattccgtgacatccggtccttcccagaggtgaagaaccaggaagatgaactcgccttcacccagatgatcaaaatgatcaaggtgcggcacaccaatgtggtgcctgcggttgcattgggtgtgcagcagctgaagaaggacttgggtggtccaaaggcgttcccacctggaatccatgagatccatcagttccttgatcgcttctacatgtcaaggattgggatccggatgctgatagggcagcacgtcgctttgcatgaccctgatccagagcctggtgtgatagggcttataaacacaaaaatgtcacccatgacagtagctcgaattgctagtgaagatgcacgtgctatttgcatgcgggagtatggatcatctcctaatgtcgacatatatggtgatccggggtttacattcccatatgttacaccacatctacatctcatgatttttgagctggtgaagaactcccttcgcgcagtacaggaacggtatatggattctgataagcttgcacctccggttcgaatcatagttgctgatggagcagaggacgtgactattaagccaaaggagtaaaagagatttaagggaagttcactctatttatttcttgctggcctgaggagacaagacccgtattaatagtcatccagcaatgtcagctgactttttttttcttctggttacagccaaatgcaactagcagaaatgtaaataaacgccctttatgatgctaacagatagccaatccaactaactggctaacgccttttgttagaattttctcattaattgtgatattcaaccgacaaacttgtatcttctgcacctatgttagcaaaaatcaatagcttcgattattcatgatctggtatgaagtatgaactgtttgactaaaccatacttttgcagattactgatgaaggtggtggaataccaaggagtggtctctcaagaatttttacgtatctctatagtacagcagaaaaccctcctgatcttgatgtacataatgaaggagtaactatggctggatatggttatgggattcctattagtcgtctttatgctcgatatttcggcggggacttgcagatcatctctatggaaggatatggaactgatgcatacctccacttatcacggctgggagattcggaggaacccttgacttaatcgattcataagaagccattcctcattcctgtagtgtcacaccaataagcgaaggcagtggagacgccttcggcgtggcgggtctggagccgacgacggcatgacttgggatatattttattgggat

SEQ ID NO: 83862 - DNA, 1691 bp, Zea Mays
ccaccgcgctcgccctcttcgtcgttgccgtccgtctccacagtccccacccatattccattttggttatcctcttgcgtcacacctcctccctcctggcctcctcctgcggcccacttatatataccaccacgtcgatgcgctgctccgccggcatctccatcgccgtcgcgccgccgtagatggcctgacatttttcacttcatttgtcatcccaattccacaaacctcgcgcgcggcggcggagggaaacaaaaaaaaaaaggaaggatggcgttggagccggtggcgcgggcggtggcggaggaggtggcgcgctggggcgcgatgcgccagaccggggtcagcttgcgctacatgatggagttcggggtgcgccccacggagcggaccctcctgctcgccgcacagttcctgcacaaggagctccccatccgcatcgcgcgacgggcgctcgacctcgactcgctccccttcggcctctccaccaagcccgccatcctcaaggtgagagattggtatgtggagtcattccgtgacatccggtccttcccagaggtgaagaaccaggaagatgaactcgccttcacccagatgatcaaaatgatcaaggtgcggcacaccaatgtggtgcctgcggttgcattgggtgtgcagcagctgaagaaggacttgggtggtccaaaggcgttcccacctggaatccatgagatccatcagttccttgatcgcttctacatgtcaaggattgggatccggatgctgatagatatgttacaccacatctacatctcatgatttttgagctggtgaagaactcccttcgcgcagtacaggaacggtatatggattctgataagcttgcacctccggttcgaatcatagttgctgatggagcagaggacgtgactattaagccaaaggagtaaaagagatttaagggaagttcactctatttatttcttgctggcctgaggagacaagacccgtattaatagtcatccagcaatgtcagctgactttttttttcttctggttacagccaaatgcaactagcagaaatgtaaataaacgccctttatgatgctaacagatagccaatccaactaactggctaacgccttttgttagaattttctcattaattgtgatattcaaccgacaaacttgtatcttctgcacctatgttagcaaaaatcaatagcttcgattattcatgatctggtatgaagtatgaactgtttgactaaaccatacttttgcagattactgatgaaggtggtggaataccaaggagtggtctctcaagaatttttacgtatctctatagtacagcagaaaaccctcctgatcttgatgtacataatgaaggagtaactatggctggatatggttatgggattcctattagtcgtctttatgctcgatatttcggcggggacttgcagatcatctctatggaaggatatggaactgatgcatacctccacttatcacggctgggagattcggaggaacccttgacttaatcgattcataagaagccattcctcattcctgtagttaggactctattgctttctcaattaccgtgctggtgtcacaccaataagcgaaggcagtggagacgccttcggcgtggcgggtctggagccgacgacggcatgacttgggatatattttattgggat

SEQ ID NO: 83863 - DNA, 1358 bp, Zea Mays
ccaccgcgctcgccctcttcgtcgttgccgtccgtctccacagtccccacccatattccattttggttatcctcttgcgtcacacctcctccctcctggcctcctcctgcggcccacttatatataccaccacgtcgatgcgctgctccgccggcatctccatcgccgtcgcgccgccgtagatggcctgacatttttcacttcatttgtcatcccaattccacaaacctcgcgcgcggcggcggagggaaacaaaaaaaaaaaggaaggatggcgttggagccggtggcgcgggcggtggcggaggaggtggcgcgctggggcgcgatgcgccagaccggggtcagcttgcgctacatgatggagttcggggtgcgccccacggagcggaccctcctgctcgccgcacagttcctgcacaaggagctccccatccgcatcgcgcgacgggcgctcgacctcgactcgctccccttcggcctctccaccaagcccgccatcctcaagatatgttacaccacatctacatctcatgatttttgagctggtgaagaactcccttcgcgcagtacaggaacggtatatggattctgataagcttgcacctccggttcgaatcatagttgctgatggagcagaggacgtgactattaagccaaaggagtaaaagagatttaagggaagttcactctatttatttcttgctggcctgaggagacaagacccgtattaatagtcatccagcaatattactgatgaaggtggtggaataccaaggagtggtctctcaagaatttttacgtatctctatagtacagcagaaaaccctcctgatcttgatgtacataatgaaggagtaactatggctggatatggttatgggattcctattagtcgtctttatgctcgatatttcggcggggacttgcagatcatctctatggaaggatatggaactgatgcatacctccacttatcacggctgggagattcggaggaacccttgacttaatcgattcataagaagccattcctcattcctgtagttaggactctattgctttctcaattaccgtgctggtatgcaaatattgttctgaaggccagtcacctattagttcagctgtccatgccctatttgttatctttgttgttcattcatcatctcgatggaatgtgatcataattcagaatagttttgcttctggtttgtactgtcattataattgttcaacctccaataatggtatctgtcgagcacccgaggcattgaatttgagtaatggaattcaccataattgttcaacctccaataaagtctgtaactccaattcttcaaagcatgttttttagttcga

SEQ ID NO: 83864 - DNA, 2051 bp, Zea Mays
ccaccgcgctcgccctcttcgtcgttgccgtccgtctccacagtccccacccatattccattttggttatcctcttgcgtcacacctcctccctcctggcctcctcctgcggcccacttatatataccaccacgtcgatgcgctgctccgccggcatctccatcgccgtcgcgccgccgtagatggcctgacatttttcacttcatttgtcatcccaattccacaaacctcgcgcgcggcggcggagggaaacaaaaaaaaaaaggaaggatggcgttggagccggtggcgcgggcggtggcggaggaggtggcgcgctggggcgcgatgcgccagaccggggtcagcttgcgctacatgatggagttcggggtgcgccccacggagcggaccctcctgctcgccgcacagttcctgcacaaggagctccccatccgcatcgcgcgacgggcgctcgacctcgactcgctccccttcggcctctccaccaagcccgccatcctcaaggtgagagattggtatgtggagtcattccgtgacatccggtccttcccagaggtgaagaaccaggaagatgaactcgccttcacccagatgatcaaaatgatcaaggtgcggcacaccaatgtggtgcctgcggttgcattgggtgtgcagcagctgaagaaggacttgggtggtccaaaggcgttcccacctggaatccatgagatccatcagttccttgatcgcttctacatgtcaaggattgggatccggatgctgatagcacgtcgctttgcatgaccctgatccagagcctggtgtgatagggcttataaacacaaaaatgtcacccatgacagtagctcgaattgctagtgaagatgcacgtgctatttgcatgcgggagtatggatcatctcctaatgtcgacatatatggtgatccggggtttacattcccatatgttacaccacatctacatctcatgatttttgagctggtgaagaactcccttcgcgcagtacaggaacggtatatggattctgataagcttgcacctccggttcgaatcatagttgctgatggagcagaggacgtgactattaagccaaaggagtaaaagagatttaagggaagttcactctatttatttcttgctggcctgaggagacaagacccgtattaatagtcatccagcaatgtcagctgactttttttttcttctggttacagccaaatgcaactagcagaaatgtaaataaacgccctttatgatgctaacagatagccaatccaactaactggctaacgccttttgttagaattttctcattaattgtgatattcaaccgacaaacttgtatcttctgcacctatgttagcaaaaatcaatagcttcgattattcatgatctggtatgaagtatgaactgtttgactaaaccatacttttgcagattactgatgaaggtggtggaataccaaggagtggtctctcaagaatttttacgtatctctatagtacagcagaaaaccctcctgatcttgatgtacataatgaaggagtaactatggctggatatggttatgggattcctattagtcgtctttatgctcgatatttcggcggggacttgcagatcatctctatggaaggatatggaactgatgcatacctccacttatcacggctgggagattcggaggaacccttgacttaatcgattcataagaagccattcctcattcctgtagttaggactctattgctttctcaattaccgtgctggtatgcaaatattgttctgaaggccagtcacctattagttcagctgtccatgccctatttgttatctttgttgttcattcatcatctcgatggaatgtgatcataattcagaatagttttgcttctggtttgtactgtcattataattgttcaacctccaataatggtatctgtcgagcacccgaggcattgaatttgagtaatggaattcaccataattgttcaacctccaataaagtctgtaactccaattcttcaaagcatgttttttagttcga

SEQ ID NO: 83865 - DNA, 1854 bp, Zea Mays
ccaccgcgctcgccctcttcgtcgttgccgtccgtctccacagtccccacccatattccattttggttatcctcttgcgtcacacctcctccctcctggcctcctcctgcggcccacttatatataccaccacgtcgatgcgctgctccgccggcatctccatcgccgtcgcgccgccgtagatggcctgacatttttcacttcatttgtcatcccaattccacaaacctcgcgcgcggcggcggagggaaacaaaaaaaaaaaggaaggatggcgttggagccggtggcgcgggcggtggcggaggaggtggcgcgctggggcgcgatgcgccagaccggggtcagcttgcgctacatgatggagttcggggtgcgccccacggagcggaccctcctgctcgccgcacagttcctgcacaaggagctccccatccgcatcgcgcgacgggcgctcgacctcgactcgctccccttcggcctctccaccaagcccgccatcctcaaggtgagagattggtatgtggagtcattccgtgacatccggtccttcccagaggtgaagaaccaggaagatgaactcgccttcacccagatgatcaaaatgatcaaggtgcggcacaccaatgtggtgcctgcggttgcattgggtgtgcagcagctgaagaaggacttgggtggtccaaaggcgttcccacctggaatccatgagatccatcagttccttgatcgcttctacatgtcaaggattgggatccggatgctgatagggcagcacgtcgctttgcatgaccctgatccagagcctggtgtgatagggcttataaacacaaaaatgtcacccatgacagtagctcgaattgctagtgaagatgcacgtgctatttgcatgcgggagtatggatcatctcctaatgtcgacatatatggtgatccggggtttacattcccatatgttacaccacatctacatctcatgatttttgagctggtgaagaactcccttcgcgcagtacaggaacggtatatggattctgataagcttgcacctccggttcgaatcatagttgctgatggagcagaggacgtgactattaagccaaaggagtaaaagagatttaagggaagttcactctatttatttcttgctggcctgaggagacaagacccgtattaatagtcatccagcaatgtcagctgactttttttttcttctggttacagccaaatgcaactagcagaaatattactgatgaaggtggtggaataccaaggagtggtctctcaagaatttttacgtatctctatagtacagcagaaaaccctcctgatcttgatgtacataatgaaggagtaactatggctggatatggttatgggattcctattagtcgtctttatgctcgatatttcggcggggacttgcagatcatctctatggaaggatatggaactgatgcatacctccacttatcacggctgggagattcggaggaacccttgacttaatcgattcataagaagccattcctcattcctgtagttaggactctattgctttctcaattaccgtgctggtatgcaaatattgttctgaaggccagtcacctattagttcagctgtccatgccctatttgttatctttgttgttcattcatcatctcgatggaatgtgatcataattcagaatagttttgcttctggtttgtactgtcattataattgttcaacctccaataatggtatctgtcgagcacccgaggcattgaatttgagtaatggaattcaccataattgttcaacctccaataaagtctgtaactccaattcttcaaagcatgttttttagttcga

SEQ ID NO: 83866 - DNA, 1703 bp, Zea Mays
ccaccgcgctcgccctcttcgtcgttgccgtccgtctccacagtccccacccatattccattttggttatcctcttgcgtcacacctcctccctcctggcctcctcctgcggcccacttatatataccaccacgtcgatgcgctgctccgccggcatctccatcgccgtcgcgccgccgtagatggcctgacatttttcacttcatttgtcatcccaattccacaaacctcgcgcgcggcggcggagggaaacaaaaaaaaaaaggaaggatggcgttggagccggtggcgcgggcggtggcggaggaggtggcgcgctggggcgcgatgcgccagaccggggtcagcttgcgctacatgatggagttcggggtgcgccccacggagcggaccctcctgctcgccgcacagttcctgcacaaggagctccccatccgcatcgcgcgacgggcgctcgacctcgactcgctccccttcggcctctccaccaagcccgccatcctcaaggtgagagattggtatgtggagtcattccgtgacatccggtccttcccagaggtgaagaaccaggaagatgaactcgccttcacccagatgatcaaaatgatcaaggtgcggcacaccaatgtggtgcctgcggttgcattgggtgtgcagcagctgaagaaggacttgggtggtccaaaggcgttcccacctggaatccatgagatccatcagttccttgatcgcttctacatgtcaaggattgggatccggatgctgatagcacgtcgctttgcatgaccctgatccagagcctggtgtgatagggcttataaacacaaaaatgtcacccatgacagtagctcgaattgctagtgaagatgcacgtgctatttgcatgcgggagtatggatcatctcctaatgtcgacatatatggtgatccggggtttacattcccatatgttacaccacatctacatctcatgatttttgagctggtgaagaactcccttcgcgcagtacaggaacggtatatggattctgataagcttgcacctccggttcgaatcatagttgctgatggagcagaggacgtgactattaagattactgatgaaggtggtggaataccaaggagtggtctctcaagaatttttacgtatctctatagtacagcagaaaaccctcctgatcttgatgtacataatgaaggagtaactatggctggatatggttatgggattcctattagtcgtctttatgctcgatatttcggcggggacttgcagatcatctctatggaaggatatggaactgatgcatacctccacttatcacggctgggagattcggaggaacccttgacttaatcgattcataagaagccattcctcattcctgtagttaggactctattgctttctcaattaccgtgctggtatgcaaatattgttctgaaggccagtcacctattagttcagctgtccatgccctatttgttatctttgttgttcattcatcatctcgatggaatgtgatcataattcagaatagttttgcttctggtttgtactgtcattataattgttcaacctccaataatggtatctgtcgagcacccgaggcattgaatttgagtaatggaattcaccataattgttcaacctccaataaagtctgtaactccaattcttcaaagcatgttttttagttcga

SEQ ID NO: 83867 - DNA, 1801 bp, Zea Mays
ccaccgcgctcgccctcttcgtcgttgccgtccgtctccacagtccccacccatattccattttggttatcctcttgcgtcacacctcctccctcctggcctcctcctgcggcccacttatatataccaccacgtcgatgcgctgctccgccggcatctccatcgccgtcgcgccgccgtagatggcctgacatttttcacttcatttgtcatcccaattccacaaacctcgcgcgcggcggcggagggaaacaaaaaaaaaaaggaaggatggcgttggagccggtggcgcgggcggtggcggaggaggtggcgcgctggggcgcgatgcgccagaccggggtcagcttgcgctacatgatggagttcggggtgcgccccacggagcggaccctcctgctcgccgcacagttcctgcacaaggagctccccatccgcatcgcgcgacgggcgctcgacctcgactcgctccccttcggcctctccaccaagcccgccatcctcaaggtgagagattggtatgtggagtcattccgtgacatccggtccttcccagaggtgaagaaccaggaagatgaactcgccttcacccagatgatcaaaatgatcaaggtgcggcacaccaatgtggtgcctgcggttgcattgggtgtgcagcagctgaagaaggacttgggtggtccaaaggcgttcccacctggaatccatgagatccatcagttccttgatcgcttctacatgtcaaggattgggatccggatgctgatagggcagcacgtcgctttgcatgaccctgatccagagcctggtgtgatagggcttataaacacaaaaatgtcacccatgacagtagctcgaattgctagtgaagatgcacgtgctatttgcatgcgggagtatggatcatctcctaatgtcgacatatatggtgatccggggtttacattcccatatgttacaccacatctacatctcatgatttttgagctggtgaagaactcccttcgcgcagtacaggaacggtatatggattctgataagcttgcacctccggttcgaatcatagttgctgatggagcagaggacgtgactattaagccaaaggagtaaaagagatttaagggaagttcactctatttatttcttgctggcctgaggagacaagacccgtattaatagtcatccagcaatattactgatgaaggtggtggaataccaaggagtggtctctcaagaatttttacgtatctctatagtacagcagaaaaccctcctgatcttgatgtacataatgaaggagtaactatggctggatatggttatgggattcctattagtcgtctttatgctcgatatttcggcggggacttgcagatcatctctatggaaggatatggaactgatgcatacctccacttatcacggctgggagattcggaggaacccttgacttaatcgattcataagaagccattcctcattcctgtagttaggactctattgctttctcaattaccgtgctggtatgcaaatattgttctgaaggccagtcacctattagttcagctgtccatgccctatttgttatctttgttgttcattcatcatctcgatggaatgtgatcataattcagaatagttttgcttctggtttgtactgtcattataattgttcaacctccaataatggtatctgtcgagcacccgaggcattgaatttgagtaatggaattcaccataattgttcaacctccaataaagtctgtaactccaattcttcaaagcatgttttttagttcga

SEQ ID NO: 83868 - DNA, 2049 bp, Zea Mays
ccaccgcgctcgccctcttcgtcgttgccgtccgtctccacagtccccacccatattccattttggttatcctcttgcgtcacacctcctccctcctggcctcctcctgcggcccacttatatataccaccacgtcgatgcgctgctccgccggcatctccatcgccgtcgcgccgccgtagatggcctgacatttttcacttcatttgtcatcccaattccacaaacctcgcgcgcggcggcggagggaaacaaaaaaaaaaaggaaggatggcgttggagccggtggcgcgggcggtggcggaggaggtggcgcgctggggcgcgatgcgccagaccggggtcagcttgcgctacatgatggagttcggggtgcgccccacggagcggaccctcctgctcgccgcacagttcctgcacaaggagctccccatccgcatcgcgcgacgggcgctcgacctcgactcgctccccttcggcctctccaccaagcccgccatcctcaagattggtatgtggagtcattccgtgacatccggtccttcccagaggtgaagaaccaggaagatgaactcgccttcacccagatgatcaaaatgatcaaggtgcggcacaccaatgtggtgcctgcggttgcattgggtgtgcagcagctgaagaaggacttgggtggtccaaaggcgttcccacctggaatccatgagatccatcagttccttgatcgcttctacatgtcaaggattgggatccggatgctgatagggcagcacgtcgctttgcatgaccctgatccagagcctggtgtgatagggcttataaacacaaaaatgtcacccatgacagtagctcgaattgctagtgaagatgcacgtgctatttgcatgcgggagtatggatcatctcctaatgtcgacatatatggtgatccggggtttacattcccatatgttacaccacatctacatctcatgatttttgagctggtgaagaactcccttcgcgcagtacaggaacggtatatggattctgataagcttgcacctccggttcgaatcatagttgctgatggagcagaggacgtgactattaagccaaaggagtaaaagagatttaagggaagttcactctatttatttcttgctggcctgaggagacaagacccgtattaatagtcatccagcaatgtcagctgactttttttttcttctggttacagccaaatgcaactagcagaaatgtaaataaacgccctttatgatgctaacagatagccaatccaactaactggctaacgccttttgttagaattttctcattaattgtgatattcaaccgacaaacttgtatcttctgcacctatgttagcaaaaatcaatagcttcgattattcatgatctggtatgaagtatgaactgtttgactaaaccatacttttgcagattactgatgaaggtggtggaataccaaggagtggtctctcaagaatttttacgtatctctatagtacagcagaaaaccctcctgatcttgatgtacataatgaaggagtaactatggctggatatggttatgggattcctattagtcgtctttatgctcgatatttcggcggggacttgcagatcatctctatggaaggatatggaactgatgcatacctccacttatcacggctgggagattcggaggaacccttgacttaatcgattcataagaagccattcctcattcctgtagttaggactctattgctttctcaattaccgtgctggtatgcaaatattgttctgaaggccagtcacctattagttcagctgtccatgccctatttgttatctttgttgttcattcatcatctcgatggaatgtgatcataattcagaatagttttgcttctggtttgtactgtcattataattgttcaacctccaataatggtatctgtcgagcacccgaggcattgaatttgagtaatggaattcaccataattgttcaacctccaataaagtctgtaactccaattcttcaaagcatgttttttagttcga

SEQ ID NO: 83869 - DNA, 1794 bp, Zea Mays
ccaccgcgctcgccctcttcgtcgttgccgtccgtctccacagtccccacccatattccattttggttatcctcttgcgtcacacctcctccctcctggcctcctcctgcggcccacttatatataccaccacgtcgatgcgctgctccgccggcatctccatcgccgtcgcgccgccgtagatggcctgacatttttcacttcatttgtcatcccaattccacaaacctcgcgcgcggcggcggagggaaacaaaaaaaaaaaggaaggatggcgttggagccggtggcgcgggcggtggcggaggaggtggcgcgctggggcgcgatgcgccagaccggggtcagcttgcgctacatgatggagttcggggtgcgccccacggagcggaccctcctgctcgccgcacagttcctgcacaaggagctccccatccgcatcgcgcgacgggcgctcgacctcgactcgctccccttcggcctctccaccaagcccgccatcctcaagggcagcacgtcgctttgcatgaccctgatccagagcctggtgtgatagggcttataaacacaaaaatgtcacccatgacagtagctcgaattgctagtgaagatgcacgtgctatttgcatgcgggagtatggatcatctcctaatgtcgacatatatggtgatccggggtttacattcccatatgttacaccacatctacatctcatgatttttgagctggtgaagaactcccttcgcgcagtacaggaacggtatatggattctgataagcttgcacctccggttcgaatcatagttgctgatggagcagaggacgtgactattaagccaaaggagtaaaagagatttaagggaagttcactctatttatttcttgctggcctgaggagacaagacccgtattaatagtcatccagcaatgtcagctgactttttttttcttctggttacagccaaatgcaactagcagaaatgtaaataaacgccctttatgatgctaacagatagccaatccaactaactggctaacgccttttgttagaattttctcattaattgtgatattcaaccgacaaacttgtatcttctgcacctatgttagcaaaaatcaatagcttcgattattcatgatctggtatgaagtatgaactgtttgactaaaccatacttttgcagattactgatgaaggtggtggaataccaaggagtggtctctcaagaatttttacgtatctctatagtacagcagaaaaccctcctgatcttgatgtacataatgaaggagtaactatggctggatatggttatgggattcctattagtcgtctttatgctcgatatttcggcggggacttgcagatcatctctatggaaggatatggaactgatgcatacctccacttatcacggctgggagattcggaggaacccttgacttaatcgattcataagaagccattcctcattcctgtagttaggactctattgctttctcaattaccgtgctggtatgcaaatattgttctgaaggccagtcacctattagttcagctgtccatgccctatttgttatctttgttgttcattcatcatctcgatggaatgtgatcataattcagaatagttttgcttctggtttgtactgtcattataattgttcaacctccaataatggtatctgtcgagcacccgaggcattgaatttgagtaatggaattcaccataattgttcaacctccaataaagtctgtaactccaattcttcaaagcatgttttttagttcga

SEQ ID NO: 83870 - DNA, 1171 bp, Zea Mays
cgtccgcccaggccagccccgcccccgcccgcccactctcccgaggttctcaacacaacagacaacaccgctcaccgcatatatatatatatagatgggttccgaggggccttctcccgtcaccgtccacgtcaccggattcaagaggttccatggagtcgccgagaacccgacggagaggatcgtgcgcggtctccagccattcatggagacgagagggttgcccaagggccttgttctcgggagctgcaccgtccttgaggccgccgggcagggcgcgcttggcccgctgtatgaactgctggagtcgaccgtctccggccgggaacgtcaggagcgagtaattctgctccattttggcgccaacagtggttcacataggtttgctcttgagaatcaagctgttaatgaagctactttccgttgccctgatgagctaggatggaaaccacagaggacacctatcatatcgtcagatggaagcatcttacacgcaagacagactacactgccagtggaggagataagcaagtctctccaacagatgggatacgacgtggtgccttcagacgacgctggtcgatttgtgtgcaactacgtctactaccactcactcaagtttgcagagaagcatgggatcgggtctctgtttgtccatttccccctcttcctggcaatcgacgaggaagtccagatgcagtttgtcgcttcccttctagaggtcctcgcttccttgaacttccagtgaacctagtggtagatctaccacttcccggtggtgtattgttcccagattatttgggaaaggtttaagttgttcccaacttacctgtggagaataagatcgaggaatcattcgtggaattatgtgtgtggttcaaaatgtgtaggggaacaaaaacaagtcttctcaaagaacatgtacatgcagtccagatgttaatatcccaagcggtttatatgacaggtgctgttgcagcgttgttctcagagatgctgcttatggatatactgttcgctttagattaaaaccggttgtttagactgatacaactgtaatttataaaaacaaaaacactgtagaaacagtaaaaaccgaaatagatgaaagccaagcgaatgttaaattgtatccctcattgttggtttacatcgtcgattgataatatag

SEQ ID NO: 83871 - DNA, 1491 bp, Zea Mays
cgtccgcccaggccagccccgcccccgcccgcccactctcccgaggtgagcaacgcctttcctccagcggctgtctgtttaatttgggtctacagctcttccccccctcgtggtctcgtctatggaattcccggttcaatttggacttgggctcctcccttgtttactgtaaccgtgtgcttgctactgtatcgaagaaatcccagcgtcaatcatgctgctgcgcgaggtctctcgatgatggatgacagataatgatggttgttgtatgatgatgatggcgcatggcggctgccaacgcctgtttttccccgctgcagtacctttgcttcactgatattagcaacctctatccaggattccaggttctcaacacaacagacaacaccgctcaccgcatatatatatatatagatgggttccgaggggccttctcccgtcaccgtccacgtcaccggattcaagaggttccatggagtcgccgagaacccgacggagaggatcgtgcgcggtctccagccattcatggagacgagagggttgcccaagggccttgttctcgggagctgcaccgtccttgaggccgccgggcagggcgcgcttggcccgctgtatgaactgctggagtcgaccgtctccggccgggaacgtcaggagcgagtaattctgctccattttggcgccaacagtggttcacataggtttgctcttgagaatcaagctgttaatgaagctactttccgttgccctgatgagctaggatggaaaccacagaggacacctatcatatcgtcagatggaagcatcttacacgcaagacagactacactgccagtggaggagataagcaagtctctccaacagatgggatacgacgtggtgccttcagacgacgctggtcgatttgtgtgcaactacgtctactaccactcactcaagtttgcagagaagcatgggatcgggtctctgtttgtccatttccccctcttcctggcaatcgacgaggaagtccagatgcagtttgtcgcttcccttctagaggtcctcgcttccttgaacttccagtgaacctagtggtagatctaccacttcccggtggtgtattgttcccagattatttgggaaaggtttaagttgttcccaacttacctgtggagaataagatcgaggaatcattcgtggaattatgtgtgtggttcaaaatgtgtaggggaacaaaaacaagtcttctcaaagaacatgtacatgcagtccagatgttaatatcccaagcggtttatatgacaggtgctgttgcagcgttgttctcagagatgctgcttatggatatactgttcgctttagattaaaaccggttgtttagactgatacaactgtaatttataaaaacaaaaacactgtagaaacagtaaaaaccgaaatagatgaaagccaagcgaatgttaaattgtatccctcattgttggtttacatcgtcgattgataatatag

SEQ ID NO: 83872 - DNA, 1673 bp, Zea Mays
cgtccgcccaggccagccccgcccccgcccgcccactctcccgaggtgagcaacgcctttcctccagcggctgtctgtttaatttgggtctacagctcttccccccctcgtggtctcgtctatggaattcccggttcaatttggacttgggctcctcccttgtttactgtaaccgtgtgcttgctactgtatcgaagaaatcccagcgtcaatcatgctgctgcgcgaggtctctcgatgatggatgacagataatgatggttgttgtatgatgatgatggcgcatggcggctgccaacgcctgtttttccccgctgcagtacctttgcttcactgatattagcaacctctatccaggattccaggttctcaacacaacagacaacaccgctcaccgcatatatatatatatagatgggttccgaggggccttctcccgtcaccgtccacgtcaccggattcaagaggttccatggagtcgccgagaacccgacggagaggatcgtgcgcggtctccagccattcatggagacgagagggttgcccaagggccttgttctcgggagctgcaccgtccttgaggccgccgggcagggcgcgcttggcccgctgtatgaactgctggagtcgaccgtctccggccgggaacgtcaggagcgagtaattctgctccattttggcgccaacagtggttcacataggtttgctcttgagaatcaagctgttaatgaagctactttccgttgccctgatgagctaggatggaaaccacagaggacacctatcatatcgtcagatggaagcatcttacacgcaagacagattcgtcctccttaaaaggtcttcgagtaaggaggtttccccaaggaaatactgcgattgatctctaatgttctccagcttctagatcaatgattaatttgcacagctgcctgtattctgtcagttatcttgtcatgtgcatcatctgctgaactacgttttgtttcataataaccaagcagactacactgccagtggaggagataagcaagtctctccaacagatgggatacgacgtggtgccttcagacgacgctggtcgatttgtgtgcaactacgtctactaccactcactcaagtttgcagagaagcatgggatcgggtctctgtttgtccatttccccctcttcctggcaatcgacgaggaagtccagatgcagtttgtcgcttcccttctagaggtcctcgcttccttgaacttccagtgaacctagtggtagatctaccacttcccggtggtgtattgttcccagattatttgggaaaggtttaagttgttcccaacttacctgtggagaataagatcgaggaatcattcgtggaattatgtgtgtggttcaaaatgtgtaggggaacaaaaacaagtcttctcaaagaacatgtacatgcagtccagatgttaatatcccaagcggtttatatgacaggtgctgttgcagcgttgttctcagagatgctgcttatggatatactgttcgctttagattaaaaccggttgtttagactgatacaactgtaatttataaaaacaaaaacactgtagaaacagtaaaaaccgaaatagatgaaagccaagcgaatgttaaattgtatccctcattgttggtttacatcgtcgattgataatatag

SEQ ID NO: 83873 - DNA, 1122 bp, Zea Mays
cgtccgcccaggccagccccgcccccgcccgcccactctcccgagatgggttccgaggggccttctcccgtcaccgtccacgtcaccggattcaagaggttccatggagtcgccgagaacccgacggagaggatcgtgcgcggtctccagccattcatggagacgagagggttgcccaagggccttgttctcgggagctgcaccgtccttgaggccgccgggcagggcgcgcttggcccgctgtatgaactgctggagtcgaccgtctccggccgggaacgtcaggagcgagtaattctgctccattttggcgccaacagtggttcacataggtttgctcttgagaatcaagctgttaatgaagctactttccgttgccctgatgagctaggatggaaaccacagaggacacctatcatatcgtcagatggaagcatcttacacgcaagacagactacactgccagtggaggagataagcaagtctctccaacagatgggatacgacgtggtgccttcagacgacgctggtcgatttgtgtgcaactacgtctactaccactcactcaagtttgcagagaagcatgggatcgggtctctgtttgtccatttccccctcttcctggcaatcgacgaggaagtccagatgcagtttgtcgcttcccttctagaggtcctcgcttccttgaacttccagtgaacctagtggtagatctaccacttcccggtggtgtattgttcccagattatttgggaaaggtttaagttgttcccaacttacctgtggagaataagatcgaggaatcattcgtggaattatgtgtgtggttcaaaatgtgtaggggaacaaaaacaagtcttctcaaagaacatgtacatgcagtccagatgttaatatcccaagcggtttatatgacaggtgctgttgcagcgttgttctcagagatgctgcttatggatatactgttcgctttagattaaaaccggttgtttagactgatacaactgtaatttataaaaacaaaaacactgtagaaacagtaaaaaccgaaatagatgaaagccaagcgaatgttaaattgtatccctcattgttggtttacatcgtcgattgataatatag

SEQ ID NO: 83874 - DNA, 1361 bp, Zea Mays
cgtccgcccaggccagccccgcccccgcccgcccactctcccgaggattccaggttctcaacacaacagacaacaccgctcaccgcatatatatatatatagatgggttccgaggggccttctcccgtcaccgtccacgtcaccggattcaagaggttccatggagtcgccgagaacccgacggagaggatcgtgcgcggtctccagccattcatggagacgagagggttgcccaagggccttgttctcgggagctgcaccgtccttgaggccgccgggcagggcgcgcttggcccgctgtatgaactgctggagtcgaccgtctccggccgggaacgtcaggagcgagtaattctgctccattttggcgccaacagtggttcacataggtttgctcttgagaatcaagctgttaatgaagctactttccgttgccctgatgagctaggatggaaaccacagaggacacctatcatatcgtcagatggaagcatcttacacgcaagacagattcgtcctccttaaaaggtcttcgagtaaggaggtttccccaaggaaatactgcgattgatctctaatgttctccagcttctagatcaatgattaatttgcacagctgcctgtattctgtcagttatcttgtcatgtgcatcatctgctgaactacgttttgtttcataataaccaagcagactacactgccagtggaggagataagcaagtctctccaacagatgggatacgacgtggtgccttcagacgacgctggtcgatttgtgtgcaactacgtctactaccactcactcaagtttgcagagaagcatgggatcgggtctctgtttgtccatttccccctcttcctggcaatcgacgaggaagtccagatgcagtttgtcgcttcccttctagaggtcctcgcttccttgaacttccagtgaacctagtggtagatctaccacttcccggtggtgtattgttcccagattatttgggaaaggtttaagttgttcccaacttacctgtggagaataagatcgaggaatcattcgtggaattatgtgtgtggttcaaaatgtgtaggggaacaaaaacaagtcttctcaaagaacatgtacatgcagtccagatgttaatatcccaagcggtttatatgacaggtgctgttgcagcgttgttctcagagatgctgcttatggatatactgttcgctttagattaaaaccggttgtttagactgatacaactgtaatttataaaaacaaaaacactgtagaaacagtaaaaaccgaaatagatgaaagccaagcgaatgttaaattgtatccctcattgttggtttacatcgtcgattgataatatag

SEQ ID NO: 83875 - DNA, 1440 bp, Zea Mays
atcagcagcagagaactgggtgctaatactggaacaaggtgaatttccaatggactgccctcttcatgatagcctattaagagtgcattataagggcatgctccttgatgaaccaaagtcagttttttatgatacacgtgccgataatgatggtgaaccgttggaattctgttctggagaaggcttggtacatattagcacattgatctgtcacattatacaatgattttactgaatgaaactttgctgttaaatttacaaatcagcgaagcattttgtaggtaccagagggttttgaaatgtgtgttcggctaatgcttcctggtgaaaaatctattgtcacctgcccaccagattttgcatatgataagttcccaaggccagcaaatgttcctgaaggagctcatgttcagtgggaaattgaactacttggattcgaaatgcccaaggattggactggcttaacttttgaagaaatcatggatgaggcggacaaaataaagaacacgggtaacagactgtttaaagaaggaaaattcgaacttgcaaaggcgaaatatgataaggtgcttagggaatataaccacgtgcatcctcatgatgatgaagagggaaaaatctttgctaattcaagaagttccctacatctaaatgtagccttttgctaccagaagatgggcgaatacagaaaatccattgaaacatgcaataaggtgctggacgcaaatcccgtgcatgtgaaagctctttaccgccgaggaacgtccttcatgttacttggggacttcaacgatgcaaggaatgattttgagaagatgattaccattgacaagtcatcagaacaggacgctacagctgccctccttaaacttaagcagaaggaacaggaagccgaaaagaaggcgaggaagcagttcaaaggactctttgacaagaagccaggagagatatccgaagttggtgtagaatcagacggtggaaaggatgcaggtgatgcaagagtcaatggtggtgaggcaacgagtgctgatagaggtgtaaacacaaatgacagtccgaccagcgaatcagagtacgccttcgaggaagagaggcccgggcttcttggcagcttgtggccctctgcgaggatgatcttctcgtctcttggcatgaacaggtgcgcgatactctgaggtgtccagtgtgtactgcggagacatccaaaatcatggcagtgaagaggaactgccccgaggtttctggtatttattagagtaagtttggatgtatggaaaatgaacagtgtgcaagatgtaaatgagaaacaatatgcagggaattttaatagctatctaggattcattatcttccacggcataaaataatttcccaggtttcttctagaatctcttggttgacatgccgccgctcgcaaaagcttttccgcccagaaagaac

SEQ ID NO: 83876 - DNA, 1404 bp, Zea Mays
tttgtctacaaggacactgcattgaaaataattttgtggtgagagacatgcttggtgatggtcgactaataaaacgacgtgtatttgatggaaaaggtgaatttccaatggactgccctcttcatgatagcctattaagagtgcattataagggcatgctccttgatgaaccaaagtcagttttttatgatacacgtgccgataatgatggtgaaccgttggaattctgttctggagaaggcttggtaccagagggttttgaaatgtgtgttcggctaatgcttcctggtgaaaaatctattgtcacctgcccaccagattttgcatatgataagttcccaaggccagcaaatgttcctgaaggagctcatgttcagtgggaaattgaactacttggattcgaaatgcccaaggattggactggcttaacttttgaagaaatcatggatgaggcggacaaaataaagaacacgggtaacagactgtttaaagaaggaaaattcgaacttgcaaaggcgaaatatgataaggtgcttagggaatataaccacgtgcatcctcatgatgatgaagagggaaaaatctttgctaattcaagaagttccctacatctaaatgtagccttttgctaccagaagatgggcgaatacagaaaatccattgaaacatgcaataaggtgctggacgcaaatcccgtgcatgtgaaagctctttaccgccgaggaacgtccttcatgttacttggggacttcaacgatgcaaggaatgattttgagaagatgattaccattgacaagtcatcagaacaggacgctacagctgccctccttaaacttaagcagaaggaacaggaagccgaaaagaaggcgaggaagcagttcaaaggactctttgacaagaagccaggagagatatccgaagttggtgtagaatcagacggtggaaaggatgcaggtgatgcaagagtcaatggtggtgaggcaacgagtgctgatagaggtgtaaacacaaatgacagtccgaccagcgaatcagagtacgccttcgaggaagagaggcccgggcttcttggcagcttgtggccctctgcgaggatgatcttctcgtctcttggcatgaacaggtgcgcgatactctgaggtgtccagtgtgtactgcggagacatccaaaatcatggcagtgaagaggaactgccccgaggtttctggtatttattagagtaagtttggatgtatggaaaatgaacagtgtgcaagatgtaaatgagaaacaatatgcagggaattttaatagctatctaggattcattatcttccacggcataaaataatttcccaggtttcttctagaatctcttggttgacatgccgccgctcgcaaaagcttttccgcccagaaagaac

SEQ ID NO: 83877 - DNA, 1719 bp, Zea Mays
gttgcaactccagatggctttccgaaggatgatgaacttcaatttgagattgaaatgttggatttctttaaagccaaggttgtggcagatgatttaggggttgtaaagaagatagttgaagaagggaagggatgggaaacacctagagagccatatgaaataacagcacggataactgcaagaacagcagatggaaaagaaattattccgagtaaagaagaggcatatttcttcactattggtaaatctgaggtacctaaagggcttgagatgggcatcggaacaatgtcacacaaggaaaaggcaattatttttgtcagtagtacttatttgacgaagtcctcactaatgccacagcttgaaggccttgaagaagttcatttttacattgaactggttcagtttatccaggtgaatttccaatggactgccctcttcatgatagcctattaagagtgcattataagggcatgctccttgatgaaccaaagtcagttttttatgatacacgtgccgataatgatggtgaaccgttggaattctgttctggagaaggcttggtaccagagggttttgaaatgtgtgttcggctaatgcttcctggtgaaaaatctattgtcacctgcccaccagattttgcatatgataagttcccaaggccagcaaatgttcctgaaggagctcatgttcagtgggaaattgaactacttggattcgaaatgcccaaggattggactggcttaacttttgaagaaatcatggatgaggcggacaaaataaagaacacgggtaacagactgtttaaagaaggaaaattcgaacttgcaaaggcgaaatatgataaggtgcttagggaatataaccacgtgcatcctcatgatgatgaagagggaaaaatctttgctaattcaagaagttccctacatctaaatgtagccttttgctaccagaagatgggcgaatacagaaaatccattgaaacatgcaataaggtgctggacgcaaatcccgtgcatgtgaaagctctttaccgccgaggaacgtccttcatgttacttggggacttcaacgatgcaaggaatgattttgagaagatgattaccattgacaagtcatcagaacaggacgctacagctgccctccttaaacttaagcagaaggaacaggaagccgaaaagaaggcgaggaagcagttcaaaggactctttgacaagaagccaggagagatatccgaagttggtgtagaatcagacggtggaaaggatgcaggtgatgcaagagtcaatggtggtgaggcaacgagtgctgatagaggtgtaaacacaaatgacagtccgaccagcgaatcagagtacgccttcgaggaagagaggcccgggcttcttggcagcttgtggccctctgcgaggatgatcttctcgtctcttggcatgaacaggtgcgcgatactctgaggtgtccagtgtgtactgcggagacatccaaaatcatggcagtgaagaggaactgccccgaggtttctggtatttattagagtaagtttggatgtatggaaaatgaacagtgtgcaagatgtaaatgagaaacaatatgcagggaattttaatagctatctaggattcattatcttccacggcataaaataatttcccaggtttcttctagaatctcttggttgacatgccgccgctcgcaaaagcttttccgcccagaaagaac

SEQ ID NO: 83878 - DNA, 1948 bp, Zea Mays
ctctgagcacatttcaccactatgtaaaggaatcccactcagatttgttttagggaagagcaagatgatcctaggctttgctgaaggcttcccaacaatgctgaagggtgaaattgctatgttcaaaatgcagcctaaaattcactacgctgaggacgattgtccagttgcaactccagatggctttccgaaggatgatgaacttcaatttgagattgaaatgttggatttctttaaagccaaggttgtggcagatgatttaggggttgtaaagaagatagttgaagaagggaagggatgggaaacacctagagagccatatgaaataacagcacggataactgcaagaacagcagatggaaaagaaattattccgagtaaagaagaggcatatttcttcactattggtaaatctgagtttaggtacctaaagggcttgagatgggcatcggaacaatgtcacacaaggaaaaggcaattatttttgtcagtagtacttatttgacgaagtcctcactaatgccacagcttgaaggccttgaagaagttcatttttacattgaactggttcagtttatccaggtgagagacatgcttggtgatggtcgactaataaaacgacgtgtatttgatggaaaaggtgaatttccaatggactgccctcttcatgatagcctattaagagtgcattataagggcatgctccttgatgaaccaaagtcagttttttatgatacacgtgccgataatgatggtgaaccgttggaattctgttctggagaaggcttggtaccagagggttttgaaatgtgtgttcggctaatgcttcctggtgaaaaatctattgtcacctgcccaccagattttgcatatgataagttcccaaggccagcaaatgttcctgaaggagctcatgttcagtgggaaattgaactacttggattcgaaatgcccaaggattggactggcttaacttttgaagaaatcatggatgaggcggacaaaataaagaacacgggtaacagactgtttaaagaaggaaaattcgaacttgcaaaggcgaaatatgataaggtgcttagggaatataaccacgtgcatcctcatgatgatgaagagggaaaaatctttgctaattcaagaagttccctacatctaaatgtagccttttgctaccagaagatgggcgaatacagaaaatccattgaaacatgcaataaggtgctggacgcaaatcccgtgcatgtgaaagctctttaccgccgaggaacgtccttcatgttacttggggacttcaacgatgcaaggaatgattttgagaagatgattaccattgacaagtcatcagaacaggacgctacagctgccctccttaaacttaagcagaaggaacaggaagccgaaaagaaggcgaggaagcagttcaaaggactctttgacaagaagccaggagagatatccgaagttggtgtagaatcagacggtggaaaggatgcaggtgatgcaagagtcaatggtggtgaggcaacgagtgctgatagaggtgtaaacacaaatgacagtccgaccagcgaatcagagtacgccttcgaggaagagaggcccgggcttcttggcagcttgtggccctctgcgaggatgatcttctcgtctcttggcatgaacaggtgcgcgatactctgaggtgtccagtgtgtactgcggagacatccaaaatcatggcagtgaagaggaactgccccgaggtttctggtatttattagagtaagtttggatgtatggaaaatgaacagtgtgcaagatgtaaatgagaaacaatatgcagggaattttaatagctatctaggattcattatcttccacggcataaaataatttcccaggtttcttctagaatctcttggttgacatgccgccgctcgcaaaagcttttccgcccagaaagaac

SEQ ID NO: 83879 - DNA, 1890 bp, Zea Mays
atcatctctgagcacatttcaccactatgtaaaggaatcccactcagatttgttttagggaagagcaagatgatcctaggctttgctgaaggcttcccaacaatgctgaagggtgaaattgctatgttcaaaatgcagcctaaaattcactacgctgaggacgattgtccagttgcaactccagatggctttccgaaggatgatgaacttcaatttgagattgaaatgttggatttctttaaagccaaggttgtggcagatgatttaggggttgtaaagaagatagttgaagaagggaagggatgggaaacacctagagagccatatgaaataacagcacggataactgcaagaacagcagatggaaaagaaattattccgagtaaagaagaggcatatttcttcactattggtaaatctgaggtacctaaagggcttgagatgggcatcggaacaatgtcacacaaggaaaaggcaattatttttgtcagtagtacttatttgacgaagtcctcactaatgccacagcttgaaggccttgaagaagttcatttttacattgaactggttcagtttatccaggtgaatttccaatggactgccctcttcatgatagcctattaagagtgcattataagggcatgctccttgatgaaccaaagtcagttttttatgatacacgtgccgataatgatggtgaaccgttggaattctgttctggagaaggcttggtaccagagggttttgaaatgtgtgttcggctaatgcttcctggtgaaaaatctattgtcacctgcccaccagattttgcatatgataagttcccaaggccagcaaatgttcctgaaggagctcatgttcagtgggaaattgaactacttggattcgaaatgcccaaggattggactggcttaacttttgaagaaatcatggatgaggcggacaaaataaagaacacgggtaacagactgtttaaagaaggaaaattcgaacttgcaaaggcgaaatatgataaggtgcttagggaatataaccacgtgcatcctcatgatgatgaagagggaaaaatctttgctaattcaagaagttccctacatctaaatgtagccttttgctaccagaagatgggcgaatacagaaaatccattgaaacatgcaataaggtgctggacgcaaatcccgtgcatgtgaaagctctttaccgccgaggaacgtccttcatgttacttggggacttcaacgatgcaaggaatgattttgagaagatgattaccattgacaagtcatcagaacaggacgctacagctgccctccttaaacttaagcagaaggaacaggaagccgaaaagaaggcgaggaagcagttcaaaggactctttgacaagaagccaggagagatatccgaagttggtgtagaatcagacggtggaaaggatgcaggtgatgcaagagtcaatggtggtgaggcaacgagtgctgatagaggtgtaaacacaaatgacagtccgaccagcgaatcagagtacgccttcgaggaagagaggcccgggcttcttggcagcttgtggccctctgcgaggatgatcttctcgtctcttggcatgaacaggtgcgcgatactctgaggtgtccagtgtgtactgcggagacatccaaaatcatggcagtgaagaggaactgccccgaggtttctggtatttattagagtaagtttggatgtatggaaaatgaacagtgtgcaagatgtaaatgagaaacaatatgcagggaattttaatagctatctaggattcattatcttccacggcataaaataatttcccaggtttcttctagaatctcttggttgacatgccgccgctcgcaaaagcttttccgcccagaaagaac

SEQ ID NO: 83880 - DNA, 2348 bp, Zea Mays
tttcgttggactctccgccgggcgccggagaggcggggaccggcgagtccaccatcccattcccgtaccacccgcttcttccaactccaactctccaaggcgctgtgctggctgctggcctgctgctaccgactgccgcaactgctccgcatcccggccttgattagcagcagttacgcccgcgcaggacagcggccttgattagcgaagtattcctttgccctacctctctccctaccccgttccgacgcggcggccgttgagcacctgcccggaagctatagcttcggccatggcccaagatgccggcgacggcggtggggaactcccgccgcccgtaaagaagaagtcaccggcggaggaggaggccgagaagaggaggaagaagcttacacctgggagcttaatgaagggcattatacggtctgggagcggtgatgccacccctgcagagggcgatcaggttatacttcattgcactactcggacaattgatggtatcgttgtaaattctacaagaagggagcatggaggtaaaggaatcccactcagatttgttttagggaagagcaagatgatcctaggctttgctgaaggcttcccaacaatgctgaagggtgaaattgctatgttcaaaatgcagcctaaaattcactacgctgaggacgattgtccagttgcaactccagatggctttccgaaggatgatgaacttcaatttgagattgaaatgttggatttctttaaagccaaggttgtggcagatgatttaggggttgtaaagaagatagttgaagaagggaagggatgggaaacacctagagagccatatgaaataacagcacggataactgcaagaacagcagatggaaaagaaattattccgagtaaagaagaggcatatttcttcactattggtaaatctgagcttgaaggccttgaagaagttcatttttacattgaactggttcagtttatccaggtgagagacatgcttggtgatggtcgactaataaaacgacgtgtatttgatggaaaaggtgaatttccaatggactgccctcttcatgatagcctattaagagtgcattataagggcatgctccttgatgaaccaaagtcagttttttatgatacacgtgccgataatgatggtgaaccgttggaattctgttctggagaaggcttggtaccagagggttttgaaatgtgtgttcggctaatgcttcctggtgaaaaatctattgtcacctgcccaccagattttgcatatgataagttcccaaggccagcaaatgttcctgaaggagctcatgttcagtgggaaattgaactacttggattcgaaatgcccaaggattggactggcttaacttttgaagaaatcatggatgaggcggacaaaataaagaacacgggtaacagactgtttaaagaaggaaaattcgaacttgcaaaggcgaaatatgataaggtgcttagggaatataaccacgtgcatcctcatgatgatgaagagggaaaaatctttgctaattcaagaagttccctacatctaaatgtagccttttgctaccagaagatgggcgaatacagaaaatccattgaaacatgcaataaggtgctggacgcaaatcccgtgcatgtgaaagctctttaccgccgaggaacgtccttcatgttacttggggacttcaacgatgcaaggaatgattttgagaagatgattaccattgacaagtcatcagaacaggacgctacagctgccctccttaaacttaagcagaaggaacaggaagccgaaaagaaggcgaggaagcagttcaaaggactctttgacaagaagccaggagagatatccgaagttggtgtagaatcagacggtggaaaggatgcaggtgatgcaagagtcaatggtggtgaggcaacgagtgctgatagaggtgtaaacacaaatgacagtccgaccagcgaatcagagtacgccttcgaggaagagaggcccgggcttcttggcagcttgtggccctctgcgaggatgatcttctcgtctcttggcatgaacaggtgcgcgatactctgaggtgtccagtgtgtactgcggagacatccaaaatcatggcagtgaagaggaactgccccgaggtttctggtatttattagagtaagtttggatgtatggaaaatgaacagtgtgcaagatgtaaatgagaaacaatatgcagggaattttaatagctatctaggattcattatcttccacggcataaaataatttcccaggtttcttctagaatctcttggttgacatgccgccgctcgcaaaagcttttccgcccagaaagaac

SEQ ID NO: 83881 - DNA, 2458 bp, Zea Mays
tttcgttggactctccgccgggcgccggagaggcggggaccggcgagtccaccatcccattcccgtaccacccgcttcttccaactccaactctccaaggcgctgtgctggctgctggcctgctgctaccgactgccgcaactgctccgcatcccggccttgattagcagcagttacgcccgcgcaggacagcggccttgattagcgaagtattcctttgccctacctctctccctaccccgttccgacgcggcggccgttgagcacctgcccggaagctatagcttcggccatggcccaagatgccggcgacggcggtggggaactcccgccgcccgtaaagaagaagtcaccggcggaggaggaggccgagaagaggaggaagaagcttacacctgggagcttaatgaagggcattatacggtctgggagcggtgatgccacccctgcagagggcgatcaggttatacttcattgcactactcggacaattgatggtatcgttgtaaattctacaagaagggagcatggaggtaaaggaatcccactcagatttgttttagggaagagcaagatgatcctaggctttgctgaaggcttcccaacaatgctgaagggtgaaattgctatgttcaaaatgcagcctaaaattcactacgctgaggacgattgtccagttgcaactccagatggctttccgaaggatgatgaacttcaatttgagattgaaatgttggatttctttaaagccaaggttgtggcagatgatttaggggttgtaaagaagatagttgaagaagggaagggatgggaaacacctagagagccatatgaaataacagcacggataactgcaagaacagcagatggaaaagaaattattccgagtaaagaagaggcatatttcttcactattggtaaatctgagtttaggtacctaaagggcttgagatgggcatcggaacaatgtcacacaaggaaaaggcaattatttttgtcagtagtacttatttgacgaagtcctcactaatgccacagcttgaaggccttgaagaagttcatttttacattgaactggttcagtttatccaggtgagagacatgcttggtgatggtcgactaataaaacgacgtgtatttgatggaaaaggtgaatttccaatggactgccctcttcatgatagcctattaagagtgcattataagggcatgctccttgatgaaccaaagtcagttttttatgatacacgtgccgataatgatggtgaaccgttggaattctgttctggagaaggcttggtaccagagggttttgaaatgtgtgttcggctaatgcttcctggtgaaaaatctattgtcacctgcccaccagattttgcatatgataagttcccaaggccagcaaatgttcctgaaggagctcatgttcagtgggaaattgaactacttggattcgaaatgcccaaggattggactggcttaacttttgaagaaatcatggatgaggcggacaaaataaagaacacgggtaacagactgtttaaagaaggaaaattcgaacttgcaaaggcgaaatatgataaggtgcttagggaatataaccacgtgcatcctcatgatgatgaagagggaaaaatctttgctaattcaagaagttccctacatctaaatgtagccttttgctaccagaagatgggcgaatacagaaaatccattgaaacatgcaataaggtgctggacgcaaatcccgtgcatgtgaaagctctttaccgccgaggaacgtccttcatgttacttggggacttcaacgatgcaaggaatgattttgagaagatgattaccattgacaagtcatcagaacaggacgctacagctgccctccttaaacttaagcagaaggaacaggaagccgaaaagaaggcgaggaagcagttcaaaggactctttgacaagaagccaggagagatatccgaagttggtgtagaatcagacggtggaaaggatgcaggtgatgcaagagtcaatggtggtgaggcaacgagtgctgatagaggtgtaaacacaaatgacagtccgaccagcgaatcagagtacgccttcgaggaagagaggcccgggcttcttggcagcttgtggccctctgcgaggatgatcttctcgtctcttggcatgaacaggtgcgcgatactctgaggtgtccagtgtgtactgcggagacatccaaaatcatggcagtgaagaggaactgccccgaggtttctggtatttattagagtaagtttggatgtatggaaaatgaacagtgtgcaagatgtaaatgagaaacaatatgcagggaattttaatagctatctaggattcattatcttccacggcataaaataatttcccaggtttcttctagaatctcttggttgacatgccgccgctcgcaaaagcttttccgcccagaaagaac

SEQ ID NO: 83882 - DNA, 2488 bp, Zea Mays
tttcgttggactctccgccgggcgccggagaggcggggaccggcgagtccaccatcccattcccgtaccacccgcttcttccaactccaactctccaaggcgctgtgctggctgctggcctgctgctaccgactgccgcaactgctccgcatcccggccttgattagcagcagttacgcccgcgcaggacagcggccttgattagcgaagtattcctttgccctacctctctccctaccccgttccgacgcggcggccgttgagcacctgcccggaagctatagcttcggccatggcccaagatgccggcgacggcggtggggaactcccgccgcccgtaaagaagaagtcaccggcggaggaggaggccgagaagaggaggaagaagcttacacctgggagcttaatgaagggcattatacggtctgggagcggtgatgccacccctgcagagggcgatcaggttatacttcattgcactactcggacaattgatggtatcgttgtaaattctacaagaagggagcatggaggtgttgcatcatctctgagcacatttcaccactatgtaaaggaatcccactcagatttgttttagggaagagcaagatgatcctaggctttgctgaaggcttcccaacaatgctgaagggtgaaattgctatgttcaaaatgcagcctaaaattcactacgctgaggacgattgtccagttgcaactccagatggctttccgaaggatgatgaacttcaatttgagattgaaatgttggatttctttaaagccaaggttgtggcagatgatttaggggttgtaaagaagatagttgaagaagggaagggatgggaaacacctagagagccatatgaaataacagcacggataactgcaagaacagcagatggaaaagaaattattccgagtaaagaagaggcatatttcttcactattggtaaatctgaggtacctaaagggcttgagatgggcatcggaacaatgtcacacaaggaaaaggcaattatttttgtcagtagtacttatttgacgaagtcctcactaatgccacagcttgaaggccttgaagaagttcatttttacattgaactggttcagtttatccaggtgagagacatgcttggtgatggtcgactaataaaacgacgtgtatttgatggaaaaggtgaatttccaatggactgccctcttcatgatagcctattaagagtgcattataagggcatgctccttgatgaaccaaagtcagttttttatgatacacgtgccgataatgatggtgaaccgttggaattctgttctggagaaggcttggtaccagagggttttgaaatgtgtgttcggctaatgcttcctggtgaaaaatctattgtcacctgcccaccagattttgcatatgataagttcccaaggccagcaaatgttcctgaaggagctcatgttcagtgggaaattgaactacttggattcgaaatgcccaaggattggactggcttaacttttgaagaaatcatggatgaggcggacaaaataaagaacacgggtaacagactgtttaaagaaggaaaattcgaacttgcaaaggcgaaatatgataaggtgcttagggaatataaccacgtgcatcctcatgatgatgaagagggaaaaatctttgctaattcaagaagttccctacatctaaatgtagccttttgctaccagaagatgggcgaatacagaaaatccattgaaacatgcaataaggtgctggacgcaaatcccgtgcatgtgaaagctctttaccgccgaggaacgtccttcatgttacttggggacttcaacgatgcaaggaatgattttgagaagatgattaccattgacaagtcatcagaacaggacgctacagctgccctccttaaacttaagcagaaggaacaggaagccgaaaagaaggcgaggaagcagttcaaaggactctttgacaagaagccaggagagatatccgaagttggtgtagaatcagacggtggaaaggatgcaggtgatgcaagagtcaatggtggtgaggcaacgagtgctgatagaggtgtaaacacaaatgacagtccgaccagcgaatcagagtacgccttcgaggaagagaggcccgggcttcttggcagcttgtggccctctgcgaggatgatcttctcgtctcttggcatgaacaggtgcgcgatactctgaggtgtccagtgtgtactgcggagacatccaaaatcatggcagtgaagaggaactgccccgaggtttctggtatttattagagtaagtttggatgtatggaaaatgaacagtgtgcaagatgtaaatgagaaacaatatgcagggaattttaatagctatctaggattcattatcttccacggcataaaataatttcccaggtttcttctagaatctcttggttgacatgccgccgctcgcaaaagcttttccgcccagaaagaac

SEQ ID NO: 83883 - DNA, 2527 bp, Zea Mays
tttcgttggactctccgccgggcgccggagaggcggggaccggcgagtccaccatcccattcccgtaccacccgcttcttccaactccaactctccaaggcgctgtgctggctgctggcctgctgctaccgactgccgcaactgctccgcatcccggccttgattagcagcagttacgcccgcgcaggacagcggccttgattagcgaagtattcctttgccctacctctctccctaccccgttccgacgcggcggccgttgagcacctgcccggaagctatagcttcggccatggcccaagatgccggcgacggcggtggggaactcccgccgcccgtaaagaagaagtcaccggcggaggaggaggccgagaagaggaggaagaagcttacacctgggagcttaatgaagggcattatacggtctgggagcggtgatgccacccctgcagagggcgatcaggttatacttcattgcactactcggacaattgatggtatcgttgtaaattctacaagaagggagcatggaggtaaaggaatcccactcagatttgttttagggaagagcaagatgatcctaggctttgctgaaggcttcccaacaatgctgaagggtgaaattgctatgttcaaaatgcagcctaaaattcactacgctgaggacgattgtccagttgcaactccagatggctttccgaaggatgatgaacttcaatttgagattgaaatgttggatttctttaaagccaaggttgtggcagatgatttaggggttgtaaagaagatagttgaagaagggaagggatgggaaacacctagagagccatatgaaataacagcacggataactgcaagaacagcagatggaaaagaaattattccgagtaaagaagaggcatatttcttcactattggtaaatctgaggtacctaaagggcttgagatgggcatcggaacaatgtcacacaaggaaaaggcaattatttttgtcagtagtacttatttgacgaagtcctcactaatgccacagcttgaaggccttgaagaagttcatttttacattgaactggttcagtttatccaggtgagagacatgcttggtgatggtcgactaataaaacgacgtgtatttgatggaaaaggtgaatttccaatggactgccctcttcatgatagcctattaagagtgcattataagggcatgctccttgatgaaccaaagtcagttttttatgatacacgtgccgataatgatggtgaaccgttggaattctgttctggagaaggcttggtaccagagggttttgaaatgtgtgttcggctaatgcttcctggtgaaaaatctattgtcacctgcccaccagattttgcatatgataagttcccaaggccagcaaatgttcctgaaggagctcatgttcagtgggaaattgaactacttggattcgaaatgcccaaggattggactggcttaacttttgaagaaatcatggatgaggcggacaaaataaagaacacgactgtttaaagaaggaaaattcgaacttgcaaaggcgaaatatgataaggtgcttagggaatataaccacgtgcatcctcatgatgatgaagagggaaaaatctttgctaattcaagaagttccctacatctaaatgtagccttttgctaccagaagatgggcgaatacagaaaatccattgaaacatgcaataaggtgctggacgcaaatcccgtgcatgtgaaagctctttaccgccgaggaacgtccttcatgttacttggggacttcaacgatgcaaggaatgattttgagaaggtcaacgacaccatactcgagtgccatgtttaaatttatgtcactgccctagtcaacatgtgattgcattatcttattgtagatgattaccattgacaagtcatcagaacaggacgctacagctgccctccttaaacttaagcagaaggaacaggaagccgaaaagaaggcgaggaagcagttcaaaggactctttgacaagaagccaggagagatatccgaagttggtgtagaatcagacggtggaaaggatgcaggtgatgcaagagtcaatggtggtgaggcaacgagtgctgatagaggtgtaaacacaaatgacagtccgaccagcgaatcagagtacgccttcgaggaagagaggcccgggcttcttggcagcttgtggccctctgcgaggatgatcttctcgtctcttggcatgaacaggtgcgcgatactctgaggtgtccagtgtgtactgcggagacatccaaaatcatggcagtgaagaggaactgccccgaggtttctggtatttattagagtaagtttggatgtatggaaaatgaacagtgtgcaagatgtaaatgagaaacaatatgcagggaattttaatagctatctaggattcattatcttccacggcataaaataatttcccaggtttcttctagaatctcttggttgacatgccgccgctcgcaaaagcttttccgcccagaaagaac

SEQ ID NO: 83884 - DNA, 2372 bp, Zea Mays
tttcgttggactctccgccgggcgccggagaggcggggaccggcgagtccaccatcccattcccgtaccacccgcttcttccaactccaactctccaaggcgctgtgctggctgctggcctgctgctaccgactgccgcaactgctccgcatcccggccttgattagcagcagttacgcccgcgcaggacagcggccttgattagcgaagtattcctttgccctacctctctccctaccccgttccgacgcggcggccgttgagcacctgcccggaagctatagcttcggccatggcccaagatgccggcgacggcggtggggaactcccgccgcccgtaaagaagaagtcaccggcggaggaggaggccgagaagaggaggaagaagcttacacctgggagcttaatgaagggcattatacggtctgggagcggtgatgccacccctgcagagggcgatcaggttatacttcattgcactactcggacaattgatggtatcgttgtaaattctacaagaagggagcatggaggtaaaggaatcccactcagatttgttttagggaagagcaagatgatcctaggctttgctgaaggcttcccaacaatgctgaagggtgaaattgctatgttcaaaatgcagcctaaaattcactacgctgaggacgattgtccagttgcaactccagatggctttccgaaggatgatgaacttcaatttgagattgaaatgttggatttctttaaagccaaggttgtggcagatgatttaggggttgtaaagaagatagttgaagaagggaagggatgggaaacacctagagagccatatgaaataacagcacggataactgcaagaacagcagatggaaaagaaattattccgagtaaagaagaggcaattatttttgtcagtagtacttatttgacgaagtcctcactaatgccacagcttgaaggccttgaagaagttcatttttacattgaactggttcagtttatccaggtgagagacatgcttggtgatggtcgactaataaaacgacgtgtatttgatggaaaaggtgaatttccaatggactgccctcttcatgatagcctattaagagtgcattataagggcatgctccttgatgaaccaaagtcagttttttatgatacacgtgccgataatgatggtgaaccgttggaattctgttctggagaaggcttggtaccagagggttttgaaatgtgtgttcggctaatgcttcctggtgaaaaatctattgtcacctgcccaccagattttgcatatgataagttcccaaggccagcaaatgttcctgaaggagctcatgttcagtgggaaattgaactacttggattcgaaatgcccaaggattggactggcttaacttttgaagaaatcatggatgaggcggacaaaataaagaacacgggtaacagactgtttaaagaaggaaaattcgaacttgcaaaggcgaaatatgataaggtgcttagggaatataaccacgtgcatcctcatgatgatgaagagggaaaaatctttgctaattcaagaagttccctacatctaaatgtagccttttgctaccagaagatgggcgaatacagaaaatccattgaaacatgcaataaggtgctggacgcaaatcccgtgcatgtgaaagctctttaccgccgaggaacgtccttcatgttacttggggacttcaacgatgcaaggaatgattttgagaagatgattaccattgacaagtcatcagaacaggacgctacagctgccctccttaaacttaagcagaaggaacaggaagccgaaaagaaggcgaggaagcagttcaaaggactctttgacaagaagccaggagagatatccgaagttggtgtagaatcagacggtggaaaggatgcaggtgatgcaagagtcaatggtggtgaggcaacgagtgctgatagaggtgtaaacacaaatgacagtccgaccagcgaatcagagtacgccttcgaggaagagaggcccgggcttcttggcagcttgtggccctctgcgaggatgatcttctcgtctcttggcatgaacaggtgcgcgatactctgaggtgtccagtgtgtactgcggagacatccaaaatcatggcagtgaagaggaactgccccgaggtttctggtatttattagagtaagtttggatgtatggaaaatgaacagtgtgcaagatgtaaatgagaaacaatatgcagggaattttaatagctatctaggattcattatcttccacggcataaaataatttcccaggtttcttctagaatctcttggttgacatgccgccgctcgcaaaagcttttccgcccagaaagaac

SEQ ID NO: 83885 - DNA, 2442 bp, Zea Mays
tttcgttggactctccgccgggcgccggagaggcggggaccggcgagtccaccatcccattcccgtaccacccgcttcttccaactccaactctccaaggcgctgtgctggctgctggcctgctgctaccgactgccgcaactgctccgcatcccggccttgattagcagcagttacgcccgcgcaggacagcggccttgattagcgaagtattcctttgccctacctctctccctaccccgttccgacgcggcggccgttgagcacctgcccggaagctatagcttcggccatggcccaagatgccggcgacggcggtggggaactcccgccgcccgtaaagaagaagtcaccggcggaggaggaggccgagaagaggaggaagaagcttacacctgggagcttaatgaagggcattatacggtctgggagcggtgatgccacccctgcagagggcgatcaggttatacttcattgcactactcggacaattgatggtatcgttgtaaattctacaagaagggagcatggaggtaaaggaatcccactcagatttgttttagggaagagcaagatgatcctaggctttgctgaaggcttcccaacaatgctgaagggtgaaattgctatgttcaaaatgcagcctaaaattcactacgctgaggacgattgtccagttgcaactccagatggctttccgaaggatgatgaacttcaatttgagattgaaatgttggatttctttaaagccaaggttgtggcagatgatttaggggttgtaaagaagatagttgaagaagggaagggatgggaaacacctagagagccatatgaaataacagcacggataactgcaagaacagcagatggaaaagaaattattccgagtaaagaagaggcatatttcttcactattggtacctaaagggcttgagatgggcatcggaacaatgtcacacaaggaaaaggcaattatttttgtcagtagtacttatttgacgaagtcctcactaatgccacagcttgaaggccttgaagaagttcatttttacattgaactggttcagtttatccaggtgagagacatgcttggtgatggtcgactaataaaacgacgtgtatttgatggaaaaggtgaatttccaatggactgccctcttcatgatagcctattaagagtgcattataagggcatgctccttgatgaaccaaagtcagttttttatgatacacgtgccgataatgatggtgaaccgttggaattctgttctggagaaggcttggtaccagagggttttgaaatgtgtgttcggctaatgcttcctggtgaaaaatctattgtcacctgcccaccagattttgcatatgataagttcccaaggccagcaaatgttcctgaaggagctcatgttcagtgggaaattgaactacttggattcgaaatgcccaaggattggactggcttaacttttgaagaaatcatggatgaggcggacaaaataaagaacacgggtaacagactgtttaaagaaggaaaattcgaacttgcaaaggcgaaatatgataaggtgcttagggaatataaccacgtgcatcctcatgatgatgaagagggaaaaatctttgctaattcaagaagttccctacatctaaatgtagccttttgctaccagaagatgggcgaatacagaaaatccattgaaacatgcaataaggtgctggacgcaaatcccgtgcatgtgaaagctctttaccgccgaggaacgtccttcatgttacttggggacttcaacgatgcaaggaatgattttgagaagatgattaccattgacaagtcatcagaacaggacgctacagctgccctccttaaacttaagcagaaggaacaggaagccgaaaagaaggcgaggaagcagttcaaaggactctttgacaagaagccaggagagatatccgaagttggtgtagaatcagacggtggaaaggatgcaggtgatgcaagagtcaatggtggtgaggcaacgagtgctgatagaggtgtaaacacaaatgacagtccgaccagcgaatcagagtacgccttcgaggaagagaggcccgggcttcttggcagcttgtggccctctgcgaggatgatcttctcgtctcttggcatgaacaggtgcgcgatactctgaggtgtccagtgtgtactgcggagacatccaaaatcatggcagtgaagaggaactgccccgaggtttctggtatttattagagtaagtttggatgtatggaaaatgaacagtgtgcaagatgtaaatgagaaacaatatgcagggaattttaatagctatctaggattcattatcttccacggcataaaataatttcccaggtttcttctagaatctcttggttgacatgccgccgctcgcaaaagcttttccgcccagaaagaac

SEQ ID NO: 83886 - DNA, 2395 bp, Zea Mays
tttcgttggactctccgccgggcgccggagaggcggggaccggcgagtccaccatcccattcccgtaccacccgcttcttccaactccaactctccaaggcgctgtgctggctgctggcctgctgctaccgactgccgcaactgctccgcatcccggccttgattagcagcagttacgcccgcgcaggacagcggccttgattagcgaagtattcctttgccctacctctctccctaccccgttccgacgcggcggccgttgagcacctgcccggaagctatagcttcggccatggcccaagatgccggcgacggcggtggggaactcccgccgcccgtaaagaagaagtcaccggcggaggaggaggccgagaagaggaggaagaagcttacacctgggagcttaatgaagggcattatacggtctgggagcggtgatgccacccctgcagagggcgatcaggttatacttcattgcactactcggacaattgatggtatcgttgtaaattctacaagaagggagcatggaggtaaaggaatcccactcagatttgttttagggaagagcaagatgatcctaggctttgctgaaggcttcccaacaatgctgaagggtgaaattgctatgttcaaaatgcagcctaaaattcactacgctgaggacgattgtccagttgcaactccagatggctttccgaaggatgatgaacttcaatttgagattgaaatgttggatttctttaaagccaaggttgtggcagatgatttaggggttgtaaagaagatagttgaagaagggaagggatgggaaacacctagagagccatatgaaataacagcacggataactgcaagaacagcagatggaaaagaaattattccgagtaaagaagaggcatatttcttcactattggtaaatctgaggtacctaaagggcttgagatgggcatcggaacaatgtcacacaaggaaaaggcaattatttttgtcagtagtacttatttgacgaagtcctcactaatgccacagcttgaaggccttgaagaagttcatttttacattgaactggttcagtttatccaggtgaatttccaatggactgccctcttcatgatagcctattaagagtgcattataagggcatgctccttgatgaaccaaagtcagttttttatgatacacgtgccgataatgatggtgaaccgttggaattctgttctggagaaggcttggtaccagagggttttgaaatgtgtgttcggctaatgcttcctggtgaaaaatctattgtcacctgcccaccagattttgcatatgataagttcccaaggccagcaaatgttcctgaaggagctcatgttcagtgggaaattgaactacttggattcgaaatgcccaaggattggactggcttaacttttgaagaaatcatggatgaggcggacaaaataaagaacacgggtaacagactgtttaaagaaggaaaattcgaacttgcaaaggcgaaatatgataaggtgcttagggaatataaccacgtgcatcctcatgatgatgaagagggaaaaatctttgctaattcaagaagttccctacatctaaatgtagccttttgctaccagaagatgggcgaatacagaaaatccattgaaacatgcaataaggtgctggacgcaaatcccgtgcatgtgaaagctctttaccgccgaggaacgtccttcatgttacttggggacttcaacgatgcaaggaatgattttgagaagatgattaccattgacaagtcatcagaacaggacgctacagctgccctccttaaacttaagcagaaggaacaggaagccgaaaagaaggcgaggaagcagttcaaaggactctttgacaagaagccaggagagatatccgaagttggtgtagaatcagacggtggaaaggatgcaggtgatgcaagagtcaatggtggtgaggcaacgagtgctgatagaggtgtaaacacaaatgacagtccgaccagcgaatcagagtacgccttcgaggaagagaggcccgggcttcttggcagcttgtggccctctgcgaggatgatcttctcgtctcttggcatgaacaggtgcgcgatactctgaggtgtccagtgtgtactgcggagacatccaaaatcatggcagtgaagaggaactgccccgaggtttctggtatttattagagtaagtttggatgtatggaaaatgaacagtgtgcaagatgtaaatgagaaacaatatgcagggaattttaatagctatctaggattcattatcttccacggcataaaataatttcccaggtttcttctagaatctcttggttgacatgccgccgctcgcaaaagcttttccgcccagaaagaac

SEQ ID NO: 83887 - DNA, 2423 bp, Zea Mays
tttcgttggactctccgccgggcgccggagaggcggggaccggcgagtccaccatcccattcccgtaccacccgcttcttccaactccaactctccaaggcgctgtgctggctgctggcctgctgctaccgactgccgcaactgctccgcatcccggccttgattagcagcagttacgcccgcgcaggacagcggccttgattagcgaagtattcctttgccctacctctctccctaccccgttccgacgcggcggccgttgagcacctgcccggaagctatagcttcggccatggcccaagatgccggcgacggcggtggggaactcccgccgcccgtaaagaagaagtcaccggcggaggaggaggccgagaagaggaggaagaagcttacacctgggagcttaatgaagggcattatacggtctgggagcggtgatgccacccctgcagagggcgatcaggttatacttcattgcactactcggacaattgatggtatcgttgtaaattctacaagaagggagcatggaggtaaaggaatcccactcagatttgttttagggaagagcaagatgatcctaggctttgctgaaggcttcccaacaatgctgaagggtgaaattgctatgttcaaaatgcagcctaaaattcactacgctgaggacgattgtccagttgcaactccagatggctttccgaaggatgatgaacttcaatttgagattgaaatgttggatttctttaaagccaaggttgtggcagatgatttaggggttgtaaagaagatagttgaagaagggaagggatgggaaacacctagagagccatatgaaataacagcacggataactgcaagaacagcagatggaaaagaaattattccgagtaaagaagaggcatatttcttcactattggtaaatctgaggtacctaaagggcttgagatgggcatcggaacaatgtcacacaaggaaaaggcaattatttttgtcagtagtacttatttgacgaagtcctcactaatgccacagcttgaaggccttgaagaagttcatttttacattgaactggttcagtttatccaggtgagagacatgcttggtgatggtcgactaataaaacgacgtgtatttgatggaaaaggtgaatttccaatggactgccctcttcatgatagcctattaagagtgcattataagggcatgctccttgatgaaccaaagtcagttttttatgatacacgtgccgataatgatggtgaaccgttggaattctgttctggagaaggcttggtaccagagggttttgaaatgtgtgttcggctaatgcttcctggtgaaaaatctattgtcacctgcccaccagattttgcatatgataagttcccaaggccagcaaatgttcctgaaggagctcatgttcagtgggaaattgaactacttggattcgaaatgcccaaggattggactggcttaacttttgaagaaatcatggatgaggcggacaaaataaagaacacgggtaacagactgtttaaagaaggaaaattcgaacttgcaaaggcgaaatatgataaggtgcttagggaatataaccacgtgcatcctcatgatgatgaagagggaaaaatctttgctaattcaagaagttccctacatctaaatgtagccttttgctaccagaagatgggcgaatacagaaaatccattgaaacatgcaataaggtgctggacgcaaatcccgtgcatgtgaaagctctttaccgccgaggaacgtccttcatgttacttggggacttcaacgatgcaaggaatgattttgagaaggacgctacagctgccctccttaaacttaagcagaaggaacaggaagccgaaaagaaggcgaggaagcagttcaaaggactctttgacaagaagccaggagagatatccgaagttggtgtagaatcagacggtggaaaggatgcaggtgatgcaagagtcaatggtggtgaggcaacgagtgctgatagaggtgtaaacacaaatgacagtccgaccagcgaatcagagtacgccttcgaggaagagaggcccgggcttcttggcagcttgtggccctctgcgaggatgatcttctcgtctcttggcatgaacaggtgcgcgatactctgaggtgtccagtgtgtactgcggagacatccaaaatcatggcagtgaagaggaactgccccgaggtttctggtatttattagagtaagtttggatgtatggaaaatgaacagtgtgcaagatgtaaatgagaaacaatatgcagggaattttaatagctatctaggattcattatcttccacggcataaaataatttcccaggtttcttctagaatctcttggttgacatgccgccgctcgcaaaagcttttccgcccagaaagaac

SEQ ID NO: 83888 - DNA, 2923 bp, Zea Mays
aaaacgaagaggaaaatgatacggatcgagaggcatagcacaacggaaagcaacccgaaagcctctacttttccgcccccagcaggccaggactcttcaatcgctcgcgccgtttcttcatcccctcgccatccttccttcgatccagcgttgcctgtcgtcttcgcctgcacggctgcacctaaagctctgacctttttccccactttcccttggcatctactgccttgtccggtgtagaaaacaacggatttcgttgtgttgttttgctgcggtttttgtcccctcccttctcactcggcgagctttgttgttcactttggattccacgggtttgtttcggattaggaaggctcggtttttggtctgggaaggccccccttccgaggcgatgaatttggtgcgggttgatggcgtcctgtcaggagtccgctatgcaatgatgggttctttgaagccgaggtgaatctttgacctgcctagtttgcgattccaaattccgagctcccaccgcttcttgatccgccgggcgccatgggcctctgctacggcaagtcggcggcggtccaggagccggcggtagcggaggagaacaacaaagccgatggcgcggcggcgggccgaggcgatggcccgccggcgtcgccggtgaaggtgcctcggacgcccaagcagcccaagttgtccttctacttgccgagcccgctcccgccctccagctacaagggctcgccggcaaactccagcgtcgcgtccacgccggcgcgcggcgggttcaagcgcccgttcctgccgccgtcgcctgccaagcacattcgtgcgctgctggcgcggcgccacggctcggtcaagcccaacgaggcgtccatctccgagggcggcgaaccagaccttgggctggacaagagcttcggctactccaggcactttgcggccaagtacgaccttggtcgagaggtggggcgcggccactttggcttcacctgcgctgccaagtgcaagaagggcgagctcaagggcgaggacgtcgccgtcaaggtcattcccaaggccaaggttatgcaaaggaggtgaactgctggacaggattttggctagaggtggaaaatattccgaggaagatgctaaggttgttattcaccaaattctaagtgttgcttcattttgccatcttcagggtgttgttcaccgggatctgaaaccagagaattttcttttcatgtcaaaggatgagaattctgccttgaaagtcatagactttggtttatctgactttgttaaaccagacggcagacttaatgacattgttggaagtgcatattatgttgctcctgaagttctccatcgatcttatggcactgaggcagatatgtggagcattggagtaattgcatatattttgctttgtggaagccgccctttctgggcaagaaccgagtcaggaatttttagagctgtcctaaaagcagatcctagttttgatgaaatcccatggcctaccctttctgctgaagcgaaagacttcgtaaggaggctgctcaataaggattaccgcaagcggatgactgctgcacaagccctctgtcatccatggatccgtggtacacaggaagttaagatttatctagacatgataatctacaggcttatgagggcttacataagttcatcttctctacggaagtctgctttgagggctcttgcaaaggcactgacgacagatcaactcttctacctaagagagcagtttacattgttagatccaaacaagagtggccatatatccttgcaaaatatgaaggcggccttgatgaaaaattcctcgggtgcaatgaacgattctagggttcttgactttgttaactcaatatgcaatatccaatatggaaatattgattttgaagagttttctgctgcggccattagtgtatatcaaatggaaggcctggagacctggcaacaacatgctcaacaagcatatgaattgtttgacagggagggcaaccgaccgattgtgatcgaagaacttgcatcggagctcggacttggcccttcggttccacttcatgttgttctccaagactggatcagacattcagacggaaacctcagtttcctcggcttcataaaactattgcatggagtttcttcacgcacaatccctaaagtccaagataaccgtttgcattgaccaatccctaatctcagggccagtgcatgccatgtctggctgtagaagttgcatgagaccatcagaccagtacaaagattaacagatcaggttagggtaagaggtaaaattctctcagtagttgtatatttgctccgcccttgtcctcaagatgttaagaggaatgtacagatttggtttgggaagaatggaaaggctaaaggatttggggctgttttttttttgcttgtttgttccagtaacacaggtattgcatttcttcttcttaatataatgatgtgtagctctcctgcatattcgataaaaaatgcaggcattgccttcgtttgtgctgtgcacctgtgtcgcttgatgacatgctattgttgtttttatttataatttcataacgggagttgatgtacagctttgtaactttggaatccttaccacaagaaggattatgcgacctctaccgtataatgacgaggctatgggaggtgatttgaggaaaaggccagaagctgggacatcttaggaaacagattccatgagaagaaatccaaatatatggtgaaatgcagatttgctaaagtcgccgagcttttgtatgcgttcgagatttccagtgagcgtggatcctttgttagcctgtttggcaactcacttttcaataccatagcattacagtaccatggtttactaattgcaatgtacaatctaacatctgtttggcgacaaagtattttgaca

SEQ ID NO: 83889 - DNA, 2895 bp, Zea Mays
aaaacgaagaggaaaatgatacggatcgagaggcatagcacaacggaaagcaacccgaaagcctctacttttccgcccccagcaggccaggactcttcaatcgctcgcgccgtttcttcatcccctcgccatccttccttcgatccagcgttgcctgtcgtcttcgcctgcacggctgcacctaaagctctgacctttttccccactttcccttggcatctactgccttgtccggtgtagaaaacaacggatttcgttgtgttgttttgctgcggtttttgtcccctcccttctcactcggcgagctttgttgttcactttggattccacgggtttgtttcggattaggaaggctcggtttttggtctgggaaggccccccttccgaggcgatgaatttggtgcgggttgatggcgtcctgtcaggagtccgctatgcaatgatgggttctttgaagccgaggtgaatctttgacctgcctagtttgcgattccaaattccgagctcccaccgcttcttgatccgccgggcgccatgggcctctgctacggcaagtcggcggcggtccaggagccggcggtagcggaggagaacaacaaagccgatggcgcggcggcgggccgaggcgatggcccgccggcgtcgccggtgaaggtgcctcggacgcccaagcagcccaagttgtccttctacttgccgagcccgctcccgccctccagctacaagggctcgccggcaaactccagcgtcgcgtccacgccggcgcgcggcgggttcaagcgcccgttcctgccgccgtcgcctgccaagcacattcgtgcgctgctggcgcggcgccacggctcggtcaagcccaacgaggcgtccatctccgagggcggcgaaccagaccttgggctggacaagagcttcggctactccaggcactttgcggccaagtacgaccttggtcgagaggtggggcgcggccactttggcttcacctgcgctgccaagtgcaagaagggcgagctcaagggcgaggacgtcgccgtcaaggtcattcccaaggccaagatgactactgctattgccattgaagatgtcagacgggaagttagaatattgagttctttggcagaccacaacaacctagtgcagtttcatgatgcttttgaggatgaagaaaatgtatatgttgttatggagttatgcaaaggaggtgaactgctggacaggattttggctagaggtggaaaatattccgaggaagatgctaaggttgttattcaccaaattctaagtgttgcttcattttgccatcttcagggtgttgttcaccgggatctgaaaccagagaattttcttttcatgtcaaaggatgagaattctgccttgaaagtcatagactttggtttatctgactttgttaaaccagacggcagacttaatgacattgttggaagtgcatattatgttgctcctgaagttctccatcgatcttatggcactgaggcagatatgtggagcattggagtaattgcatatattttgctttgtggaagccgccctttctgggcaagaaccgagtcaggaatttttagagctgtcctaaaagcagatcctagttttgatgaaatcccatggcctaccctttctgctgaagcgaaagacttcgtaaggaggctgctcaataaggattaccgcaagcggatgactgctgcacaagccctctgtcatccatggatccgtggtacacaggaagttaagatttatctagacatgataatctacaggcttatgagggcttacataagttcatcttctctacggaagtctgctttgagggctcttgcaaaggcactgacgacagatcaactcttctacctaagagagcagtttacattgttagatccaaacaagagtggccatatatccttgcaaaatatgaaggcggccttgatgaaaaattcctcgggtgcaatgaacgattctagggttcttgactttgttaactcaatatgcaatatccaatatggaaatattgattttgaagagttttctgctgcggccattagtgtatatcaaatggaaggcctggagacctggcaacaacatgctcaacaagcatatgaattgtttgacagggagggcaaccgaccgattgtgatcgaagaacttgcatcggagctcggacttggcccttcggttccacttcatgttgttctccaagactggatcagacattcagacggaaacctcagtttcctcggcttcataaaactattgcatggagtttcttcacgcacaatccctaaagtccaagataaccgtttgcattgaccaatccctaatctcagggccagtgcatgccatgtctggctgtagaagttgcatgagaccatcagaccagtacaaagattaacagatcaggttagggtaagaggtaaaattctctcagtagttgtatatttgctccgcccttgtcctcaagatgttaagaggaatgtacagatttggtttgggaagaatggaaaggctaaaggatttggggctgttttttttttgcttgtttgttccagtaacacagctttgtaactttggaatccttaccacaagaaggattatgcgacctctaccgtataatgacgaggctatgggaggtgatttgaggaaaaggccagaagctgggacatcttaggaaacagattccatgagaagaaatccaaatatatggtgaaatgcagatttgctaaagtcgccgagcttttgtatgcgttcgagatttccagtgagcgtggatcctttgttagcctgtttggcaactcacttttcaataccatagcattacagtaccatggtttactaattgcaatgtacaatctaacatctgtttggcgacaaagtattttgaca

SEQ ID NO: 83890 - DNA, 2719 bp, Zea Mays
aaaacgaagaggaaaatgatacggatcgagaggcatagcacaacggaaagcaacccgaaagcctctacttttccgcccccagcaggccaggactcttcaatcgctcgcgccgtttcttcatcccctcgccatccttccttcgatccagcgttgcctgtcgtcttcgcctgcacggctgcacctaaagctctgacctttttccccactttcccttggcatctactgccttgtccggtgtagaaaacaacggatttcgttgtgttgttttgctgcggtttttgtcccctcccttctcactcggcgagctttgttgttcactttggattccacgggtttgtttcggattaggaaggctcggtttttggtctgggaaggccccccttccgaggcgatgaatttggtgcgggttgatggcgtcctgtcaggagtccgctatgcaatgatgggttctttgaagccgaggtgaatctttgacctgcctagtttgcgattccaaattccgagctcccaccgcttcttgatccgccgggcgccatgggcctctgctacggcaagtcggcggcggtccaggagccggcggtagcggaggagaacaacaaagccgatggcgcggcggcgggccgaggcgatggcccgccggcgtcgccggtgaaggtgcctcggacgcccaagcagcccaagttgtccttctacttgccgagcccgctcccgccctccagctacaagggctcgccggcaaactccagcgtcgcgtccacgccggcgcgcggcgggttcaagcgcccgttcctgccgccgtcgcctgccaagcacattcgtgcgctgctggcgcggcgccacggctcggtcaagcccaacgaggcgtccatctccgagggcggcgaaccagaccttgggctggacaagagcttcggctactccaggcactttgcggccaagtacgaccttggtcgagaggtggggcgcggccactttggcttcacctgcgctgccaagtgcaagaagggcgagctcaagggcgaggacgtcgccgtcaaggtcattcccaaggccaagatgactactgctattgccattgaagatgtcagacgggaagttagaatattgagttctttggcagaccacaacaacctagtgcagtttcatgatgcttttgaggatgaagaaaatgtatatgttgttatggagttatgcaaaggaggtgaactgctggacaggattttggctagaggtggaaaatattccgaggaagatgctaaggttgttattcaccaaattctaagtgttgcttcattttgccatcttcagggtgttgttcaccgggatctgaaaccagagaattttcttttcatgtcaaaggatgagaattctgccttgaaagtcatagactttggtttatctgactttgttaaaccagacggcagacttaatgacattgttggaagtgcatattatgttgctcctgaagttctccatcgatcttatggcactgaggcagatatgtggagcattggagtaattgcatatattttgctttgtggaagccgccctttctgggcaagaaccgagtcaggaatttttagagctgtcctaaaagcagatcctagttttgatgaaatcccatggcctaccctttctgctgaagcgaaagacttcgtaaggaggctgctcaataaggattaccgcaagcggatgactgctgcacaagccctctgtcatccatggatccgtggtacacaggaagttaagatttatctagacatgataatctacaggcttatgagggcttacataagttcatcttctctacggaagtctgctttgagggctcttgcaaaggcactgacgacagatcaactcttctacctaagagagcagtttacattgttagatccaaacaagagtggccatatatccttgcaaaatatgaaggcggccttgatgaaaaattcctcgggtgcaatgaacgattctagggttcttgactttgttaactcaatatgcaatatccaatatggaaatattgattttgaagagttttctgctgcggccattagtgtatatcaaatggaaggcctggagacctggcaacaacatgctcaacaagcatatgaattgtttgacagggagggcaaccgaccgattgtgatcgaagaacttgcatcggagctcggacttggcccttcggttccacttcatgttgttctccaagactggatcagacattcagacggaaacctcagtttcctcggcttcataaaactattgcatggagtttcttcacgcacaatccctaaagtccaagataaccgtttgcattgaccaatccctaatctcagggccagtgcatgccatgtctggctgtagaagttgcatgagaccatcagaccagtacaaagattaacagatcaggttagggtaagaggattatgcgacctctaccgtataatgacgaggctatgggaggtgatttgaggaaaaggccagaagctgggacatcttaggaaacagattccatgagaagaaatccaaatatatggtgaaatgcagatttgctaaagtcgccgagcttttgtatgcgttcgagatttccagtgagcgtggatcctttgttagcctgtttggcaactcacttttcaataccatagcattacagtaccatggtttactaattgcaatgtacaatctaacatctgtttggcgacaaagtattttgaca

SEQ ID NO: 83891 - DNA, 1229 bp, Zea Mays
ctttttttaagcttcaaaacgaagaggaaaatgatacggatcgagaggcatagcacaacggaaagcaacccgaaagcctctacttttccgcccccagcaggccaggactcttcaatcgctcgcgccgtttcttcatcccctcgccatccttccttcgatccagcgttgcctgtcgtcttcgcctgcacggctgcacctaaagctctgacctttttccccactttcccttggcatctactgccttgtccggtgtagaaaacaacggatttcgttgtgttgttttgctgcggtttttgtcccctcccttctcactcggcgagctttgttgttcactttggattccacgggtttgtttcggattaggaaggctcggtttttggtctgggaaggccccccttccgaggcgatgaatttggtgcgggttgatggcgtcctgtcaggagtccgctatgcaatgatgggttctttgaagccgaggtgaatctttgacctgcctagtttgcgattccaaattccgagctcccaccgcttcttgatccgccgggcgccatgggcctctgctacggcaagtcggcggcggtccaggagccggcggtagcggaggagaacaacaaagccgatggcgcggcggcgggccgaggcgatggcccgccggcgtcgccggtgaaggtgcctcggacgcccaagcagcccaagttgtccttctacttgccgagcccgctcccgccctccagctacaagggctcgccggcaaactccagcgtcgcgtccacgccggcgcgcggcgggttcaagcgcccgttcctgccgccgtcgcctgccaagcacattcgtgcgctgctggcgcggcgccacggctcggtcaagcccaacgaggcgtccatctccgagggcggcgaaccagaccttgggctggacaagagcttcggctactccaggcactttgcggccaagtacgaccttggtcgagaggtggggcgcggccactttggcttcacctgcgctgccaagtgcaagaagggcgagctcaagggcgaggacgtcgccgtcaaggtcattcccaaggccaagatgactactgctattgccattgaagatgtcagacgggaagttagaatattgagttctttggcagaccacaacaacctagtgcagtttcatgatgcttttgaggatgaagaaaatgtatatgttgttatggagacagctattttggttggccatgtcgt

SEQ ID NO: 83892 - DNA, 985 bp, Zea Mays
atctccctcacgtcgtctttctcagtgcctccctccctgctcctgcgctgggagtccagtgctccagcacgccggcgcgcgccatctcctgctcgcccccctgctcggtcacgacacctccccgtctccctgctccgttcctgctcccagcacctacctccatggccgacgtctccctacccaggtccaaccagctccccttcctgttgctgctccagcgcacctggccgccacgtcgtttctgctcgtcaacgccagcaagcttggttcctgcgcccagccccatctcccttgcatctcccttggctcacgacgttgggcgctgggctctgtgccccttcttccgggttgccggcgacatgctcgtgctcaccgatggctaatctttaccgcacgtgcacaacgtcgtcgatttccaccacctgtagccattcctttgacctcgttgttcgtcatggctgtgcatcgcacaacaggtgttcgacaaaaggtctaatccagaattccgattcaacctcgaccctgccgtcgttgaaggtacgttaattaatcacgtgatgtgaaggacaagagctggattaatcacaagacgatgctgatggacgaagctaaagtggatgaatcaaccaagtgccaggatgggagatactcaccaagtgatcgtcatttaacaacactaacatagtgttatcccagggctttattccctgttgtttttcaggttataagtttgttctgttgtggatggtgctaagtgccggtgggctcgaccttcttatataactatatcccatcttttgcttctttattgaggactgacacttaagctagcatgtattttaaaacttataaatgttttatacattcaaattgtaatctttttgaatcaacttcttttgtaataaactccgatgatatatattgtaatcttgttataacttgtaaatgttgtaacttgtaaccattttgtaataaagaaattccg

SEQ ID NO: 83893 - DNA, 2269 bp, Zea Mays
ttcctttttctcgtccccgtcgaatccgcatcgtggagcaaatccaccggaatccggactggattggattgcggcatccattccattcgcattcgcattcgcgttatgcattccaatcgcggccgccgtcgctatcctcgtagcactcggccgtgctttgctcggcccacccaaccccgtccctatcgccccccatcgtctccctcaccaccagtcaccaccgccagctccccgcctctgcctcctccaggcgaccaggcccccagctttggcgtcgacggacagatacagcggcgccatttccaaagagagacacagatcgcgctgcccaaggaaaagaagccgcgccttctcccctctcccttctttcttcccttttattgacgggatcgtccgccggttccattccaacactaattcctcacgggggttccatttggattcggcctggatccgcgagatcaagaaaaacgcctgcaattaaactgccaagattaacaagaaaaatataaccaaccttgattggctgcaataatctttcttcaaaaaaaaggagagagccttcggcggcggccgatcttggctcggatggcagcgccgccgcagccgctggcgtcgctggactactggcggtgcttcttcagcggcgcgcgggctagcatctttgacgccatcgacgccgccatccgagtagccgccgccgaccaccccgacgccctccgcgcgcgccgcgacgccatcgccgagcgcctctacaccgcgattgtcgcgcttcctgcaacacaggaggcgccggggcagtccaccccgggccagccggcgctcctccttcccgagggcgccgccagcgtgcccagcctctgcagctcggaccgcgccgaggtcgtcaacaacgacggcggcggcgcgccgctgaccaacagcgatgacgacgtggtcgccgaggcgttccgtatcaaggcggctctctccaatgcccaagacaagtcggaggccgagttgctagagcttctggggaggctggggcagctggaattcacggtggacgccatcagggctactgggattggaatggacgtgagaccgttgcgaaagcatggctcgaaacagattcggcaactcgtccgatcgctcattgaaggttggacggctactgttaacgagtggatgaacaatggagatcccgttgtagatcatacaccacaatcagtggatgcttcttgcctggatgaggaagaagggggtctgccatcccctcccatggatgaggcagccttgtttgcagcaccatgtacctcaatcgagctatccgagttcttcgatgaaatggatgacgacggaaatattagggccgacgtcaaggacggcgggcagcgtaatccggcaagccaggagtcggtcagcaagcagtcacctacggtccagcagtatgacccagagcagaactggaagctagaccagtctgccacgaagcaactgcgaccaaacgaggcattcggctggcagacaacgcagcggtcgaattcgggggcgcaagcgaaggcgtcgagtgcggcttttggtccagggagacctcaggcgtcgcagatggggaggccgagatgctcggaggtgaagccagagcagcagcagcagcagcagcgagacgtctcggtggctcaaagaagaccgaaaccgacagtgcctaagccgccgccaactgagcatgatgaatatccagtccgcgcgaagcaacagcaacagcttgcaaaggatggcaagctggaggctacgaagcgtaagctacaggagggttaccaagaattcaacaacgcgaagaagcagcggacgatccagatggtggatccacaggacctgccgaagcaagggagccggaacctggcgctgagcggcaagccgaggaacagcagcaacatcaggaaccggctggccgtccgccgctgacgctgatcccgtccaccccatccatgcttttcactagttctggagacccgccctgcttgtatactataacctggatatatggatcagtctagcgtttctttcttttggggtccagcaccatatacacatatacttgtagcccccctctaacgtctttgtcttgggtcatacttatagagatatattaacggtgcattacatggatgtagatttatagtatatcggtgttccgaggccttgtgtgcctcttagctttggtctgtcatgcaattatgcaaatgcagatgtgtgtggtctgtgcttgcacttgcagtgaaaaaaggac

SEQ ID NO: 83894 - DNA, 592 bp, Zea Mays
ctttgaaagacattcaaatggcaagactacatcatgtggatgaaaaaggaaaatgaagcaaaggcggacgctgccacgctcagatccagcataggctcggccaatagtgatgcacagaaagctcctccaagcaaatggaggacgttcttcatgagatcccgcacaccaagcatggaaccagttgtgagaaacaacatatatgacagaggcatgattacaaacctgtgcgaggtggtcgtccctttatcagaacggaaggcattttcccgcatgaaatcagattgatgtcttttgttgcagttgctttgtcaccaaactgttgttgtatatcagtgtagaatttgcgacacattttttttggtcataccatagaggcataggggaaaatattcaggataatcgtgttcagtacctacgacctatttattataggtgaaaggttttgaagttgcatttgcctttgcaatacgccgatgtcactattctgtttttagaacatgattctgaaatggcactaaatatgaaactcatactatatgtcttcgagcaattatctacccttaaaataaatttacacaagagtgagttatat

SEQ ID NO: 83895 - DNA, 841 bp, Zea Mays
cttgttctttgggacactatgggagagattgtgctcactcaacaagaagatcatcacgtgtggaggcatgggacttcggtttattatggcatcgataattcattctcgggcttgtttccacatgttgcacagtggttgcttgctgtgcataacactcagatactcttgagtgtatttttggctatattagcactgctccttggtggcttttgtgcttaccatgcacatctttgtttgacaaatacaacaaccaacgagacattcaaatggcaagactacatcatgtggatgaaaaaggaaaatgaagcaaaggcggacgctgccacgctcagatccagcataggctcggccaatagtgatgcacagaaagctcctccaagcaaatggaggacgttcttcatgagatcccgcacaccaagcatggaaccagttgtgagaaacaacatatatgacagaggcatgattacaaacctgtgcgaggtggtcgtccctttatcagaacggaaggcattttcccgcatgaaatcagattgatgtcttttgttgcagttgctttgtcaccaaactgttgttgtatatcagtgtagaatttgcgacacattttttttggtcataccatagaggcataggggaaaatattcaggataatcgtgttcagtacctacgacctatttattataggtgaaaggttttgaagttgcatttgcctttgcaatacgccgatgtcactattctgtttttagaacatgattctgaaatggcactaaatatgaaactcatactatatgtcttcgagcaattatctacccttaaaataaatttacacaagagtgagttatat

SEQ ID NO: 83896 - DNA, 794 bp, Zea Mays
gttggacatcaaatcaatccttcctctgatagtttattatggcatcgataattcattctcgggcttgtttccacatgttgcacagtggttgcttgctgtgcataacactcagatactcttgagtgtatttttggctatattagcactgctccttggtggcttttgtgcttaccatgcacatctttgtttgacaaatacaacaaccaacgagacattcaaatggcaagactacatcatgtggatgaaaaaggaaaatgaagcaaaggcggacgctgccacgctcagatccagcataggctcggccaatagtgatgcacagaaagctcctccaagcaaatggaggacgttcttcatgagatcccgcacaccaagcatggaaccagttgtgagaaacaacatatatgacagaggcatgattacaaacctgtgcgaggtggtcgtccctttatcagaacggaaggcattttcccgcatgaaatcagattgatgtcttttgttgcagttgctttgtcaccaaactgttgttgtatatcagtgtagaatttgcgacacattttttttggtcataccatagaggcataggggaaaatattcaggataatcgtgttcagtacctacgacctatttattataggtgaaaggttttgaagttgcatttgcctttgcaatacgccgatgtcactattctgtttttagaacatgattctgaaatggcactaaatatgaaactcatactatatgtcttcgagcaattatctacccttaaaataaatttacacaagagtgagttatat

SEQ ID NO: 83897 - DNA, 877 bp, Zea Mays
agtttcatcatgtcaatacacaggcatttccttatatgtctgtacggggctttaatccttggcttcattcttgctggtgaaataaaagagcggaaaattatatacattctgacagtttattatggcatcgataattcattctcgggcttgtttccacatgttgcacagtggttgcttgctgtgcataacactcagatactcttgagtgtatttttggctatattagcactgctccttggtggcttttgtgcttaccatgcacatctttgtttgacaaatacaacaaccaacgagacattcaaatggcaagactacatcatgtggatgaaaaaggaaaatgaagcaaaggcggacgctgccacgctcagatccagcataggctcggccaatagtgatgcacagaaagctcctccaagcaaatggaggacgttcttcatgagatcccgcacaccaagcatggaaccagttgtgagaaacaacatatatgacagaggcatgattacaaacctgtgcgaggtggtcgtccctttatcagaacggaaggcattttcccgcatgaaatcagattgatgtcttttgttgcagttgctttgtcaccaaactgttgttgtatatcagtgtagaatttgcgacacattttttttggtcataccatagaggcataggggaaaatattcaggataatcgtgttcagtacctacgacctatttattataggtgaaaggttttgaagttgcatttgcctttgcaatacgccgatgtcactattctgtttttagaacatgattctgaaatggcactaaatatgaaactcatactatatgtcttcgagcaattatctacccttaaaataaatttacacaagagtgagttatat

SEQ ID NO: 83898 - DNA, 1004 bp, Zea Mays
ctatgtttatcatctgtctttcttttttataacctaatagaaggtcccaagaatcaacttaatctcctgaattatcgtttttccgagtggttaaattttattccaactacaaataataatcatagggcataaatcaattggataaaccaagcatttccttatatgtctgtacggggctttaatccttggcttcattcttgctggtgaaataaaagagcggaaaattatatacattctgacagtttattatggcatcgataattcattctcgggcttgtttccacatgttgcacagtggttgcttgctgtgcataacactcagatactcttgagtgtatttttggctatattagcactgctccttggtggcttttgtgcttaccatgcacatctttgtttgacaaatacaacaaccaacgagacattcaaatggcaagactacatcatgtggatgaaaaaggaaaatgaagcaaaggcggacgctgccacgctcagatccagcataggctcggccaatagtgatgcacagaaagctcctccaagcaaatggaggacgttcttcatgagatcccgcacaccaagcatggaaccagttgtgagaaacaacatatatgacagaggcatgattacaaacctgtgcgaggtggtcgtccctttatcagaacggaaggcattttcccgcatgaaatcagattgatgtcttttgttgcagttgctttgtcaccaaactgttgttgtatatcagtgtagaatttgcgacacattttttttggtcataccatagaggcataggggaaaatattcaggataatcgtgttcagtacctacgacctatttattataggtgaaaggttttgaagttgcatttgcctttgcaatacgccgatgtcactattctgtttttagaacatgattctgaaatggcactaaatatgaaactcatactatatgtcttcgagcaattatctacccttaaaataaatttacacaagagtgagttatat

SEQ ID NO: 83899 - DNA, 1377 bp, Zea Mays
aaactcgttaggggacgagagatggatttgaaaggtattttatgttgccataattggagtgacatattttataatagtgcagacatctttccagtatattcctgggtattatgtgagtggattgcacagatatctgagtgttgtggctgtttctgttggtgctatactcttcgtgcttactagcttttctgatcctgggactgttactgctgaaaatgtttctcaatacgtatcttcctacccatatgacaacattatttttgtggagaaagaatgttcaacttgcaagattactaggccagccagggcaaagcactgtagaatatgtgacaagtgtgttgctcgattcgatcaccattgtggatggatgaataattgcattggggagaaaaatattcggtattttgtggcctttttagtttggacgagaactcacggcgggccaaaaaatcacatgacaaaatcaagcaagaccataaaaactatcgttgcatagaattcaagtttcatcatgtcaatacacgcatttccttatatgtctgtacggggctttaatccttggcttcattcttgctggtgaaataaaagagcggaaaattatatacattctgacagtttattatggcatcgataattcattctcgggcttgtttccacatgttgcacagtggttgcttgctgtgcataacactcagatactcttgagtgtatttttggctatattagcactgctccttggtggcttttgtgcttaccatgcacatctttgtttgacaaatacaacaaccaacgagacattcaaatggcaagactacatcatgtggatgaaaaaggaaaatgaagcaaaggcggacgctgccacgctcagatccagcataggctcggccaatagtgatgcacagaaagctcctccaagcaaatggaggacgttcttcatgagatcccgcacaccaagcatggaaccagttgtgagaaacaacatatatgacagaggcatgattacaaacctgtgcgaggtggtcgtccctttatcagaacggaaggcattttcccgcatgaaatcagattgatgtcttttgttgcagttgctttgtcaccaaactgttgttgtatatcagtgtagaatttgcgacacattttttttggtcataccatagaggcataggggaaaatattcaggataatcgtgttcagtacctacgacctatttattataggtgaaaggttttgaagttgcatttgcctttgcaatacgccgatgtcactattctgtttttagaacatgattctgaaatggcactaaatatgaaactcatactatatgtcttcgagcaattatctacccttaaaataaatttacacaagagtgagttatat

SEQ ID NO: 83900 - DNA, 1308 bp, Zea Mays
tctgcctttgggtgaaaggaaggaggaaataaaactcgttaggggacgagagatggatttgaaaggtattttatgttgccataattggagtgacatattttataatagtgcagacatctttccagtatattcctgggtattatgtgagtggattgcacagatatctgagtgttgtggctgtttctgttggtgctatactcttcgtgcttactagcttttctgatcctgggactgttactgctgaaaatgtttctcaatacgtatcttcctacccatatgacaacattatttttgtggagaaagaatgttcaacttgcaagattactaggccagccagggcaaagcactgtagaatatgtgacaagtgtgttgctcgattcgatcaccattgtggatggatgaataattgcattggggagaaaaatattcggtattttgtggcctttttagtttggcatttccttatatgtctgtacggggctttaatccttggcttcattcttgctggtgaaataaaagagcggaaaattatatacattctgacagtttattatggcatcgataattcattctcgggcttgtttccacatgttgcacagtggttgcttgctgtgcataacactcagatactcttgagtgtatttttggctatattagcactgctccttggtggcttttgtgcttaccatgcacatctttgtttgacaaatacaacaaccaacgagacattcaaatggcaagactacatcatgtggatgaaaaaggaaaatgaagcaaaggcggacgctgccacgctcagatccagcataggctcggccaatagtgatgcacagaaagctcctccaagcaaatggaggacgttcttcatgagatcccgcacaccaagcatggaaccagttgtgagaaacaacatatatgacagaggcatgattacaaacctgtgcgaggtggtcgtccctttatcagaacggaaggcattttcccgcatgaaatcagattgatgtcttttgttgcagttgctttgtcaccaaactgttgttgtatatcagtgtagaatttgcgacacattttttttggtcataccatagaggcataggggaaaatattcaggataatcgtgttcagtacctacgacctatttattataggtgaaaggttttgaagttgcatttgcctttgcaatacgccgatgtcactattctgtttttagaacatgattctgaaatggcactaaatatgaaactcatactatatgtcttcgagcaattatctacccttaaaataaatttacacaagagtgagttatat

SEQ ID NO: 83901 - DNA, 1188 bp, Zea Mays
tgaagctctgcctttgggtgaaaggaaggaggaaataaaactcgttaggggacgagagatggatttgaaaggtattttatgttgccataattggagtgacatattttataatagtgcagacatctttccagtatattcctgggtattatgtgagtggattgcacagatatctgagtgttgtggctgtttctgttggtgctatactcttcgtgcttactagcttttctgatcctgggactgttactgctgaaaatgtttctcaatacgtatcttcctacccatatgacaacattatttttgtggagaaagaatgttcaacttgcaagattactaggcatttccttatatgtctgtacggggctttaatccttggcttcattcttgctggtgaaataaaagagcggaaaattatatacattctgacagtttattatggcatcgataattcattctcgggcttgtttccacatgttgcacagtggttgcttgctgtgcataacactcagatactcttgagtgtatttttggctatattagcactgctccttggtggcttttgtgcttaccatgcacatctttgtttgacaaatacaacaaccaacgagacattcaaatggcaagactacatcatgtggatgaaaaaggaaaatgaagcaaaggcggacgctgccacgctcagatccagcataggctcggccaatagtgatgcacagaaagctcctccaagcaaatggaggacgttcttcatgagatcccgcacaccaagcatggaaccagttgtgagaaacaacatatatgacagaggcatgattacaaacctgtgcgaggtggtcgtccctttatcagaacggaaggcattttcccgcatgaaatcagattgatgtcttttgttgcagttgctttgtcaccaaactgttgttgtatatcagtgtagaatttgcgacacattttttttggtcataccatagaggcataggggaaaatattcaggataatcgtgttcagtacctacgacctatttattataggtgaaaggttttgaagttgcatttgcctttgcaatacgccgatgtcactattctgtttttagaacatgattctgaaatggcactaaatatgaaactcatactatatgtcttcgagcaattatctacccttaaaataaatttacacaagagtgagttatat

SEQ ID NO: 83902 - DNA, 1285 bp, Zea Mays
atgaagctctgcctttgggtgaaaggaaggaggaaataaaactcgttaggggacgagagatggatttgaaaggtattttatgttgccataattggagtgacatattttataatagtgcagacatctttccagtatattcctgggtattatgtgagtggattgcacagatatctgagtgttgtggctgtttctgttggtgctatactcttcgtgcttactagcttttctgatcctgggactgttactgctgaaaatgtttctcaatacgtatcttcctacccatatgacaacattatttttgtggagaaagaatgttcaacttgcaagattactaggccagccagggcaaagcactgtagaatatgtgacaagtgtgttgctcgattcgatcaccattgtggatggatggtacttgtacttactaattgatggcatttccttatatgtctgtacggggctttaatccttggcttcattcttgctggtgaaataaaagagcggaaaattatatacattctgacagtttattatggcatcgataattcattctcgggcttgtttccacatgttgcacagtggttgcttgctgtgcataacactcagatactcttgagtgtatttttggctatattagcactgctccttggtggcttttgtgcttaccatgcacatctttgtttgacaaatacaacaaccaacgagacattcaaatggcaagactacatcatgtggatgaaaaaggaaaatgaagcaaaggcggacgctgccacgctcagatccagcataggctcggccaatagtgatgcacagaaagctcctccaagcaaatggaggacgttcttcatgagatcccgcacaccaagcatggaaccagttgtgagaaacaacatatatgacagaggcatgattacaaacctgtgcgaggtggtcgtccctttatcagaacggaaggcattttcccgcatgaaatcagattgatgtcttttgttgcagttgctttgtcaccaaactgttgttgtatatcagtgtagaatttgcgacacattttttttggtcataccatagaggcataggggaaaatattcaggataatcgtgttcagtacctacgacctatttattataggtgaaaggttttgaagttgcatttgcctttgcaatacgccgatgtcactattctgtttttagaacatgattctgaaatggcactaaatatgaaactcatactatatgtcttcgagcaattatctacccttaaaataaatttacacaagagtgagttatat

SEQ ID NO: 83903 - DNA, 1315 bp, Zea Mays
ccctaatgaagctctgcctttgggtgaaaggaaggaggaaataaaactcgttaggggacgagagatggatttgaaaggtattttatgttgccataattggagtgacatattttataatagtgcagacatctttccagtatattcctgggtattatgtgagtggattgcacagatatctgagtgttgtggctgtttctgttggtgctatactcttcgtgcttactagcttttctgatcctgggactgttactgctgaaaatgtttctcaatacgtatcttcctacccatatgacaacattatttttgtggagaaagaatgttcaacttgcaagattactagccagggcaaagcactgtagaatatgtgacaagtgtgttgctcgattcgatcaccattgtggatggatgaataattgcattggggagaaaaatattcggtattttgtggcctttttagtttggcatttccttatatgtctgtacggggctttaatccttggcttcattcttgctggtgaaataaaagagcggaaaattatatacattctgacagtttattatggcatcgataattcattctcgggcttgtttccacatgttgcacagtggttgcttgctgtgcataacactcagatactcttgagtgtatttttggctatattagcactgctccttggtggcttttgtgcttaccatgcacatctttgtttgacaaatacaacaaccaacgagacattcaaatggcaagactacatcatgtggatgaaaaaggaaaatgaagcaaaggcggacgctgccacgctcagatccagcataggctcggccaatagtgatgcacagaaagctcctccaagcaaatggaggacgttcttcatgagatcccgcacaccaagcatggaaccagttgtgagaaacaacatatatgacagaggcatgattacaaacctgtgcgaggtggtcgtccctttatcagaacggaaggcattttcccgcatgaaatcagattgatgtcttttgttgcagttgctttgtcaccaaactgttgttgtatatcagtgtagaatttgcgacacattttttttggtcataccatagaggcataggggaaaatattcaggataatcgtgttcagtacctacgacctatttattataggtgaaaggttttgaagttgcatttgcctttgcaatacgccgatgtcactattctgtttttagaacatgattctgaaatggcactaaatatgaaactcatactatatgtcttcgagcaattatctacccttaaaataaatttacacaagagtgagttatat

SEQ ID NO: 83904 - DNA, 1810 bp, Zea Mays
agaaattagaatgtcaattgtgcaaagccagttatttagggtgtcaaaaatacaaatttctcctcccgaacaccctactcgttctcccccatcggcgccgctacgaccagcgtttgagccactcgccgccgcgcacgatcctccacgccttgctccagtcctcgtcggcacgcctccttcccaaccctaaccctagcactagcagtcagtcgagcggcggcaagtcaagggtctgtcgagcgggccggcggcgaagaagtgtctagcgaggcgagtcaggtgcagggggacccacccgcagcggtggcgtgaagcgcgtttgactggatcgaccaggttggcggctaaacagaggaggttgcttgtttgttttctccgtccggctgcggttttcctttgactggatcgatcagatttgccggcggcggcagcggtcccccggcaaaggcgtggggatccctgccgggatggaggtgccgtggctgctgctggtgcacgggtcagtgacggcgctggtggtggtgtcgttcctctgcgggcaatggcccatcttcgagggcaccttcatccagagcatcaaccacttcctcacctttggggcctaccactacctcctgcggtttgtgcagtctgtgtgcggcactggggctagggatctcgtcctcggtgtcgagggatactgctgcgaccgacccaacccgatattgcaggtattttatgttgccataattggagtgacatattttataatagtgcagacatctttccagtatattcctgggtattatatatctgagtgttgtggctgtttctgttggtgctatactcttcgtgcttactagcttttctgatcctgggactgttactgctgaaaatgtttctcaatacgtatcttcctacccatatgacaacattatttttgtggagaaagaatgttcaacttgcaagattactaggcatttccttatatgtctgtacggggctttaatccttggcttcattcttgctggtgaaataaaagagcggaaaattatatacattctgacagtttattatggcatcgataattcattctcgggcttgtttccacatgttgcacagtggttgcttgctgtgcataacactcagatactcttgagtgtatttttggctatattagcactgctccttggtggcttttgtgcttaccatgcacatctttgtttgacaaatacaacaaccaacgagacattcaaatggcaagactacatcatgtggatgaaaaaggaaaatgaagcaaaggcggacgctgccacgctcagatccagcataggctcggccaatagtgatgcacagaaagctcctccaagcaaatggaggacgttcttcatgagatcccgcacaccaagcatggaaccagttgtgagaaacaacatatatgacagaggcatgattacaaacctgtgcgaggtggtcgtccctttatcagaacggaaggcattttcccgcatgaaatcagattgatgtcttttgttgcagttgctttgtcaccaaactgttgttgtatatcagtgtagaatttgcgacacattttttttggtcataccatagaggcataggggaaaatattcaggataatcgtgttcagtacctacgacctatttattataggtgaaaggttttgaagttgcatttgcctttgcaatacgccgatgtcactattctgtttttagaacatgattctgaaatggcactaaatatgaaactcatactatatgtcttcgagcaattatctacccttaaaataaatttacacaagagtgagttatat

SEQ ID NO: 83905 - DNA, 1918 bp, Zea Mays
agaaattagaatgtcaattgtgcaaagccagttatttagggtgtcaaaaatacaaatttctcctcccgaacaccctactcgttctcccccatcggcgccgctacgaccagcgtttgagccactcgccgccgcgcacgatcctccacgccttgctccagtcctcgtcggcacgcctccttcccaaccctaaccctagcactagcagtcagtcgagcggcggcaagtcaagggtctgtcgagcgggccggcggcgaagaagtgtctagcgaggcgagtcaggtgcagggggacccacccgcagcggtggcgtgaagcgcgtttgactggatcgaccaggttggcggctaaacagaggaggttgcttgtttgttttctccgtccggctgcggttttcctttgactggatcgatcagatttgccggcggcggcagcggtcccccggcaaaggcgtggggatccctgccgggatggaggtgccgtggctgctgctggtgcacgggtcagtgacggcgctggtggtggtgtcgttcctctgcgggcaatggcccatcttcgagggcaccttcatccagagcatcaaccacttcctcacctttggggcctaccactacctcctgcggtttgtgcagtctgtgtgcggcactggggctagggatctcgtcctcggtgtcgagggatactgctgcgaccgacccaacccgatattgcaggtattttatgttgccataattggagtgacatattttataatagtgcagacatctttccagtatattcctgggtattatgtgagtggattgcacagatatctgagtgttgtggctgtttctgttggtgctatactcttcgtgcttactagcttttctgatcctgggactgttactgctgaaaatgtttctcaatacgtatcttcctacccatatgacaacattatttttgtggagaaagaatgttcaacttgcaagattactagccagggcaaagcactgtagaatatgtgacaagtgtgttgctcgattcgatcaccattgtggatggatggtacttgtacttactaattgatggcatttccttatatgtctgtacggggctttaatccttggcttcattcttgctggtgaaataaaagagcggaaaattatatacattctgacagtttattatggcatcgataattcattctcgggcttgtttccacatgttgcacagtggttgcttgctgtgcataacactcagatactcttgagtgtatttttggctatattagcactgctccttggtggcttttgtgcttaccatgcacatctttgtttgacaaatacaacaaccaacgagacattcaaatggcaagactacatcatgtggatgaaaaaggaaaatgaagcaaaggcggacgctgccacgctcagatccagcataggctcggccaatagtgatgcacagaaagctcctccaagcaaatggaggacgttcttcatgagatcccgcacaccaagcatggaaccagttgtgagaaacaacatatatgacagaggcatgattacaaacctgtgcgaggtggtcgtccctttatcagaacggaaggcattttcccgcatgaaatcagattgatgtcttttgttgcagttgctttgtcaccaaactgttgttgtatatcagtgtagaatttgcgacacattttttttggtcataccatagaggcataggggaaaatattcaggataatcgtgttcagtacctacgacctatttattataggtgaaaggttttgaagttgcatttgcctttgcaatacgccgatgtcactattctgtttttagaacatgattctgaaatggcactaaatatgaaactcatactatatgtcttcgagcaattatctacccttaaaataaatttacacaagagtgagttatat

SEQ ID NO: 83906 - DNA, 3270 bp, Zea Mays
agaaattagaatgtcaattgtgcaaagccagttatttagggtgtcaaaaatacaaatttctcctcccgaacaccctactcgttctcccccatcggcgccgctacgaccagcgtttgagccactcgccgccgcgcacgatcctccacgccttgctccagtcctcgtcggcacgcctccttcccaaccctaaccctagcactagcagtcagtcgagcggcggcaagtcaagggtctgtcgagcgggccggcggcgaagaagtgtctagcgaggcgagtcaggtgcagggggacccacccgcagcggtggcgtgaagcgcgtttgactggatcgaccaggttggcggctaaacagaggaggttgcttgtttgttttctccgtccggctgcggttttcctttgactggatcgatcagatttgccggcggcggcagcggtcccccggcaaaggcgtggggatccctgccgggatggaggtgccgtggctgctgctggtgcacgggtcagtgacggcgctggtggtggtgtcgttcctctgcgggcaatggcccatcttcgagggcaccttcatccagagcatcaaccacttcctcacctttggggcctaccactacctcctgcggtttgtgcagtctgtgtgcggcactggggctagggatctcgtcctcggtgtcgagggatactgctgcgaccgacccaacccgatattgcaggtattttatgttgccataattggagtgacatattttataatagtgcagacatctttccagtatattcctgggtattatgtgagtggattgcacagatatctgagtgttgtggctgtttctgttggtgctatactcttcgtgcttactagcttttctgatcctgggactgttactgctgaaaatgtttctcaatacgtatcttcctacccatatgacaacattatttttgtggagaaagaatgttcaacttgcaagattactaggccagccagggcaaagcactgtagaatatgtgacaagtgtgttgctcgattcgatcaccattgtggatggatgaataattgcattggggagaaaaatattcggtattttgtggcctttttagtttggacgagaactcacggcgggccaaaaaatcacatgacaaaatcaagcaagaccataaaaactatcgttgcatagaattcaagtttcatcatgtcaatacacgtaagttcaaagaaagaaactatataaacaaaagaagcaaacatatcactaagttcttgttggctgaggcaattgtatccttctagttttaagatactaaaatcgttgaatattgatctcatcatcaattgtcgaataatgatctcatcatcaatttgtgttcttaatgctgggtatgcaactatttcatctagattaaatgcccttccaacacttgattgttctaaaatttttatttgtccaacacttgatatgcaactatttcatttagattagaatgttcacattgttattgtcttaaccatcaatcgtggaaccccttgaaaccggttaaaaaaatctcctcatttatctaaataaagaggagcaataatcatcaactatttatctaatctccaattcacaatcaaaagtgaatattctaatctaatccaaatattgaatctctgggaaagaatggagccaggaagggggcggcgccgggaacgcggtgtcaggctcgggtgatatcgaaaagaatagagccgggcagatagatgtgaggactagatcgagagtaaggatgagagtcatgaggactgaacgtttgagctgatccgatgagtaaacccagatgtacaggactgttttggtccatccaaatttttattttttctatacttaacattagatataaggggttttaaaaattgaggagggggggcatggcccactttgccccccccctgtccgtcttccactgatcttacctctatattatcaaaccaatatggtagatctactcagctacttgattcttcctttttctttttccatagtgggtgagcccgaatttcattactaaactgcaatggaactataaactaccaccagtttagactttagaattttgtcactataacaaaaaaacttctctgaaacgaccacaaaagcacacatgctatgtgaaatgattccaccaccacacttacactggtcctatttgattactcaactttggcaaacacttgagcttttttttaaggcataattgtttcagttattgtaggtagcaacctaattaatcaagattattcactaacatgaaatattaaagaaagttttttgggcaaaaatattaaataaagtttgtaattgactattgtacattttcatcaacaacatctcattttttcctatatgttttgttatgcacttcctattcccttccataacaggcatttccttatatgtctgtacggggctttaatccttggcttcattcttgctggtgaaataaaagagcggaaaattatatacattctgacagtttattatggcatcgataattcattctcgggcttgtttccacatgttgcacagtggttgcttgctgtgcataacactcagatactcttgagtgtatttttggctatattagcactgctccttggtggcttttgtgcttaccatgcacatctttgtttgacaaatacaacaaccaacgagacattcaaatggcaagactacatcatgtggatgaaaaaggaaaatgaagcaaaggcggacgctgccacgctcagatccagcataggctcggccaatagtgatgcacagaaagctcctccaagcaaatggaggacgttcttcatgagatcccgcacaccaagcatggaaccagttgtgagaaacaacatatatgacagaggcatgattacaaacctgtgcgaggtggtcgtccctttatcagaacggaaggcattttcccgcatgaaatcagattgatgtcttttgttgcagttgctttgtcaccaaactgttgttgtatatcagtgtagaatttgcgacacattttttttggtcataccatagaggcataggggaaaatattcaggataatcgtgttcagtacctacgacctatttattataggtgaaaggttttgaagttgcatttgcctttgcaatacgccgatgtcactattctgtttttagaacatgattctgaaatggcactaaatatgaaactcatactatatgtcttcgagcaattatctacccttaaaataaatttacacaagagtgagttatat

SEQ ID NO: 83907 - DNA, 2554 bp, Zea Mays
agaaattagaatgtcaattgtgcaaagccagttatttagggtgtcaaaaatacaaatttctcctcccgaacaccctactcgttctcccccatcggcgccgctacgaccagcgtttgagccactcgccgccgcgcacgatcctccacgccttgctccagtcctcgtcggcacgcctccttcccaaccctaaccctagcactagcagtcagtcgagcggcggcaagtcaagggtctgtcgagcgggccggcggcgaagaagtgtctagcgaggcgagtcaggtgcagggggacccacccgcagcggtggcgtgaagcgcgtttgactggatcgaccaggttggcggctaaacagaggaggttgcttgtttgttttctccgtccggctgcggttttcctttgactggatcgatcagatttgccggcggcggcagcggtcccccggcaaaggcgtggggatccctgccgggatggaggtgccgtggctgctgctggtgcacgggtcagtgacggcgctggtggtggtgtcgttcctctgcgggcaatggcccatcttcgagggcaccttcatccagagcatcaaccacttcctcacctttggggcctaccactacctcctgcggtttgtgcagtctgtgtgcggcactggggctagggatctcgtcctcggtgtcgagggatactgctgcgaccgacccaacccgatattgcaggtattttatgttgccataattggagtgacatattttataatagtgcagacatctttccagtatattcctgggtattatgtgagtggattgcacagatatctgagtgttgtggctgtttctgttggtgctatactcttcgtgcttactagcttttctgatcctgggactgttactgctgaaaatgtttctcaatacgtatcttcctacccatatgacaacattatttttgtggagaaagaatgttcaacttgcaagattactaggccagccagggcaaagcactgtagaatatgtgacaagtgtgttgctcgattcgatcaccattgtggatggatgaataattgcattggggagaaaaatattcggtattttgtggcctttttagtttggtgagttctgcttgggtttcattccagcttaccttataatctgtctgacctagatgggaaatctcactaatggttcttttctgttttctatgtttatcatctgtctttcttttttataacctaatagaaggtcccaagaatcaacttaatctcctgaattatcgtttttccgagtggttaaattttattccaactacaaataataatcatagggcataaatcaattggataaaccaagtaggcatcttgaaatcttatgtttatcgtactgagtttcaagattagctttcttacaagaagttggatcatagctcccttttcctcttttttttttcttatgtgaaatgctttgccttctagacttgaaagcatagttttccaatgtgttgtgcaaagtgaagttgtttagttgcagtattaactagcttatgatccatttgtgctgtagttttatgggtttggttgtagtttatagttcatcttacccagtggcggacgcaggacgagaactcacggcgggccaaaaaatcacatgacaaaatcaagcaagaccataaaaactatcgttgcatagaattcaagtttcatcatgtcaatacacgcatttccttatatgtctgtacggggctttaatccttggcttcattcttgctggtgaaataaaagagcggaaaattatatacattctgacagtttattatggcatcgataattcattctcgggcttgtttccacatgttgcacagtggttgcttgctgtgcataacactcagatactcttgagtgtatttttggctatattagcactgctccttggtggcttttgtgcttaccatgcacatctttgtttgacaaatacaacaaccaacgagacattcaaatggcaagactacatcatgtggatgaaaaaggaaaatgaagcaaaggcggacgctgccacgctcagatccagcataggctcggccaatagtgatgcacagaaagctcctccaagcaaatggaggacgttcttcatgagatcccgcacaccaagcatggaaccagttgtgagaaacaacatatatgacagaggcatgattacaaacctgtgcgaggtggtcgtccctttatcagaacggaaggcattttcccgcatgaaatcagattgatgtcttttgttgcagttgctttgtcaccaaactgttgttgtatatcagtgtagaatttgcgacacattttttttggtcataccatagaggcataggggaaaatattcaggataatcgtgttcagtacctacgacctatttattataggtgaaaggttttgaagttgcatttgcctttgcaatacgccgatgtcactattctgtttttagaacatgattctgaaatggcactaaatatgaaactcatactatatgtcttcgagcaattatctacccttaaaataaatttacacaagagtgagttatat

SEQ ID NO: 83908 - DNA, 2023 bp, Zea Mays
agaaattagaatgtcaattgtgcaaagccagttatttagggtgtcaaaaatacaaatttctcctcccgaacaccctactcgttctcccccatcggcgccgctacgaccagcgtttgagccactcgccgccgcgcacgatcctccacgccttgctccagtcctcgtcggcacgcctccttcccaaccctaaccctagcactagcagtcagtcgagcggcggcaagtcaagggtctgtcgagcgggccggcggcgaagaagtgtctagcgaggcgagtcaggtgcagggggacccacccgcagcggtggcgtgaagcgcgtttgactggatcgaccaggttggcggctaaacagaggaggttgcttgtttgttttctccgtccggctgcggttttcctttgactggatcgatcagatttgccggcggcggcagcggtcccccggcaaaggcgtggggatccctgccgggatggaggtgccgtggctgctgctggtgcacgggtcagtgacggcgctggtggtggtgtcgttcctctgcgggcaatggcccatcttcgagggcaccttcatccagagcatcaaccacttcctcacctttggggcctaccactacctcctgcggtttgtgcagtctgtgtgcggcactggggctagggatctcgtcctcggtgtcgagggatactgctgcgaccgacccaacccgatattgcaggtattttatgttgccataattggagtgacatattttataatagtgcagacatctttccagtatattcctgggtattatgtgagtggattgcacagatatctgagtgttgtggctgtttctgttggtgctatactcttcgtgcttactagcttttctgatcctgggactgttactgctgaaaatgtttctcaatacgtatcttcctacccatatgacaacattatttttgtggagaaagaatgttcaacttgcaagattactaggccagccagggcaaagcactgtagaatatgtgacaagtgtgttgctcgattcgatcaccattgtggatggatggtacttgtacttactaattgatggacgagaactcacggcgggccaaaaaatcacatgacaaaatcaagcaagaccataaaaactatcgttgcatagaattcaagtttcatcatgtcaatacacgcatttccttatatgtctgtacggggctttaatccttggcttcattcttgctggtgaaataaaagagcggaaaattatatacattctgacagtttattatggcatcgataattcattctcgggcttgtttccacatgttgcacagtggttgcttgctgtgcataacactcagatactcttgagtgtatttttggctatattagcactgctccttggtggcttttgtgcttaccatgcacatctttgtttgacaaatacaacaaccaacgagacattcaaatggcaagactacatcatgtggatgaaaaaggaaaatgaagcaaaggcggacgctgccacgctcagatccagcataggctcggccaatagtgatgcacagaaagctcctccaagcaaatggaggacgttcttcatgagatcccgcacaccaagcatggaaccagttgtgagaaacaacatatatgacagaggcatgattacaaacctgtgcgaggtggtcgtccctttatcagaacggaaggcattttcccgcatgaaatcagattgatgtcttttgttgcagttgctttgtcaccaaactgttgttgtatatcagtgtagaatttgcgacacattttttttggtcataccatagaggcataggggaaaatattcaggataatcgtgttcagtacctacgacctatttattataggtgaaaggttttgaagttgcatttgcctttgcaatacgccgatgtcactattctgtttttagaacatgattctgaaatggcactaaatatgaaactcatactatatgtcttcgagcaattatctacccttaaaataaatttacacaagagtgagttatat

SEQ ID NO: 83909 - DNA, 3144 bp, Zea Mays
agaaattagaatgtcaattgtgcaaagccagttatttagggtgtcaaaaatacaaatttctcctcccgaacaccctactcgttctcccccatcggcgccgctacgaccagcgtttgagccactcgccgccgcgcacgatcctccacgccttgctccagtcctcgtcggcacgcctccttcccaaccctaaccctagcactagcagtcagtcgagcggcggcaagtcaagggtctgtcgagcgggccggcggcgaagaagtgtctagcgaggcgagtcaggtgcagggggacccacccgcagcggtggcgtgaagcgcgtttgactggatcgaccaggttggcggctaaacagaggaggttgcttgtttgttttctccgtccggctgcggttttcctttgactggatcgatcagatttgccggcggcggcagcggtcccccggcaaaggcgtggggatccctgccgggatggaggtgccgtggctgctgctggtgcacgggtcagtgacggcgctggtggtggtgtcgttcctctgcgggcaatggcccatcttcgagggcaccttcatccagagcatcaaccacttcctcacctttggggcctaccactacctcctgcggtttgtgcagtctgtgtgcggcactggggctagggatctcgtcctcggtgtcgagggatactgctgcgaccgacccaacccgatattgcaggtattttatgttgccataattggagtgacatattttataatagtgcagacatctttccagtatattcctgggtattatgtgagtggattgcacagatatctgagtgttgtggctgtttctgttggtgctatactcttcgtgcttactagcttttctgatcctgggactgttactgctgaaaatgtttctcaatacgtatcttcctacccatatgacaacattatttttgtggagaaagaatgttcaacttgcaagattactaggccagccagggcaaagcactgtagaatatgtgacaagtgtgttgctcgattcgatcaccattgtggatggatgaataattgcattggggagaaaaatattcggtattttgtggcctttttagtttggacgagaactcacggcgggccaaaaaatcacatgacaaaatcaagcaagaccataaaaactatcgttgcatagaattcaagtttcatcatgtcaatacacgtaagttcaaagaaagaaactatataaacaaaagaagcaaacatatcactaagttcttgttggctgaggcaattgtatccttctagttttaagatactaaaatcgttgaatattgatctcatcatcaattgtcgaataatgatctcatcatcaatttgtgttcttaatgctgggtatgcaactatttcatctagattaaatgcccttccaacacttgattgttctaaaatttttatttgtccaacacttgatatgcaactatttcatttagattagaatgttcacattgttattgtcttaaccatcaatcgtggaaccccttgaaaccggttaaaaaaatctcctcatttatctaaataaagaggagcaataatcatcaactatttatctaatctccaattcacaatcaaaagtgaatattctaatctaatccaaatattgaatctctgggaaagaatggagccaggaagggggcggcgccgggaacgcggtgtcaggctcgggtgatatcgaaaagaatagagccgggcagatagatgtgaggactagatcgagagtaaggatgagagtcatgaggactgaacgtttgagctgatccgatgagtaaacccagatgtacaggactgttttggtccatccaaatttttattttttctatacttaacattagatataaggggttttaaaaattgaggagggggggcatggcccactttgccccccccctgtccgtcttccactgatcttacctctatattatcaaaccaatatggtagatctactcagctacttgattcttcctttttctttttccatagtgggtgagcccgaatttcattactaaactgcaatggaactataaactaccaccagtttagactttagaattttgtcactataacaaaaaaacttctctgaaacgaccacaaaagcacacatgctatgtgaaatgattccaccaccacacttacactggtcctatttgattactcaactttggcaaacacttgagcttttttttaaggcataattgtttcagttattgtaggtagcaacctaattaatcaagattattcactaacatgaaatattaaagaaagttttttgggcaaaaatattaaataaagtttgtaattgactattgtacattttcatcaacaacatctcattttttcctatatgttttgttatgcacttcctattcccttccataacaggcatttccttatatgtctgtacggggctttaatccttggcttcattcttgctggtgaaataaaagagcggaaaattatatacattctgacagtttattatggcatcgataattcattctcgggcttgtttccacatgttgcacagacattcaaatggcaagactacatcatgtggatgaaaaaggaaaatgaagcaaaggcggacgctgccacgctcagatccagcataggctcggccaatagtgatgcacagaaagctcctccaagcaaatggaggacgttcttcatgagatcccgcacaccaagcatggaaccagttgtgagaaacaacatatatgacagaggcatgattacaaacctgtgcgaggtggtcgtccctttatcagaacggaaggcattttcccgcatgaaatcagattgatgtcttttgttgcagttgctttgtcaccaaactgttgttgtatatcagtgtagaatttgcgacacattttttttggtcataccatagaggcataggggaaaatattcaggataatcgtgttcagtacctacgacctatttattataggtgaaaggttttgaagttgcatttgcctttgcaatacgccgatgtcactattctgtttttagaacatgattctgaaatggcactaaatatgaaactcatactatatgtcttcgagcaattatctacccttaaaataaatttacacaagagtgagttatat

SEQ ID NO: 83910 - DNA, 1923 bp, Zea Mays
agaaattagaatgtcaattgtgcaaagccagttatttagggtgtcaaaaatacaaatttctcctcccgaacaccctactcgttctcccccatcggcgccgctacgaccagcgtttgagccactcgccgccgcgcacgatcctccacgccttgctccagtcctcgtcggcacgcctccttcccaaccctaaccctagcactagcagtcagtcgagcggcggcaagtcaagggtctgtcgagcgggccggcggcgaagaagtgtctagcgaggcgagtcaggtgcagggggacccacccgcagcggtggcgtgaagcgcgtttgactggatcgaccaggttggcggctaaacagaggaggttgcttgtttgttttctccgtccggctgcggttttcctttgactggatcgatcagatttgccggcggcggcagcggtcccccggcaaaggcgtggggatccctgccgggatggaggtgccgtggctgctgctggtgcacgggtcagtgacggcgctggtggtggtgtcgttcctctgcgggcaatggcccatcttcgagggcaccttcatccagagcatcaaccacttcctcacctttggggcctaccactacctcctgcggtttgtgcagtctgtgtgcggcactggggctagggatctcgtcctcggtgtcgagggatactgctgcgaccgacccaacccgatattgcaggtattttatgttgccataattggagtgacatattttataatagtgcagacatctttccagtatattcctgggtattatgtgagtggattgcacagatatctgagtgttgtggctgtttctgttggtgctatactcttcgtgcttactagcttttctgatcctgggactgttactgctgaaaatgtttctcaatacgtatcttcctacccatatgacaacattatttttgtggagaaagaatgttcaacttgcaagattactaggccagccagggcaaagcactgtagaatatgtgacaagtgtgttgctcgattcgatcaccattgtggatggatggtacttgtacttactaattgatggcatttccttatatgtctgtacggggctttaatccttggcttcattcttgctggtgaaataaaagagcggaaaattatatacattctgacagtttattatggcatcgataattcattctcgggcttgtttccacatgttgcacagtggttgcttgctgtgcataacactcagatactcttgagtgtatttttggctatattagcactgctccttggtggcttttgtgcttaccatgcacatctttgtttgacaaatacaacaaccaacgagacattcaaatggcaagactacatcatgtggatgaaaaaggaaaatgaagcaaaggcggacgctgccacgctcagatccagcataggctcggccaatagtgatgcacagaaagctcctccaagcaaatggaggacgttcttcatgagatcccgcacaccaagcatggaaccagttgtgagaaacaacatatatgacagaggcatgattacaaacctgtgcgaggtggtcgtccctttatcagaacggaaggcattttcccgcatgaaatcagattgatgtcttttgttgcagttgctttgtcaccaaactgttgttgtatatcagtgtagaatttgcgacacattttttttggtcataccatagaggcataggggaaaatattcaggataatcgtgttcagtacctacgacctatttattataggtgaaaggttttgaagttgcatttgcctttgcaatacgccgatgtcactattctgtttttagaacatgattctgaaatggcactaaatatgaaactcatactatatgtcttcgagcaattatctacccttaaaataaatttacacaagagtgagttatat

SEQ ID NO: 83911 - DNA, 1827 bp, Zea Mays
agaaattagaatgtcaattgtgcaaagccagttatttagggtgtcaaaaatacaaatttctcctcccgaacaccctactcgttctcccccatcggcgccgctacgaccagcgtttgagccactcgccgccgcgcacgatcctccacgccttgctccagtcctcgtcggcacgcctccttcccaaccctaaccctagcactagcagtcagtcgagcggcggcaagtcaagggtctgtcgagcgggccggcggcgaagaagtgtctagcgaggcgagtcaggtgcagggggacccacccgcagcggtggcgtgaagcgcgtttgactggatcgaccaggttggcggctaaacagaggaggttgcttgtttgttttctccgtccggctgcggttttcctttgactggatcgatcagatttgccggcggcggcagcggtcccccggcaaaggcgtggggatccctgccgggatggaggtgccgtggctgctgctggtgcacgggtcagtgacggcgctggtggtggtgtcgttcctctgcgggcaatggcccatcttcgagggcaccttcatccagagcatcaaccacttcctcacctttggggcctaccactacctcctgcggtttgtgcagtctgtgtgcggcactggggctagggatctcgtcctcggtgtcgagggatactgctgcgaccgacccaacccgatattgcaggtattttatgttgccataattggagtgacatattttataatagtgcagacatctttccagtatattcctgggtattatgtgagtggattgcacagatatctgagtgttgtggctgtttctgttggtgctatactcttcgtgcttactagcttttctgatcctgggactgttactgctgaaaatgtttctcaatacgtatcttcctacccatatgacaacattatttttgtggagaaagaatgttcaacttgcaagattactaggcatttccttatatgtctgtacggggctttaatccttggcttcattcttgctggtgaaataaaagagcggaaaattatatacattctgacagtttattatggcatcgataattcattctcgggcttgtttccacatgttgcacagtggttgcttgctgtgcataacactcagatactcttgagtgtatttttggctatattagcactgctccttggtggcttttgtgcttaccatgcacatctttgtttgacaaatacaacaaccaacgagacattcaaatggcaagactacatcatgtggatgaaaaaggaaaatgaagcaaaggcggacgctgccacgctcagatccagcataggctcggccaatagtgatgcacagaaagctcctccaagcaaatggaggacgttcttcatgagatcccgcacaccaagcatggaaccagttgtgagaaacaacatatatgacagaggcatgattacaaacctgtgcgaggtggtcgtccctttatcagaacggaaggcattttcccgcatgaaatcagattgatgtcttttgttgcagttgctttgtcaccaaactgttgttgtatatcagtgtagaatttgcgacacattttttttggtcataccatagaggcataggggaaaatattcaggataatcgtgttcagtacctacgacctatttattataggtgaaaggttttgaagttgcatttgcctttgcaatacgccgatgtcactattctgtttttagaacatgattctgaaatggcactaaatatgaaactcatactatatgtcttcgagcaattatctacccttaaaataaatttacacaagagtgagttatat

SEQ ID NO: 83912 - DNA, 1880 bp, Zea Mays
agaaattagaatgtcaattgtgcaaagccagttatttagggtgtcaaaaatacaaatttctcctcccgaacaccctactcgttctcccccatcggcgccgctacgaccagcgtttgagccactcgccgccgcgcacgatcctccacgccttgctccagtcctcgtcggcacgcctccttcccaaccctaaccctagcactagcagtcagtcgagcggcggcaagtcaagggtctgtcgagcgggccggcggcgaagaagtgtctagcgaggcgagtcaggtgcagggggacccacccgcagcggtggcgtgaagcgcgtttgactggatcgaccaggttggcggctaaacagaggaggttgcttgtttgttttctccgtccggctgcggttttcctttgactggatcgatcagatttgccggcggcggcagcggtcccccggcaaaggcgtggggatccctgccgggatggaggtgccgtggctgctgctggtgcacgggtcagtgacggcgctggtggtggtgtcgttcctctgcgggcaatggcccatcttcgagggcaccttcatccagagcatcaaccacttcctcacctttggggcctaccactacctcctgcggtttgtgcagtctgtgtgcggcactggggctagggatctcgtcctcggtgtcgagggatactgctgcgaccgacccaacccgatattgcaggtattttatgttgccataattggagtgacatattttataatagtgcagacatctttccagtatattcctgggtattatgtgagtggattgcacagatatctgagtgttgtggctgtttctgttggtgctatactcttcgtgcttactagcttttctgatcctgggactgttactgctgaaaatgtttctcaatacgtatcttcctacccatatgacaacattatttttgtggagaaagaatgttcaacttgcaagattactagaataattgcattggggagaaaaatattcggtattttgtggcctttttagtttggcatttccttatatgtctgtacggggctttaatccttggcttcattcttgctggtgaaataaaagagcggaaaattatatacattctgacagtttattatggcatcgataattcattctcgggcttgtttccacatgttgcacagtggttgcttgctgtgcataacactcagatactcttgagtgtatttttggctatattagcactgctccttggtggcttttgtgcttaccatgcacatctttgtttgacaaatacaacaaccaacgagacattcaaatggcaagactacatcatgtggatgaaaaaggaaaatgaagcaaaggcggacgctgccacgctcagatccagcataggctcggccaatagtgatgcacagaaagctcctccaagcaaatggaggacgttcttcatgagatcccgcacaccaagcatggaaccagttgtgagaaacaacatatatgacagaggcatgattacaaacctgtgcgaggtggtcgtccctttatcagaacggaaggcattttcccgcatgaaatcagattgatgtcttttgttgcagttgctttgtcaccaaactgttgttgtatatcagtgtagaatttgcgacacattttttttggtcataccatagaggcataggggaaaatattcaggataatcgtgttcagtacctacgacctatttattataggtgaaaggttttgaagttgcatttgcctttgcaatacgccgatgtcactattctgtttttagaacatgattctgaaatggcactaaatatgaaactcatactatatgtcttcgagcaattatctacccttaaaataaatttacacaagagtgagttatat

SEQ ID NO: 83913 - DNA, 1556 bp, Zea Mays
agaaattagaatgtcaattgtgcaaagccagttatttagggtgtcaaaaatacaaatttctcctcccgaacaccctactcgttctcccccatcggcgccgctacgaccagcgtttgagccactcgccgccgcgcacgatcctccacgccttgctccagtcctcgtcggcacgcctccttcccaaccctaaccctagcactagcagtcagtcgagcggcggcaagtcaagggtctgtcgagcgggccggcggcgaagaagtgtctagcgaggcgagtcaggtgcagggggacccacccgcagcggtggcgtgaagcgcgtttgactggatcgaccaggttggcggctaaacagaggaggttgcttgtttgttttctccgtccggctgcggttttcctttgactggatcgatcagatttgccggcggcggcagcggtcccccggcaaaggcgtggggatccctgccgggatggaggtgccgtggctgctgctggtgcacgggtcagtgacggcgctggtggtggtgtcgttcctctgcgggcaatggcccatcttcgagggcaccttcatccagagcatcaaccacttcctcacctttggggcctaccactacctcctgcggtttgtgcagtctgtgtgcggcactggggctagggatctcgtcctcggtgtcgagggatactgctgcgaccgacccaacccgatattgcaggtattttatgttgccataattggagtgacatattttataatagtgcagacatctttccagtatattcctgggtattatgtgagtggattgcacagatatctgagtgttgtggctgtttctgttggtgctatactcttcgtgcttactagcttttctgatcctgggactgttactgctgaaaatgtttctcaatacgtatcttcctacccatatgacaacattatttttgtggagaaagaatgttcaacttgcaagattactagacattcaaatggcaagactacatcatgtggatgaaaaaggaaaatgaagcaaaggcggacgctgccacgctcagatccagcataggctcggccaatagtgatgcacagaaagctcctccaagcaaatggaggacgttcttcatgagatcccgcacaccaagcatggaaccagttgtgagaaacaacatatatgacagaggcatgattacaaacctgtgcgaggtggtcgtccctttatcagaacggaaggcattttcccgcatgaaatcagattgatgtcttttgttgcagttgctttgtcaccaaactgttgttgtatatcagtgtagaatttgcgacacattttttttggtcataccatagaggcataggggaaaatattcaggataatcgtgttcagtacctacgacctatttattataggtgaaaggttttgaagttgcatttgcctttgcaatacgccgatgtcactattctgtttttagaacatgattctgaaatggcactaaatatgaaactcatactatatgtcttcgagcaattatctacccttaaaataaatttacacaagagtgagttatat

SEQ ID NO: 83914 - DNA, 2560 bp, Zea Mays
atttaatctttagaaattagaatgtcaattgtgcaaagccagttatttagggtgtcaaaaatacaaatttctcctcccgaacaccctactcgttctcccccatcggcgccgctacgaccagcgtttgagccactcgccgccgcgcacgatcctccacgccttgctccagtcctcgtcggcacgcctccttcccaaccctaaccctagcactagcagtcagtcgagcggcggcaagtcaagggtctgtcgagcgggccggcggcgaagaagtgtctagcgaggcgagtcaggtgcagggggacccacccgcagcggtggcgtgaagcgcgtttgactggatcgaccaggttggcggctaaacagaggaggttgcttgtttgttttctccgtccggctgcggttttcctttgactggatcgatcagatttgccggcggcggcagcggtcccccggcaaaggcgtggggatccctgccgggatggaggtgccgtggctgctgctggtgcacgggtcagtgacggcgctggtggtggtgtcgttcctctgcgggcaatggcccatcttcgagggcaccttcatccagagcatcaaccacttcctcacctttggggcctaccactacctcctgcggtttgtgcagtctgtgtgcggcactggggctagggatctcgtcctcggtgtcgagggatactgctgcgaccgacccaacccgatattgcaggtattttatgttgccataattggagtgacatattttataatagtgcagacatctttccagtatattcctgggtattatgtgagtggattgcacagatatctgagtgttgtggctgtttctgttggtgctatactcttcgtgcttactagcttttctgatcctgggactgttactgctgaaaatgtttctcaatacgtatcttcctacccatatgacaacattatttttgtggagaaagaatgttcaacttgcaagattactagccagggcaaagcactgtagaatatgtgacaagtgtgttgctcgattcgatcaccattgtggatggatgaataattgcattggggagaaaaatattcggtattttgtggcctttttagtttggtgagttctgcttgggtttcattccagcttaccttataatctgtctgacctagatgggaaatctcactaatggttcttttctgttttctatgtttatcatctgtctttcttttttataacctaatagaaggtcccaagaatcaacttaatctcctgaattatcgtttttccgagtggttaaattttattccaactacaaataataatcatagggcataaatcaattggataaaccaagtaggcatcttgaaatcttatgtttatcgtactgagtttcaagattagctttcttacaagaagttggatcatagctcccttttcctcttttttttttcttatgtgaaatgctttgccttctagacttgaaagcatagttttccaatgtgttgtgcaaagtgaagttgtttagttgcagtattaactagcttatgatccatttgtgctgtagttttatgggtttggttgtagtttatagttcatcttacccagtggcggacgcaggacgagaactcacggcgggccaaaaaatcacatgacaaaatcaagcaagaccataaaaactatcgttgcatagaattcaagtttcatcatgtcaatacacgcatttccttatatgtctgtacggggctttaatccttggcttcattcttgctggtgaaataaaagagcggaaaattatatacattctgacagtttattatggcatcgataattcattctcgggcttgtttccacatgttgcacagtggttgcttgctgtgcataacactcagatactcttgagtgtatttttggctatattagcactgctccttggtggcttttgtgcttaccatgcacatctttgtttgacaaatacaacaaccaacgagacattcaaatggcaagactacatcatgtggatgaaaaaggaaaatgaagcaaaggcggacgctgccacgctcagatccagcataggctcggccaatagtgatgcacagaaagctcctccaagcaaatggaggacgttcttcatgagatcccgcacaccaagcatggaaccagttgtgagaaacaacatatatgacagaggcatgattacaaacctgtgcgaggtggtcgtccctttatcagaacggaaggcattttcccgcatgaaatcagattgatgtcttttgttgcagttgctttgtcaccaaactgttgttgtatatcagtgtagaatttgcgacacattttttttggtcataccatagaggcataggggaaaatattcaggataatcgtgttcagtacctacgacctatttattataggtgaaaggttttgaagttgcatttgcctttgcaatacgccgatgtcactattctgtttttagaacatgattctgaaatggcactaaatatgaaactcatactatatgtcttcgagcaattatctacccttaaaataaatttacacaagagtgagttatat

SEQ ID NO: 83915 - DNA, 301 bp, Zea Mays
gcccgtggagcggcggcgggtccgcaggaagccagtgtgcttcgcccgcccgtagtcctagttctctcagcggtggcggcggcggcggcggcgaggagaagaggcgtgggagggagagcaggaggaaaggtagctttggggattttttatatttttttagttctcctctcggaatggtttttgtgcgcgttttagtagtttattttttacgaagtattatttactcgagccgtcgagccgagcgtgcgacttcgctagtttgacaggggaggggggtgggggctggtagttcggtggaaag

SEQ ID NO: 83916 - DNA, 266 bp, Zea Mays
cttttttaggcatatatgtacgctgtgctcaaacagtttcggcaagacatcagagcagctggctgtcgtctgatgaggccaggaggaattcagcaatggaatcgaggactgttgcactaacaaacagtacaatgtaagactacgatcggttgatagaagacaccctacacccctacaactcagctctgcgtgtggtcgcgcagtctaaacccctactagggtacaaacagcagttcaggcagcccgaccgccgtagaatccatgag

SEQ ID NO: 83917 - DNA, 1806 bp, Zea Mays
cgaccgacgaaggggagcacacggcgtggtggaacccacaccacaccgttgcagaagagcccgaggatatgtgtcgttcgtgcaccgagcggagaaacaggggggtgagcgacgagctgcgccgacgcagaggagggagcggacgtggagcttgcgctgacgcagaggagcgcgatgagatgcactgcgtcagtcacggatgatgaggcggcggacgcggcggcctggatgaagcagtgcggtcgccggttggaaagccgctgagatgtgaacaaaaccgcagcgagcagaccggtgttgctgtcaaacattgtaaggagggcactgagagctctattttctggtcttctcttggtggaaagcagagttatacaagtagaaatgttgtacctgatgttgttcttagagaacctcatttgtataccttctctcttaggaatggttactgaaattttcaatttttcacaagatgatttgttgaccgaagacatgatgatacttgatacacactctgaggtttttgtctggatgggtcagtgcgtggagacaaaagaaaaacagaaagcatttgacattggccagtcaatgaagggaatgaaccttgcttcttcaggacattcttctcctgggatagcacacggtccctggttcatggaaactcttttgagaagaaactttcagttcttttcggaatgcgttcagagggtggcaataagagctcaggtgatggtggaccaactcaaagggcatcagccttggcagctctttcatccgcattgaatccatcgtcgcaaggaaaacagtcagatgagaggcccacaaaacccagcagcacacaggcgcagtctcattcaggccaagggtcacagagagccgctgctgttgcagcactttccaatgttttgactgcagagggatcgcacagcccccgccacagtaggtcgtccccaacagcagatgctgagaagactgaattagctcctgcttctcctcaccagttggaaacagggcctgcagaagatgtccggacagagcctgatgtctcacaggaacaaactgctaacgaaaacggaggccagaccacctttagctacgaccgcttggtatcaaagtctactgaccctgtcagtgggatagaccacaagcgcagagagacatatttggtggacaatgagttcgagaccgtgtttggcatgaccaaagaggagttctacgagcagccaaggtggaagcaagagttgcagaagaagaaagctgatcttttctgaactcacacacacggctagctacgaataaaagccctccccgttgcgcgaccctttctctctccacggctgtcgtccagcattctcaccatgctcgttccacggatgcgtgatcaccagcagctttatccgtgagttgtatactctttatctgcacacgttttgggcgcgttatatatattattattattcccctagcccctccattattctggagtccacgttctggaagttgacctttcacgtgtttctttttgtaatcattaaaaatcaatttgttcagatgtcattaccagtgagattttcgtatgtaatgatgcactggcaccaaggtgtatggaacattttttttttttttgctataagacttgagcttctattgttctggcggtgttctactcgtctaattgaaggatccccggcctcctcgttgctcatgtttgtctcacggaatttcatcagcagaatgcatcttgctagtgctacctggcagggcaggacctcctttaccggaaggacagatctgaaccgtagaaatcag

SEQ ID NO: 83918 - DNA, 1903 bp, Zea Mays
taggcgcagcaacaggggcggcgcgcgaccgacgaaggggagcacacggcgtggtggaacccacaccacaccgttgcagaagagcccgaggatatgtgtcgttcgtgcaccgagcggagaaacaggggggtgagcgacgagctgcgccgacgcagaggagggagcggacgtggagcttgcgctgacgcagaggagcgcgatgagatgcactgcgtcagtcacggatgatgaggcggcggacgcggcggcctggatgaagcagtgcggtcgccggttggaaagccgctgagatgtgaacaaaaccgcagcgagcagaccggtgttgctgtcaaacattgtaaggagggcactgagagctctattttctggtcttctcttggtggaaagcagagttatacaagtagaaatgttgtacctgatgttgttcttagagaacctcatttgtataccttctctcttaggaatgggaagctggaggttactgaaattttcaatttttcacaagatgatttgttgaccgaagacatgatgatacttgatacacactctgaggtttttgtctggatgggtcagtgcgtggagacaaaagaaaaacagaaagcatttgacattggccagaaatacgtacaaaatgccgtggcctttgaaggaatttctcctgatgtgcctctctataaagtcaatgaagggaatgaaccttgcttcttcaggacattcttctcctgggatagcacacggtccctggttcatggaaactcttttgagaagaaactttcagttcttttcggaatgcgttcagagggtggcaataagagctcaggtgatggtggaccaactcaaagggcatcagccttggcagctctttcatccgcattgaatccatcgtcgcaaggaaaacagtcagatgagaggcccacaaaacccagcagcacacaggcgcagtctcattcaggccaagggtcacagagagccgctgctgttgcagcactttccaatgttttgactgcagagggatcgcacagcccccgccacagtaggtcgtccccaacagcagatgctgagaagactgaattagctcctgcttctcctcaccagttggaaacagggcctgcagaagatgtccggacagagcctgatgtctcacaggaacaaactgctaacgaaaacggaggccagaccacctttagctacgaccgcttggtatcaaagtctactgaccctgtcagtgggatagaccacaagcgcagagagacatatttggtggacaatgagttcgagaccgtgtttggcatgaccaaagaggagttctacgagcagccaaggtggaagcaagagttgcagaagaagaaagctgatcttttctgaactcacacacacggctagctacgaataaaagccctccccgttgcgcgaccctttctctctccacggctgtcgtccagcattctcaccatgctcgttccacggatgcgtgatcaccagcagctttatccgtgagttgtatactctttatctgcacacgttttgggcgcgttatatatattattattattcccctagcccctccattattctggagtccacgttctggaagttgacctttcacgtgtttctttttgtaatcattaaaaatcaatttgttcagatgtcattaccagtgagattttcgtatgtaatgatgcactggcaccaaggtgtatggaacattttttttttttttgctataagacttgagcttctattgttctggcggtgttctactcgtctaattgaaggatccccggcctcctcgttgctcatgtttgtctcacggaatttcatcagcagaatgcatcttgctagtgctacctggcagggcaggacctcctttaccggaaggacagatctgaaccgtagaaatcag

SEQ ID NO: 83919 - DNA, 2048 bp, Zea Mays
gacggtggtgccccgactcatcctactttgacttcaaaccaaacacaccgtaatataaatgaattgtccaccactcttattagcttaagcttttagattgaattggttggtacatgcaacttaatagagccaaaccgagtggaacagcaggggtggcacacgtgacacgacacgcgtaggcgcagcaacaggggcggcgcgcgaccgacgaaggggagcacacggcgtggtggaacccacaccacaccgttgcagaagagcccgaggatatgtgtcgttcgtgcaccgagcggagaaacaggggggtgagcgacgagctgcgccgacgcagaggagggagcggacgtggagcttgcgctgacgcagaggagcgcgatgagatgcactgcgtcagtcacggatgatgaggcggcggacgcggcggcctggatgaagcagtgcggtcgccggttggaaagccgctgagatgtgaacaaaaccgcagcgagcagaccggtgttgctgtcaaacattgtaaggagggcactgagagctctattttctggtcttctcttggtggaaagcagagttatacaagtagaaatgttgtacctgatgttgttcttagagaacctcatttgtataccttctctcttaggaatgggaagctggaggttactgaaattttcaatttttcacaagatgatttgttgaccgaagacatgatgatacttgatacacactctgaggtttttgtctggatgggtcagtgcgtggagacaaaagaaaaacagaaagcatttgacattggccaggaatttctcctgatgtgcctctctataaagtcaatgaagggaatgaaccttgcttcttcaggacattcttctcctgggatagcacacggtccctggttcatggaaactcttttgagaagaaactttcagttcttttcggaatgcgttcagagggtggcaataagagctcaggtgatggtggaccaactcaaagggcatcagccttggcagctctttcatccgcattgaatccatcgtcgcaaggaaaacagtcagatgagaggcccacaaaacccagcagcacacaggcgcagtctcattcaggccaagggtcacagagagccgctgctgttgcagcactttccaatgttttgactgcagagggatcgcacagcccccgccacagtaggtcgtccccaacagcagatgctgagaagactgaattagctcctgcttctcctcaccagttggaaacagggcctgcagaagatgtccggacagagcctgatgtctcacaggaacaaactgctaacgaaaacggaggccagaccacctttagctacgaccgcttggtatcaaagtctactgaccctgtcagtgggatagaccacaagcgcagagagacatatttggtggacaatgagttcgagaccgtgtttggcatgaccaaagaggagttctacgagcagccaaggtggaagcaagagttgcagaagaagaaagctgatcttttctgaactcacacacacggctagctacgaataaaagccctccccgttgcgcgaccctttctctctccacggctgtcgtccagcattctcaccatgctcgttccacggatgcgtgatcaccagcagctttatccgtgagttgtatactctttatctgcacacgttttgggcgcgttatatatattattattattcccctagcccctccattattctggagtccacgttctggaagttgacctttcacgtgtttctttttgtaatcattaaaaatcaatttgttcagatgtcattaccagtgagattttcgtatgtaatgatgcactggcaccaaggtgtatggaacattttttttttttttgctataagacttgagcttctattgttctggcggtgttctactcgtctaattgaaggatccccggcctcctcgttgctcatgtttgtctcacggaatttcatcagcagaatgcatcttgctagtgctacctggcagggcaggacctcctttaccggaaggacagatctgaaccgtagaaatcag

SEQ ID NO: 83920 - DNA, 3230 bp, Zea Mays
gttggttacatcgccgtactctgcaaacatccagaaaagttcaaaaaaagaagaatatgaattcttatataacataaatcaaaagtgcattcttattaattgatttatctgatccaaacttcagaacaaactcaaggttcctatgatcatatcttgcacacaaaaaaatcaggtatataccttttatctgttgcctgataaaagcctgccccacatctataaacaatgaatcagaaggatcaagaagataagtgcaacaccacttaggattagcatcaactgtattcctgaagtagaaaatatcacgtagaaaatcataacaacataagatattttcagtaagaagttttataactgaaaacatgaactgctaatcaactgatactttcatattgaaatcaggcacataagcactggcagtacacagacttgatatgtttaagacatggcaaaatttgccacacgcccacacgacatgtaaactgatgtcgagcaacctgcagacattaaaaagtgataaatgctgtctgtcagtcactctggcagtgtgataatttgctagaagacaccatctcctccagggatggaaatgattattttaatgaacacaggatcttctagcatattctcacattgacagagtgactgccagcatgtaacgctttttttgtgtccgcaagcagctcggcatcagtttatgaggcctgtagcaaattttgccttaagacttctacaatccagtgcgaagttgagtcaaaactgcactttttcccttgaaaattaggacataaaaacatatcacataaagctatcaggtcatgtatgcatatattgccccttacgaataagttgttggtgttgaagtgtataagtggattgaataccttctcccatcagcttaagcttttgggttaaactagttagtgcgtccactctaacatggtatcaaagacagaggctttgtttgtgcctccacccatttattttcacgtttgcgcctttctctctggctgcgtttgtgcctttctctcggctacacatgagtgaggatgttgaagtgtataagtggattggctaccttctcccatcagcttaggttaaactggttagtgcgtcaactctaacagtttgctggttgccagtagccctatataatgttaacccactaataacttaaaatgtttgtaactattacatgtctaaggtcaccatagttactgcctaaggtagcataaattttcagaagatattggtacaaacatataggaaagtgtggtaccaatcaccaagtcgcgtaatgttggctgacggaaataattttgcgaaaatagctgggacatttcctgagaacgatggaagaactgtagagtaatagtgcgtcataagtataacttgaaacagtatttaacccaccgtagtaatagaatattgatagtaaaaagtccattgatcttttgacctcatataaaaacacattgctaaaaaaagcatggaaaggtggtacaaatgcaatggcatatgttaaaggttgaagaatagtaattttagacaataaaacaacaatgtaccagggaccatcccaagctcaatcatccgggatagaattttcttctgcaatgccaattgttgatccaaccagttttgtgacactggtccaccaaaaaaatcatctaaatctctgtcggtaacattaaaactctgaaataaaatgcattgattaataaggcccccatggcaacaggaggttgagaagaaactcaaaacacagcataagttcaaaatgacgtggggacaagaaaaagaagtaacaaaaaagatcaggaatatgcaactcagatatattcccgtccaattgggatagatgtgcatgtaacctaagcagaaacttccctctactagagggaaaatacacactatactacgcactaaagcgatgtaattttctaataactgcaagtattcaatccatgtaacttatttgaattgtttgagtgttgagataatagttgatgtataattatgcagtttttctcgaacatgtgtaattatgtagttgcaaggttattgtccatagtctcaaaagtttgacacataaagaactaataaactaggttaaataattgtctgcttgtgtgatattctactgtttcatcgtattgattatagtttcttagaacaaaacataaatttactgtactaatatgatcaattactgttgataagggaaaacattctaggtcaacttactgagataacctagtggccacgactgcgcaaagctgtgcagcctgaatagtagttgttgttacacatacactggccaagattctgctcagcttaaacatatagcccaccatcaatcaaacttttctcaataatttaaagtactataggtctaatgcagtggcaagaactatctcactgagtcaccatgtcgcgcgttcgaagcggactctccgcatttgcaggggaaatgcttccctcggtttatcccttccccagaccccactcatgtgggagcctctagcgctgggtctgcctttcttttaatttgaagtactatagtgctataaactgtaaaaactaatggaagtatattttataaaatataaggtgaaactttgatagaacatttcagagatgtagatgtgtctgtcacactaccttaaaaaccttctgccagatagattcctgtccagtaaatgctaaaggcaagttaattccttgaagcgccatccagtcaatttctttctcccatcttttccagtcccaccacacaaaagagtctatagaacgctaaatgaattttgtcagatagagaaaatgttggaatccacataaatagtgggaagcttcagagtcgtttctttcaaaattacaagttataaaaaatccagtaggacaaatgttagaagttggaagggacaggtcaacagagccaaaagtcataggatgaaatctgtacgattagggtgtaggagaacaaatgctgaaacattagttcttcatttgcaacagatgtactactagtagatcgttactgcatcaatagaatgtatggcaagaatcgtatttccaagaccacaccatgcccttatacttgccacacatctagaaagtaagtactgactgttacaaaggacaaggaggatgacactgaagaaatcaagaaattaatagatttggaatcaaacaaagattatgaaaacaaatgtttaaggcaagaaagg

SEQ ID NO: 83921 - DNA, 441 bp, Zea Mays
ctttgattagctgaaacgattgcgggtacaatccgacacaaacgaataaggccttaggaagcttacattgaacatagtccacatccaacttagtttacatcacatgcagtccatgtccaacaaagtttacatggaacatagaacaaacaccgaaatcagcccttcgttttcttctttggagtgagcttccttcgagtagttgtcaatttgtcatcttgagttgtcatgggtgccggcattgaagaaatactgaaattagttgggccaccaaccaactcagtagaaccaacaaggcaacaaccaaatcactaggtacagagtcaaaacacaccagctcgttagctacatcacttgggctcccttggccaacacttagagatggaactggattacttgaagtctccactttctttggaaaccatcctttggcggtatttttac

SEQ ID NO: 83922 - DNA, 2426 bp, Zea Mays
gttcaagttttccttaaaagatcagcagcatatatgatggtgtttccatggagcattatcttcatattgcagccagaaaccgaagagtaatctaagctatcccctggacaatgatgatgacaacattgaagaagcatctgatgcagttgtacctgatggagttgaggaggtagtattagctaagattggtgttgaggtaaaagaaagagctcggaagctactgcttgatgatatccgggccttatctatctgtggtgaaacatctcatggtcagagtcagtcaccaaaggctaatgacattgcatggattgttactggttcaaggttaatgctggtcaaacaactgaagaaacgactcgtgaatgtccgcaatggtaggaaagaagcatattctatgctaagaaccgctatgcagaaagctgcacagttgaggttgatggaaaaagaaaagaacaaaagcccttcatttgccatgagaatttctgtgaggataaaaaagatcgtgtggagcatgttagcagatggaaaatccttttctgaggccgagataaacgatatgatttttgaattcgaccgagattacaaagatattggcatcgcccagttgacaaccaagctgtttgtcctaaaaaatggacttgctaatgcaaaatcagatactgttgtatcaccctggaatccacctgctgaatggggcaagaatgcaatgcttcgtgttaatgcctggcagggagctccaactggtgggaatccagttatcgagagtttcttagtagacatctatccactaaaaatttatctgactgaagcaatgtacagaatgatgtggggatattttttccctggagatgaacagcaaccacaaaagcgacaggagcttttcaaggtctccactacagcaggaacaagacgaaagaaaaacacttctgttgcagagacaaacagtcccaataaccagtcatcaaaagaaactacatttgcacagaagcctgaacttcgaaggacatcttcatttgacaggacatgggaggaaacagttgctgagtctgtagctaacgaacttgtttcacaaatggagggtcaaacaaatacccaatatgaacctcaagatgctgctaaggattccaagttattacgtcctgtccgctctacccgcgaggataagaaaattgtagagcccaatgagttgaaacaatctagacctcaaaaaatgatggacttccgcaatataaaaataagccaggttgaactgcagctcacatatgaaggattgccatttgctgttagtgatgtaaggctacttatggataccttccatcgtgaggattttacaggaacatgggcaagactgttttctcgagtaaagaaacatattgtatggggtgtattgaagtctgttacaggcatgcagggtaaaaagtttaaagctaaatctagcagccaaaaagaaccatctacagctttaatcagtgccgctgattttaatttaagtgacagtgatggtgatgaagctggcagttctgatcaacttccagcatttctaaaaaaacctagtgatggagctggtgatggatttgcaacctccgttaagggcttgttcagtacacagaaaaagaaagctatggcatttgttttgaagacaatgaaaggagacgctgatcatgatttccatggtgaacggagtgagaacgaaattgagttctctccatttgctcggcagttgactataacaaaaacgaagaagcttatacggcggcacacaaagaagttaaacaagtctaaggttcataaagttacagctactgagctagaagtggcagagctgccaccgcgtgctcctgggtacaacacggactcctcctccgactcgtcatcggcggaaacaagcccaaaagattagcctgtgccccatgtgaaaggttgattcagagggatgcttcgaagtcgtcctgagccctggagtgatgtccaagttggttctttacaaattctggttttgatcgatacatcgttgatcctcaagatggttttgcagccatccgaatagatatagatagtgtttcaacattccctcctcatcggatgtggtgttgtctgagctgaagtttttagttgtgacgatgaattcagtgctctgcagacaacaactattatcataacctgagggtagagtgaattattcattgtatttttcttgagttgagggtagtgtttgagacatcattctcggctttgtagtactcacagtggacagtataaaatcaagtgcgacagcaaatatcgtattttaaatattgtacttaataaaatatttaatatatactagtatatatgcagcagagataagaagctttgctgttgaaggttctgactctgtaaaatacaggagtaaaacttgtcttgattattcattttccatatttcac

SEQ ID NO: 83923 - DNA, 8804 bp, Zea Mays
tgttggatcttgaggacccgctgtatccaccgttccaccgtccacgcggcgcttggcttggacgcggcgctgtgcgcggtacgggcgtacgcccgtgccagttccgggtatgttttttatggaattttgactcggacgtgggtaaccgccgcgccactccgcccgcaccttttttcctccccacccggaccggccacccccttcgcttcccccggaaatggcgcgccacctcttccccactccgctcctggccaccctctcctctccattactccagtccgcgattccgcaccatctccgctcagccccgcgcttcccctcaactttccacaacctcgaccaatcggatcccgcacggagcgcgcgccgcgattgctcgccgtcgtggcgacctcgcattcttctgcaaggaagggtttgatgccatgacggagtgctagaggccgaggaggagagtcgaagatgatgcttgggctagtgcagctgctggtggggttcgtcgtcgcctgggaagccgtcgagctcgtcctccgccacggcctcctcctctccgtcttcaagctcgccatcctcgccgccctcgccgctgcggccggatgcgtcgctatcatcttcttcgccagggcggtagcctgggtactccaacgcgcggccaagctctccatcggttgccgctcctacggcttcaattacctgagggacatcaccatttcatcaccgaagggcgctgttgagtctatctgcattggtgaaattagacttggcctgcggaaaccgatcacccagctgggatttacagtactaacccatggcccaatcctgcaactgcaaatctctgatttggatgttgtcctcaggcaacctgtgaaatccactaacaagaagaaacccgcccctcgcaaaccgatctcaaccacaacagctaaagcaaaaggaaaatccaaaggacaagtaaaatggaggctcataacaagcatggccagtctgttgtcattatccatagtggagctgaggcttaaggctccaaaagctgctcttggtatcaaggacctcaagactgatatatctaaaactggaggactggatccagttcttaatgttcaagttaatatcatacctttatttgtgcaagcactggattcagacagcattggaaacaacacattggtgtttagtaaattggattggtgggttagtggacaatattgttcagccatggacacttcagaccatagctctttcctgtttgaggatatatcactctcatgtgatcttcatcagagggataaagcaattagagtaaaaaatttggacttgatgcttggtccaattgttgtgaatttggaagagaaattactagcaaaaaagaaaccatctgcctctactgttgctgagcaaaaggatgaaccttctgtggataataaatcagcagccagatctgaagggggcaaacttgcatcactaaataagaagatcagtatgtttccagaaaagcttcaatatgtccaaacttgttctgaagtttttgcctaaagatcatggcctctcaatcaacaatgaaattggtagcatatctttgagatgtacaaggttacaaccacaagacttcggagaggtcacaacacatattcggttggaaactgatgtaacggagattcatcttctaatggatggcgctacctccgtattagaggttgtaaaagtttcaacagttgtttcagctaacattccgtctcagccagcattaccagttcaagctgaagtagatatcaagattagtggattccaatgtaacctcattgtaagcagaattaagcctctgattagaataaactcagataaaaagaagcctcttgttcttcatgaaaatcctcagcaaaagaaggcacccaaagaaaaattagcattgtctttggcatgtactatgtcagttcccgagttgactcttgtgcttcatagtcttgatgacgtaccactttaccattgtatttttcaatcagctaatgtttctgccagtaagatgatagaccgaggaactcaattgcatggcaagcttggtgacttaaaatttcttgttcctagtaaacaccaacagtcaatgaaagaaggtgcttcaggcaccttactacacattagccattcaactcttgacttggaacaaaatgatccaggccaagataatgatgaggaccatgctaaatctgctatctctgttaatatatctggaatcagaatgcacttctgtttttcctatcttgagtcactctgtgcaactgcaatgtcatacaaagtgtttatgaaaagcattttgcctcctaagaaacgatctgtccaggagaatgcttctcaaaaatctaccaagaaagccaaaagagcactgcttctcaaaatcaatgttgcacagtgctctattgtgtatgatggtgaaatgaggctggaagatatgagtattgctgatccaaagcgtgtaaattttggttctcagggtggtcgtgttgtaatcatcaacgaagctaatggttccccaaggatggcttatgtaaattctaccagtcttccagatcataagaatgtccacttctccacttctcttgagatctatcagtttggtgtatccttgaataaggcaaagcacaccatgcaggttgaacttgagaacttcagattgacgcataaagaggaccagcttgataataaacctgtagaggaaaccaagctttttgatgtgcgtaaagcaaagtttgtccagcgttctggtgggttaaatgatattgcagcctgctctctcatcaatgtgactgacattgcagtaaggtgggaacctgatccctatctggaattgcttgaagtagctacacggcttaaatctgttctgcatagaatgaaactccagaattctgttaccgaggtaaaagatgaaacattgaacatggatattctttccaaaaaggaatcaccctcagaccatggtcagcaagaaaaggcacaaaagaagcgagaatcagtgattgccattgatttggaatcactgaaaatttcaggtgaacttgctgatggggtggaggcaatgattactgttggctacatattttctgagaatgcaaagataggtgttttggttgagggaatatcagtcagcttttgtggtgcgtggatattaaaaagcagtcggatgcagttatctcgtatcccaatttctgtttctgatagcaattctgataagaaattacaatctgcagctgcatgtgattgggttattcaatgccgtgatgttaatatttgcttgccttttaggttgcaactgagagctattgatgatgctgtagaagacacattgagggcctttaaacttatttctgcagcaaaaacatctgtgttgtttcctgagaagaaatctagtaccaccagcagcaaaaagagcaaaccaaaatcaacggcatttcggtatgtgcggatcatcgtacgtgacctgatagcagaaattgaggaagagcccatgcaaggatggcttgacgaacatatgattttaatgaagaatgtattttgtgagtccacagttaggttgaatctgcttgatgagctttcttcaggtaaaaataaggattcccccaaggcaaaactggatagttctgaaaagaacagtggttgccctgatgttgatgcatatgttcctggcacacactccattgaaaaactccgggaagagatctatagacaagcatttcagtcatattaccaagcatgccagaaattgccagtatcagaagggtcaggtgcttgttcaagtggcttccagtcaggattcaagatgagtactcgtagagcatcagttatgtcagtatgtgcaaaagatgttgatgtgagcttatcaaagatcgatggcggtgatgaaggaatgattagttttattaaatctctagatccagtttgtgacaaagatgacatcccgttttcccgattgtatggtagcaattttagtttgaaaactagatccttatctgcgtacttgagagattacacatttccactcttttccggaaccaatggcaaatgtgatggacgccttgtgctgggtcagcaggcaacctgttttcagccccaagcacgacaggatgtctatgttggcaaatggtggagagtaaatctgctacgctctgcaactggttataccccaccaatgaaaacatatgctgacataccactgtattttaaaaaggcggaagtatcatttggagttggttatgagccagtttttgctgatgtgagctatgcttttacttgtgcacttaggagggcaaatttagcaaagaggtggtattttgagcgtcctgagccccctagaagagagcgcagcttaccctggtgggacgatatgaggaactatattcatggaaaatttaaattgtgttttaatgagacaaagtggcatctccctgcttcgacaagtccttatgagaagcttgatgagctgttaatcataactgacttcatggaaatacattatgtggatggttatgtcagtctttcttcgaagtatctgagggtgtacctaactagcttagagagtctagcaaagaagtccagcttggaaattccacaccatccagctatacctttccttgaaaccccctcctttttcatggatatttcaatagaatggggttgtgattcaggtaatcctatggatcattttatatttgctcttcctgcagagggaaaaccacgggataaagtttttgatgcatttcgctcaacttctctgtcactgaagtggagtttctcacttaagccttatactactgaacccatagaacaccaaaagaagagtaatttgaatacaactgctccaactgtgaatgtgggggtgcatgatttggcgtggctaatgaagtggtggaacttggtttttcttcctccccataaactaagactgttttccaggtttccgcgttttggagttcccagatttgtacggtctggaaacctcccacttgacagagttatgacagaacagtgcattcgttttgatgccatgcaattacaaattaacaacatgcctctacaggcggatgatcctgcaaaaggtttgacactacacttcacaaagtttaggtacgaaatagctttcagccgtgggaagcagatattcacctttgattgcaagcgcgaacctcttgatcttgtctaccagggcatagacctgcacttgttgaaggtatttattaacagaattcctgaatcatcaacttctatggattctaagatagaaaataaggttctgcagacaaaagataaagatagtcttggttgtgaaaaaggaaaaaagaaaactagtccaaccgagaaaagccgagatgatggattctttctttattctgattatttcacaatacggaaacaaactcccaaggctgatgctgctagattatcagcatggcaggaagatggcagaaaaaaaactgaaatgccattgatcaagtctgagtttgatgggggggatgaaagtgatcatgatcaatcaggtagtgatgatgagggatttaatgttgtggttgctgatagttgccagagagtttttgtctatggactaaagattctctggaatttagaaaaccgggctgctgtcctctcttgggttggtggtttaactcaggcatttcagcctccaaaaccatctccttctcgccaatacactcaaacaaagattctcgagaagaaacagttaattaaagaagctgagatgtccaaggatggggctctcagctctgtatcctcaacatcacagccttctgaacctcaacaaatcaagagttcagagtcaccaccttccaatggatctggcaagccagatctgacatcaagtagtgaaaatgcacttaagcgttcaaataatagtgattcagaagaggaaggtaccaggcatttcatggttaacgttgtccaacctcagttcaatttgcattcagaagaagcaaatggtaggtttctgctagctgctggtagtgggcgggtcatggttcgttcatttcattcaattgtgcaagttggtcaagagatgtttgagaaagcaattggttccagtaatgatgctactggtgggactgggccagaaatgacctggtcacgtgttgagctctctgtcatgttggagcatgttcaggctcatgttgctcccacagatgttgatccaggtgctggtattcagtggttgccaaaaatacaccggcgatcatctgaagttaagagaacgggtgctttacttgaaagggtatttatgccatgccaaatgtatttccgctacacgaggcataagggaggaacccctgaactaaaggttaaaccactgaaagagctgacatttaactcaccagacataactgctggtatgacatcacgccaatttcaagttatgatggacgtattgactaaccttctctttgcaagaactcccaagaaaccgaagagtaatctaagctatcccctggacaatgatgatgacaacattgaagaagcatctgatgcagttgtacctgatggagttgaggaggtagtattagctaagattggtgttgaggtaaaagaaagagctcggaagctactgcttgatgatatccgggccttatctatctgtggtgaaacatctcatggtcagagtcagtcaccaaaggctaatgacattgcatggattgttactggttcaaggttaatgctggtcaaacaactgaagaaacgactcgtgaatgtccgcaatggtaggaaagaagcatattctatgctaagaaccgctatgcagaaagctgcacagttgaggttgatggaaaaagaaaagaacaaaagcccttcatttgccatgagaatttctgtgaggataaaaaagatcgtgtggagcatgttagcagatggaaaatccttttctgaggccgagataaacgatatgatttttgaattcgaccgagattacaaagatattggcatcgcccagttgacaaccaagctgtttgtcctaaaaaatggacttgctaatgcaaaatcagatactgttgtatcaccctggaatccacctgctgaatggggcaagaatgcaatgcttcgtgttaatgcctggcagggagctccaactggtgggaatccagttatcgagagtttcttagtagacatctatccactaaaaatttatctgactgaagcaatgtacagaatgatgtggggatattttttccctggagatgaacagcaaccacaaaagcgacaggagcttttcaaggtctccactacagcaggaacaagacgaaagaaaaacacttctgttgcagagacaaacagtcccaataaccagtcatcaaaagaaactacatttgcacagaagcctgaacttcgaaggacatcttcatttgacaggacatgggaggaaacagttgctgagtctgtagctaacgaacttgtttcacaaatggagggtcaaacaaatacccaatatgaacctcaagatgctgctaaggattccaagttattacgtcctgtccgctctacccgcgaggataagaaaattgtagagcccaatgagttgaaacaatctagacctcaaaaaatgatggacttccgcaatataaaaataagccaggttgaactgcagctcacatatgaaggattgccatttgctgttagtgatgtaaggctacttatggataccttccatcgtgaggattttacaggaacatgggcaagactgttttctcgagtaaagaaacatattgtatggggtgtattgaagtctgttacaggcatgcagggtaaaaagtttaaagctaaatctagcagccaaaaagaaccatctacagctttaatcagtgccgctgattttaatttaagtgacagtgatggtgatgaagctggcagttctgatcaacttccagcatttctaaaaaaacctagtgatggagctggtgatggatttgcaacctccgttaagggcttgttcagtacacagaaaaagaaagctatggcatttgttttgaagacaatgaaaggagacgctgatcatgatttccatggtgaacggagtgagaacgaaattgagttctctccatttgctcggcagttgactataacaaaaacgaagaagcttatacggcggcacacaaagaagttaaacaagtctaaggttcataaagttacagctactgagctagaagtggcagagctgccaccgcgtgctcctgggtacaacacggactcctcctccgactcgtcatcggcggaaacaagcccaaaagattagcctgtgccccatgtgaaaggttgattcagagggatgcttcgaagtcgtcctgagccctggagtgatgtccaagttggttctttacaaattctggttttgatcgatacatcgttgatcctcaagatggttttgcagccatccgaatagatatagatagtgtttcaacattccctcctcatcggatgtggtgttgtctgagctgaagtttttagttgtgacgatgaattcagtgctctgcagacaacaactattatcataacctgagggtagagtgaattattcattgtatttttcttgagttgagggtagtgtttgagacatcattctcggctttgtagtactcacagtggacagtataaaatcaagtgcgacagcaaatatcgtattttaaatattgtacttaataaaatatttaatatatactagtatatatgcagcagagataagaagctttgctgttgaaggttctgactctgtaaaatacaggagtaaaacttgtcttgattattcattttccatatttcac

SEQ ID NO: 83924 - DNA, 8333 bp, Zea Mays
tgttggatcttgaggacccgctgtatccaccgttccaccgtccacgcggcgcttggcttggacgcggcgctgtgcgcggtacgggcgtacgcccgtgccagttccgggtatgttttttatggaattttgactcggacgtgggtaaccgccgcgccactccgcccgcaccttttttcctccccacccggaccggccacccccttcgcttcccccggaaatggcgcgccacctcttccccactccgctcctggccaccctctcctctccattactccagtccgcgattccgcaccatctccgctcagccccgcgcttcccctcaactttccacaacctcgaccaatcggatcccgcacggagcgcgcgccgcgattgctcgccgtcgtggcgacctcgcattcttctgcaaggaagggtttgatgccatgacggagtgctagaggccgaggaggagagtcgaagatgatgcttgggctagtgcagctgctggtggggttcgtcgtcgcctgggaagccgtcgagctcgtcctccgccacggcctcctcctctccgtcttcaagctcgccatcctcgccgccctcgccgctgcggccggatgcgtcgctatcatcttcttcgccagggcggtagcctgggtactccaacgcgcggccaagctctccatcggttgccgctcctacggcttcaattacctgagggacatcaccatttcatcaccgaagggcgctgttgagtctatctgcattggtgaaattagacttggcctgcggaaaccgatcacccagctgggatttacagtactaacccatggcccaatcctgcaactgcaaatctctgatttggatgttgtcctcaggcaacctgtgaaatccactaacaagaagaaacccgcccctcgcaaaccgatctcaaccacaacagctaaagcaaaaggaaaatccaaaggacaagtaaaatggaggctcataacaagcatggccagtctgttgtcattatccatagtggagctgaggcttaaggctccaaaagctgctcttggtatcaaggacctcaagactgatatatctaaaactggaggactggatccagttcttaatgttcaagttaatatcatacctttatttgtgcaagcactggattcagacagcattggaaacaacacattggtgtttagtaaattggattggtgggttagtggacaatattgttcagccatggacacttcagaccatagctctttcctgtttgaggatatatcactctcatgtgatcttcatcagagggataaagcaattagagtaaaaaatttggacttgatgcttggtccaattgttgtgaatttggaagagaaattactagcaaaaaagaaaccatctgcctctactgttgctgagcaaaaggatgaaccttctgtggataataaatcagcagccagatctgaagggggcaaacttgcatcactaaataagaagatcagtatgtttccagaaaaggttagcttcaatatgtccaaacttgttctgaagtttttgcctaaagatcatggcctctcaatcaacaatgaaattggtagcatatctttgagatgtacaaggttacaaccacaagacttcggagaggtcacaacacatattcggttggaaactgatgtaacggagattcatcttctaatggatggcgctacctccgtattagaggttgtaaaagtttcaacagttgtttcagctaacattccgtctcagccagcattaccagttcaagctgaagtagatatcaagattagtggattccaatgtaacctcattgtaagcagaattaagcctctgattagaataaactcagataaaaagaagcctcttgttcttcatgaaaatcctcagcaaaagaaggcacccaaagaaaaattagcattgtctttggcatgtactatgtcagttcccgagttgactcttgtgcttcatagtcttgatgacgtaccactttaccattgtatttttcaatcagctaatgtttctgccagtaagatgatagaccgaggaactcaattgcatggcaagcttggtgacttaaaatttcttgttcctagtaaacaccaacagtcaatgaaagaaggtgcttcaggcaccttactacacattagccattcaactcttgacttggaacaaaatgatccaggccaagataatgatgaggaccatgctaaatctgctatctctgttaatatatctggaatcagaatgcacttctgtttttcctatcttgagtcactctgtgcaactgcaatgtcatacaaagtgtttatgaaaagcattttgcctcctaagaaacgatctgtccaggagaatgcttctcaaaaatctaccaagaaagccaaaagagcactgcttctcaaaatcaatgttgcacagtgctctattgtgtatgatggtgaaatgaggctggaagatatgagtattgctgatccaaagcgtgtaaattttggttctcagggtggtcgtgttgtaatcatcaacgaagctaatggttccccaaggatggcttatgtaaattctaccagtcttccagatcataagaatgtccacttctccacttctcttgagatctatcagtttggtgtatccttgaataaggcaaagcacaccatgcaggttgaacttgagaacttcagattgacgcataaagaggaccagcttgataataaacctgtagaggaaaccaagctttttgatgtgcgtaaagcaaagtttgtccagcgttctggtgggttaaatgatattgcagcctgctctctcatcaatgtgactgacattgcagtaaggtgggaacctgatccctatctggaattgcttgaagtagctacacggcttaaatctgttctgcatagaatgaaactccagaattctgttaccgaggtaaaagatgaaacattgaacatggatattctttccaaaaaggaatcaccctcagaccatggtcagcaagaaaaggcacaaaagaagcgagaatcagtgattgccattgatttggaatcactgaaaatttcaggtgaacttgctgatggggtggaggcaatgattactgttggctacatattttctgagaatgcaaagataggtgttttggttgagggaatatcagtcagcttttgtggtgcgtggatattaaaaagcagtcggatgcagttatctcgtatcccaatttctgtttctgatagcaattctgataagaaattacaatctgcagctgcatgtgattgggttattcaatgccgtgatgttaatatttgcttgccttttaggttgcaactgagagctattgatgatgctgtagaagacacattgagggcctttaaacttatttctgcagcaaaaacatctgtgttgtttcctgagaagaaatctagtaccaccagcagcaaaaagagcaaaccaaaatcaacggcatttcggtatgtgcggatcatcgtacgtgacctgatagcagaaattgaggaagagcccatgcaaggatggcttgacgaacatatgattttaatgaagaatgtattttgtgagtccacagttaggttgaatctgcttgatgagctttcttcaggtaaaaataaggattcccccaaggcaaaactggatagttctgaaaagaacagtggttgccctgatgttgatgcatatgttcctggcacacactccattgaaaaactccgggaagagatctatagacaagcatttcagtcatattaccaagcatgccagaaattgccagtatcagaagggtcaggtgcttgttcaagtggcttccagtcaggattcaagatgagtactcgtagagcatcagttatgtcagtatgtgcaaaagatgttgatgtgagcttatcaaagatcgatggcggtgatgaaggaatgattagttttattaaatctctagatccagtttgtgacaaagatgacatcccgttttcccgattgtatggtagcaattttagtttgaaaactagatccttatctgcgtacttgagagattacacatttccactcttttccggaaccaatggcaaatgtgatggacgccttgtgctgggtcagcaggcaacctgttttcagccccaagcacgacaggatgtctatgttggcaaatggtggagagtaaatctgctacgctctgcaactggttataccccaccaatgaaaacatatgctgacataccactgtattttaaaaaggcggaagtatcatttggagttggttatgagccagtttttgctgatgtgagctatgcttttacttgtgcacttaggagggcaaatttagcaaagaggtggtattttgagcgtcctgagccccctagaagagagcgcagcttaccctggtgggacgatatgaggaactatattcatggaaaatttaaattgtgttttaatgagacaaagtggcatctccctgcttcgacaagtccttatgagaagcttgatgagctgttaatcataactgacttcatggaaatacattatgtggatggttatgtcagtctttcttcgaagtatctgagggtgtacctaactagcttagagagtctagcaaagaagtccagcttggaaattccacaccatccagctatacctttccttgaaaccccctcctttttcatggatatttcaatagaatggggttgtgattcaggtaatcctatggatcattttatatttgctcttcctgcagagggaaaaccacgggataaagtttttgatgcatttcgctcaacttctctgtcactgaagtggagtttctcacttaagccttatactactgaacccatagaacaccaaaagaagagtaatttgaatacaactgctccaactgtgaatgtgggggtgcatgatttggcgtggctaatgaagtggtggaacttggtttttcttcctccccataaactaagactgttttccaggtttccgcgttttggagttcccagatttgtacggtctggaaacctcccacttgacagagttatgacagaacagtgcattcgttttgatgccatgcaattacaaattaacaacatgcctctacaggcggatgatcctgcaaaaggtttgacactacacttcacaaagtttaggtacgaaatagctttcagccgtgggaagcagatattcacctttgattgcaagcgcgaacctcttgatcttgtctaccagggcatagacctgcacttgttgaaggtatttattaacagaattcctgaatcatcaacttctatggattctaagatagaaaataaggttctgcagacaaaagataaagatagtcttggttgtgaaaaaggaaaaaagaaaactagtccaaccgagaaaagccgagatgatggattctttctttattctgattatttcacaatacggaaacaaactcccaaggctgatgctgctagattatcagcatggcaggaagatggcagaaaaaaaactgaaatgccattgatcaagtctgagtttgatgggggggatgaaagtgatcatgatcaatcaggtagtgatgatgagggatttaatgttgtggttgctgatagttgccagagagtttttgtctatggactaaagattctctggaatttagaaaaccgggctgctgtcctctcttgggttggtggtttaactcaggcatttcagcctccaaaaccatctccttctcgccaatacactcaaacaaagattctcgagaagaaacagttaattaaagaagctgagatgtccaaggatggggctctcagctctgtatcctcaacatcacagccttctgaacctcaacaaatcaagagttcagagtcaccaccttccaatggatctggcaagccagatctgacatcaagtagtgaaaatgcacttaagcgttcaaataatagtgattcagaagaggaaggtaccaggcatttcatggttaacgttgtccaacctcagttcaatttgcattcagaagaagcaaatgaaaccgaagagtaatctaagctatcccctggacaatgatgatgacaacattgaagaagcatctgatgcagttgtacctgatggagttgaggaggtagtattagctaagattggtgttgaggtaaaagaaagagctcggaagctactgcttgatgatatccgggccttatctatctgtggtgaaacatctcatggtcagagtcagtcaccaaaggctaatgacattgcatggattgttactggttcaaggttaatgctggtcaaacaactgaagaaacgactcgtgaatgtccgcaatggtaggaaagaagcatattctatgctaagaaccgctatgcagaaagctgcacagttgaggttgatggaaaaagaaaagaacaaaagcccttcatttgccatgagaatttctgtgaggataaaaaagatcgtgtggagcatgttagcagatggaaaatccttttctgaggccgagataaacgatatgatttttgaattcgaccgagattacaaagatattggcatcgcccagttgacaaccaagctgtttgtcctaaaaaatggacttgctaatgcaaaatcagatactgttgtatcaccctggaatccacctgctgaatggggcaagaatgcaatgcttcgtgttaatgcctggcagggagctccaactggtgggaatccagttatcgagagtttcttagtagacatctatccactaaaaatttatctgactgaagcaatgtacagaatgatgtggggatattttttccctggagatgaacagcaaccacaaaagcgacaggagcttttcaaggtctccactacagcaggaacaagacgaaagaaaaacacttctgttgcagagacaaacagtcccaataaccagtcatcaaaagaaactacatttgcacagaagcctgaacttcgaaggacatcttcatttgacaggacatgggaggaaacagttgctgagtctgtagctaacgaacttgtttcacaaatggagggtcaaacaaatacccaatatgaacctcaagatgctgctaaggattccaagttattacgtcctgtccgctctacccgcgaggataagaaaattgtagagcccaatgagttgaaacaatctagacctcaaaaaatgatggacttccgcaatataaaaataagccaggttgaactgcagctcacatatgaaggattgccatttgctgttagtgatgtaaggctacttatggataccttccatcgtgaggattttacaggaacatgggcaagactgttttctcgagtaaagaaacatattgtatggggtgtattgaagtctgttacaggcatgcagggtaaaaagtttaaagctaaatctagcagccaaaaagaaccatctacagctttaatcagtgccgctgattttaatttaagtgacagtgatggtgatgaagctggcagttctgatcaacttccagcatttctaaaaaaacctagtgatggagctggtgatggatttgcaacctccgttaagggcttgttcagtacacagaaaaagaaagctatggcatttgttttgaagacaatgaaaggagacgctgatcatgatttccatggtgaacggagtgagaacgaaattgagttctctccatttgctcggcagttgactataacaaaaacgaagaagcttatacggcggcacacaaagaagttaaacaagtctaaggttcataaagttacagctactgagctagaagtggcagagctgccaccgcgtgctcctgggtacaacacggactcctcctccgactcgtcatcggcggaaacaagcccaaaagattagcctgtgccccatgtgaaaggttgattcagagggatgcttcgaagtcgtcctgagccctggagtgatgtccaagttggttctttacaaattctggttttgatcgatacatcgttgatcctcaagatggttttgcagccatccgaatagatatagatagtgtttcaacattccctcctcatcggatgtggtgttgtctgagctgaagtttttagttgtgacgatgaattcagtgctctgcagacaacaactattatcataacctgagggtagagtgaattattcattgtatttttcttgagttgagggtagtgtttgagacatcattctcggctttgtagtactcacagtggacagtataaaatcaagtgcgacagcaaatatcgtattttaaatattgtacttaataaaatatttaatatatactagtatatatgcagcagagataagaagctttgctgttgaaggttctgactctgtaaaatacaggagtaaaacttgtcttgattattcattttccatatttcac

SEQ ID NO: 83925 - DNA, 8638 bp, Zea Mays
tgttggatcttgaggacccgctgtatccaccgttccaccgtccacgcggcgcttggcttggacgcggcgctgtgcgcggtacgggcgtacgcccgtgccagttccgggtatgttttttatggaattttgactcggacgtgggtaaccgccgcgccactccgcccgcaccttttttcctccccacccggaccggccacccccttcgcttcccccggaaatggcgcgccacctcttccccactccgctcctggccaccctctcctctccattactccagtccgcgattccgcaccatctccgctcagccccgcgcttcccctcaactttccacaacctcgaccaatcggatcccgcacggagcgcgcgccgcgattgctcgccgtcgtggcgacctcgcattcttctgcaaggaagggtttgatgccatgacggagtgctagaggccgaggaggagagtcgaagatgatgcttgggctagtgcagctgctggtggggttcgtcgtcgcctgggaagccgtcgagctcgtcctccgccacggcctcctcctctccgtcttcaagctcgccatcctcgccgccctcgccgctgcggccggatgcgtcgctatcatcttcttcgccagggcggtagcctgggtactccaacgcgcggccaagctctccatcggttgccgctcctacggcttcaattacctgagggacatcaccatttcatcaccgaagggcgctgttgagtctatctgcattggtgaaattagacttggcctgcggaaaccgatcacccagctgggatttacagtactaacccatggcccaatcctgcaactgcaaatctctgatttggatgttgtcctcaggcaacctgtgaaatccactaacaagaagaaacccgcccctcgcaaaccgatctcaaccacaacagctaaagcaaaaggaaaatccaaaggacaagtaaaatggaggctcataacaagcatggccagtctgttgtcattatccatagtggagctgaggcttaaggctccaaaagctgctcttggtatcaaggacctcaagactgatatatctaaaactggaggactggatccagttcttaatgttcaagttaatatcatacctttatttgtgcaagcactggattcagacagcattggaaacaacacattggtgtttagtaaattggattggtgggttagtggacaatattgttcagccatggacacttcagaccatagctctttcctgtttgaggatatatcactctcatgtgatcttcatcagagggataaagcaattagagtaaaaaatttggacttgatgcttggtccaattgttgtgaatttggaagagaaattactagcaaaaaagaaaccatctgcctctactgttgctgagcaaaaggatgaaccttctgtggataataaatcagcagccagatctgaagggggcaaacttgcatcactaaataagaagatcagtatgtttccagaaaagcttctaatggatggcgctacctccgtattagaggttgtaaaagtttcaacagttgtttcagctaacattccgtctcagccagcattaccagttcaagctgaagtagatatcaagattagtggattccaatgtaacctcattgtaagcagaattaagcctctgattagaataaactcagataaaaagaagcctcttgttcttcatgaaaatcctcagcaaaagaaggcacccaaagaaaaattagcattgtctttggcatgtactatgtcagttcccgagttgactcttgtgcttcatagtcttgatgacgtaccactttaccattgtatttttcaatcagctaatgtttctgccagtaagatgatagaccgaggaactcaattgcatggcaagcttggtgacttaaaatttcttgttcctagtaaacaccaacagtcaatgaaagaaggtgcttcaggcaccttactacacattagccattcaactcttgacttggaacaaaatgatccaggccaagataatgatgaggaccatgctaaatctgctatctctgttaatatatctggaatcagaatgcacttctgtttttcctatcttgagtcactctgtgcaactgcaatgtcatacaaagtgtttatgaaaagcattttgcctcctaagaaacgatctgtccaggagaatgcttctcaaaaatctaccaagaaagccaaaagagcactgcttctcaaaatcaatgttgcacagtgctctattgtgtatgatggtgaaatgaggctggaagatatgagtattgctgatccaaagcgtgtaaattttggttctcagggtggtcgtgttgtaatcatcaacgaagctaatggttccccaaggatggcttatgtaaattctaccagtcttccagatcataagaatgtccacttctccacttctcttgagatctatcagtttggtgtatccttgaataaggcaaagcacaccatgcaggttgaacttgagaacttcagattgacgcataaagaggaccagcttgataataaacctgtagaggaaaccaagctttttgatgtgcgtaaagcaaagtttgtccagcgttctggtgggttaaatgatattgcagcctgctctctcatcaatgtgactgacattgcagtaaggtgggaacctgatccctatctggaattgcttgaagtagctacacggcttaaatctgttctgcatagaatgaaactccagaattctgttaccgaggtaaaagatgaaacattgaacatggatattctttccaaaaaggaatcaccctcagaccatggtcagcaagaaaaggcacaaaagaagcgagaatcagtgattgccattgatttggaatcactgaaaatttcaggtgaacttgctgatggggtggaggcaatgattactgttggctacatattttctgagaatgcaaagataggtgttttggttgagggaatatcagtcagcttttgtggtgcgtggatattaaaaagcagtcggatgcagttatctcgtatcccaatttctgtttctgatagcaattctgataagaaattacaatctgcagctgcatgtgattgggttattcaatgccgtgatgttaatatttgcttgccttttaggttgcaactgagagctattgatgatgctgtagaagacacattgagggcctttaaacttatttctgcagcaaaaacatctgtgttgtttcctgagaagaaatctagtaccaccagcagcaaaaagagcaaaccaaaatcaacggcatttcggtatgtgcggatcatcgtacgtgacctgatagcagaaattgaggaagagcccatgcaaggatggcttgacgaacatatgattttaatgaagaatgtattttgtgagtccacagttaggttgaatctgcttgatgagctttcttcaggtaaaaataaggattcccccaaggcaaaactggatagttctgaaaagaacagtggttgccctgatgttgatgcatatgttcctggcacacactccattgaaaaactccgggaagagatctatagacaagcatttcagtcatattaccaagcatgccagaaattgccagtatcagaagggtcaggtgcttgttcaagtggcttccagtcaggattcaagatgagtactcgtagagcatcagttatgtcagtatgtgcaaaagatgttgatgtgagcttatcaaagatcgatggcggtgatgaaggaatgattagttttattaaatctctagatccagtttgtgacaaagatgacatcccgttttcccgattgtatggtagcaattttagtttgaaaactagatccttatctgcgtacttgagagattacacatttccactcttttccggaaccaatggcaaatgtgatggacgccttgtgctgggtcagcaggcaacctgttttcagccccaagcacgacaggatgtctatgttggcaaatggtggagagtaaatctgctacgctctgcaactggttataccccaccaatgaaaacatatgctgacataccactgtattttaaaaaggcggaagtatcatttggagttggttatgagccagtttttgctgatgtgagctatgcttttacttgtgcacttaggagggcaaatttagcaaagaggtggtattttgagcgtcctgagccccctagaagagagcgcagcttaccctggtgggacgatatgaggaactatattcatggaaaatttaaattgtgttttaatgagacaaagtggcatctccctgcttcgacaagtccttatgagaagcttgatgagctgttaatcataactgacttcatggaaatacattatgtggatggttatgtcagtctttcttcgaagtatctgagggtgtacctaactagcttagagagtctagcaaagaagtccagcttggaaattccacaccatccagctatacctttccttgaaaccccctcctttttcatggatatttcaatagaatggggttgtgattcaggtaatcctatggatcattttatatttgctcttcctgcagagggaaaaccacgggataaagtttttgatgcatttcgctcaacttctctgtcactgaagtggagtttctcacttaagccttatactactgaacccatagaacaccaaaagaagagtaatttgaatacaactgctccaactgtgaatgtgggggtgcatgatttggcgtggctaatgaagtggtggaacttggtttttcttcctccccataaactaagactgttttccaggtttccgcgttttggagttcccagatttgtacggtctggaaacctcccacttgacagagttatgacagaacagtgcattcgttttgatgccatgcaattacaaattaacaacatgcctctacaggcggatgatcctgcaaaaggtttgacactacacttcacaaagtttaggtacgaaatagctttcagccgtgggaagcagatattcacctttgattgcaagcgcgaacctcttgatcttgtctaccagggcatagacctgcacttgttgaaggtatttattaacagaattcctgaatcatcaacttctatggattctaagatagaaaataaggttctgcagacaaaagataaagatagtcttggttgtgaaaaaggaaaaaagaaaactagtccaaccgagaaaagccgagatgatggattctttctttattctgattatttcacaatacggaaacaaactcccaaggctgatgctgctagattatcagcatggcaggaagatggcagaaaaaaaactgaaatgccattgatcaagtctgagtttgatgggggggatgaaagtgatcatgatcaatcaggtagtgatgatgagggatttaatgttgtggttgctgatagttgccagagagtttttgtctatggactaaagattctctggaatttagaaaaccgggctgctgtcctctcttgggttggtggtttaactcaggcatttcagcctccaaaaccatctccttctcgccaatacactcaaacaaagattctcgagaagaaacagttaattaaagaagctgagatgtccaaggatggggctctcagctctgtatcctcaacatcacagccttctgaacctcaacaaatcaagagttcagagtcaccaccttccaatggatctggcaagccagatctgacatcaagtagtgaaaatgcacttaagcgttcaaataatagtgattcagaagaggaaggtaccaggcatttcatggttaacgttgtccaacctcagttcaatttgcattcagaagaagcaaatggtaggtttctgctagctgctggtagtgggcgggtcatggttcgttcatttcattcaattgtgcaagttggtcaagagatgtttgagaaagcaattggttccagtaatgatgctactggtgggactgggccagaaatgacctggtcacgtgttgagctctctgtcatgttggagcatgttcaggctcatgttgctcccacagatgttgatccaggtgctggtattcagtggttgccaaaaatacaccggcgatcatctgaagttaagagaacgggtgctttacttgaaagggtatttatgccatgccaaatgtatttccgctacacgaggcataagggaggaacccctgaactaaaggttaaaccactgaaagagctgacatttaactcaccagacataactgctggtatgacatcacgccaatttcaagttatgatggacgtattgactaaccttctctttgcaagaactcccaagaaaccgaagagtaatctaagctatcccctggacaatgatgatgacaacattgaagaagcatctgatgcagttgtacctgatggagttgaggaggtagtattagctaagattggtgttgaggtaaaagaaagagctcggaagctactgcttgatgatatccgggccttatctatctgtggtgaaacatctcatggtcagagtcagtcaccaaaggctaatgacattgcatggattgttactggttcaaggttaatgctggtcaaacaactgaagaaacgactcgtgaatgtccgcaatggtaggaaagaagcatattctatgctaagaaccgctatgcagaaagctgcacagttgaggttgatggaaaaagaaaagaacaaaagcccttcatttgccatgagaatttctgtgaggataaaaaagatcgtgtggagcatgttagcagatggaaaatccttttctgaggccgagataaacgatatgatttttgaattcgaccgagattacaaagatattggcatcgcccagttgacaaccaagctgtttgtcctaaaaaatggacttgctaatgcaaaatcagatactgttgtatcaccctggaatccacctgctgaatggggcaagaatgcaatgcttcgtgttaatgcctggcagggagctccaactggtgggaatccagttatcgagagtttcttagtagacatctatccactaaaaatttatctgactgaagcaatgtacagaatgatgtggggatattttttccctggagatgaacagcaaccacaaaagcgacaggagcttttcaaggtctccactacagcaggaacaagacgaaagaaaaacacttctgttgcagagacaaacagtcccaataaccagtcatcaaaagaaactacatttgcacagaagcctgaacttcgaaggacatcttcatttgacaggacatgggaggaaacagttgctgagtctgtagctaacgaacttgtttcacaaatggagggtcaaacaaatacccaatatgaacctcaagatgctgctaaggattccaagttattacgtcctgtccgctctacccgcgaggataagaaaattgtagagcccaatgagttgaaacaatctagacctcaaaaaatgatggacttccgcaatataaaaataagccaggttgaactgcagctcacatatgaaggattgccatttgctgttagtgatgtaaggctacttatggataccttccatcgtgaggattttacaggaacatgggcaagactgttttctcgagtaaagaaacatattgtatggggtgtattgaagtctgttacaggcatgcagggtaaaaagtttaaagctaaatctagcagccaaaaagaaccatctacagctttaatcagtgccgctgattttaatttaagtgacagtgatggtgatgaagctggcagttctgatcaacttccagcatttctaaaaaaacctagtgatggagctggtgatggatttgcaacctccgttaagggcttgttcagtacacagaaaaagaaagctatggcatttgttttgaagacaatgaaaggagacgctgatcatgatttccatggtgaacggagtgagaacgaaattgagttctctccatttgctcggcagttgactataacaaaaacgaagaagcttatacggcggcacacaaagaagttaaacaagtctaaggttcataaagttacagctactgagctagaagtggcagagctgccaccgcgtgctcctgggtacaacacggactcctcctccgactcgtcatcggcggaaacaagcccaaaagattagcctgtgccccatgtgaaaggttgattcagagggatgcttcgaagtcgtcctgagccctggagtgatgtccaagttggttctttacaaattctggttttgatcgatacatcgttgatcctcaagatggttttgcagccatccgaatagatatagatagtgtttcaacattccctcctcatcggatgtggtgttgtctgagctgaagtttttagttgtgacgatgaattcagtgctctgcagacaacaactattatcataacctgagggtagagtgaattattcattgtatttttcttgagttgagggtagtgtttgagacatcattctcggctttgtagtactcacagtggacagtataaaatcaagtgcgacagcaaatatcgtattttaaatattgtacttaataaaatatttaatatatactagtatatatgcagcagagataagaagctttgctgttgaaggttctgactctgtaaaatacaggagtaaaacttgtcttgattattcattttccatatttcac

SEQ ID NO: 83926 - DNA, 3969 bp, Zea Mays
  misc_feature (3969)..(3969): n is a, c, g, or t
caccacgtcacaacagggcctccacaccgcctccctccgcccccttccgcttgcgcccacgaaccctaaccctaaccccgtcgccgccgcgggacctacccggctagcactcgcaccgcgccttcggcgtcatattcggcgcctgcgctctccgtcctcgcgcggcgagccggggtgctagggttttctagatggatccacgccgcgcacccccgcggggcgggggcgccaacgggctctcttactccacgctgttcaatctcgagcctttgctgaacttcagggttcctgtaccggaagatcttgcccgctacgagaatagcagctcaaatgggagtccaagcagtgaaggtcagggatccttattggatcagtacaatggtgtaaatgatgcttcccatggcctgcaccggaagcggaaaaggcatcttgacggtgccagcgatgatgatgaggcagatgcctatagtaacaaaataactgaggagcaataccgtgctatgctcagtgaacatgtccagaagtaccggaggtcaaagttcaaggagggtgcttttagttctgatcctcctcgtgtggcaacccctcaattaaaacacaaaaatggtggtaaaaaaaatatgaagcgcataagtgatttcagcgatgatgtggcattagatgggatagaagcctcacatgaatataatgggatagagtgtattaaaactcatggcggttttaataagcttgttgcaactcttgattccacttatttagatatgggggatagtacacgttacttagttccagagggttatgataagttagcatcatccctcaatctccctgtttcttctgatatacgtgtcgaggaacacttcttgaagggcatgctagatttacgcaccctagcagcaatgcttggtactgaccaaaggtttgaggcttccaatcgtggtggaatatctgaacccctgccacaatttgaatctctcaaagaaagggtaaaggtgcaggaattttctcttcaagttaccaaggacccctttgcaattccggaaggatcagctgggaggatacgaaggtatattatatcagaagctggcgatttgcaggttcattatgttagagtcatggaaaaaggagatacatatgagattatcgagcgtagcttaccgaagaagcaaatagtaaagaaggaaccttcggtaattatgaaagaagagtctgaaaagacttacaaactatggcagtctcttgctacaaaaagcataccaaagcatcacaagaattttactgctttgataaagaaacgacaagtagatgcgaagcgcttctctgatagttgtcaacgagaggtaaagctcaaagtaagcaggtcactgaaactgatgaggtgtgctgcagtacgcacaagaaagtttgttaaggatatgcagatgttttggaaacgtgtagacaaagagcagtatgagttgaggaaaaaagaggaaaaagaagctgctgaagctttgaaacgggaagaggagctacgtgaagccaaaagacagcaacataggctaaattttctgctgtcccaaacagagctttatagtcatttcatgcagaacaagactggtggttcagcgccgcctgatgaggaagatgtccctgatgaagaagatcctgaggaagctcaattgaaaagagaggccttgagagcagctcagcatgccgtctctcaacaaaagatgaagacaaatgcatttgatagtgaaattgtgaggcttcgtcaaacttctgattctgctcttccaactgatgattcatctagcatggaccctagcaagattgatctattacacccctcaacaatgcctgagacgtcttctgtgcagaccccggagttgtttaagggtgtattaaaagaatatcagttaaaaggcttacagtggctggttaattgttatgagcagggcttgaatggcattcttgctgatgagatgggtcttggcaaaactgttcaggctatggcattcctgtctcatttggctgaggacaaaaacatatggggcccctttcttgtggtggctcctgcatctgttgtgaataattgggctgaggagttgattagattctgccctgacctaaagatacttccttactggggtccagagaggatgattcttcgaaagaatatcaaccccaagcgtctgtatcgcagagatgctagctttcatattcttattacaaactatcagatacttgtgaatgaagagaagcttttgagacgtgttaaatggcaatacatggtattggatgaggcccaggctatcaaaagttcaagcagccagcgatggaagacattactgagcttcaactgtagaaaccgtcttcttcttactgggacaccaatacagaacaatatggctgagttatgggcacttcttcatttcattatgcccactctatttgacagccatgaacagttcaacgagtggttctcaaagggttgctgatgttttgacagtattgagggtcatgctgagcatggaggagctttgaatgaacatcaacttagtagattgcacgctattttgaagccctttatgctccgccgggttaagattgatgtcattgctgaaatgaccaaaaagaaagaagaaattgttccctgcaaattgagttctcgtcaacaagttttctatcaagccataaaaaataagatctcgcttaacgagttgcttgctggaagtcgtggcagtctaaatgacaagaagttacttagcctgatgaatattgtcatgcagttacggaaggtctgcaatcaccccgagctgtttgagcggaatgagggaagctcttacttcaactttgctgaaatcccaaactcacttctttctcccccatttggggaattgcaagatgtacactatgcaggcaagagaaatcccataatctttgagattccaaagttagtttatgagggaatcatctccaacatggaaaattctggaaacatctgtggatttcagaatggatatttgaacaggctgtttaatatatttttgcccagcaatatctatcgctcagccattccagaagttagttcatcaaaagagtctcttctatcatctggtgcatttggctttacacgtttgtcaaatctgtgcccagttgaagcttccttcctggctactgcttcattgtttgagagactagtcttttcagtaatgcaatggaatatgaactacactgctgaaattctggatgaattccttgattcagaagataccggcatccagtccagtcataatgattccacaaaagttcgtgcagttgcccgtttgttgctttcttctacaaaggtcaagcccagtttgcttaggacaaagattgggactgggccaattgatggcccatatgaagcactggtgctttctcatcgcgacaggctcgcttcaaacattaggcttcttcgttcagcatatgcttttattccgccagctagagcaccacctataaatgtttggtgtgctgatcgaaattttgcctataagttcaccgatgagatgtatgatccttgggccaagaaactgttcctgggatttgctcgtacttctgagttcaatggtcctagacaaccaattgctcctcatcctttgatacaagaacttaatactgatttgcccatcattgagccgatgctgcagctaccctataggatatttgggtcttctccaccgatgagtaattttgatccagctaaaatgctcactgattctgggaagctccacaccttggatatgctactacgacgccttcgagctgaaggtcatcgtgtgcttctttttgctcagatgactaaaatgttggacattcttgaggattacatgaatttcagaaaattcaagtatttcagacttgatgggtcttcagccatctcagaccgccgtgacatggtccgagattttcagaacaggaatgacatatttgttttcttgttan

SEQ ID NO: 83927 - DNA, 4003 bp, Zea Mays
  misc_feature (4003)..(4003): n is a, c, g, or t
ccaagccaaagccatgcctccttcgacttctacttcccccaccacgtcacaacagggcctccacaccgcctccctccgcccccttccgcttgcgcccacgaaccctaaccctaaccccgtcgccgccgcgggacctacccggctagcactcgcaccgcgccttcggcgtcatattcggcgcctgcgctctccgtcctcgcgcggcgagccggggtgctagggttttctagatggatccacgccgcgcacccccgcggggcgggggcgccaacgggctctcttactccacgctgttcaatctcgagcctttgctgaacttcagggttcctgtaccggaagatcttgcccgctacgagaatagcagctcaaatgggagtccaagcagtgaaggtcagggatccttattggatcagtacaatggtgtaaatgatgcttcccatggcctgcaccggaagcggaaaaggcatcttgacggtgccagcgatgatgatgaggcagatgcctatagtaacaaaataactgaggagcaataccgtgctatgctcagtgaacatgtccagaagtaccggaggtcaaagttcaaggagggtgcttttagttctgatcctcctcgtgtggcaacccctcaattaaaacacaaaaatggtggtaaaaaaaatatgaagcgcataagtgatttcagcgatgatgtggcattagatgggatagaagcctcacatgaatataatgggatagagtgtattaaaactcatggcggttttaataagcttgttgcaactcttgattccacttatttagatatgggggatagtacacgttacttagttccagagggttatgataagttagcatcatccctcaatctccctgtttcttctgatatacgtgtcgaggaacacttcttgaagggcatgctagatttacgcaccctagcagcaatgcttggtactgaccaaaggtttgaggcttccaatcgtggtggaatatctgaacccctgccacaatttgaatctctcaaagaaagggtaaaggtgcaggaattttctcttcaagttaccaaggacccctttgcaattccggaaggatcagctgggaggatacgaaggtatattatatcagaagctggcgatttgcaggttcattatgttagagtcatggaaaaaggagatacatatgagattatcgagcgtagcttaccgaagaagcaaatagtaaagaaggaaccttcggtaattatgaaagaagagtctgaaaagacttacaaactatggcagtctcttgctacaaaaagcataccaaagcatcacaagaattttactgctttgataaagaaacgacaagtagatgcgaagcgcttctctgatagttgtcaacgagaggtaaagctcaaagtaagcaggtcactgaaactgatgaggtgtgctgcagtacgcacaagaaagtttgttaaggatatgcagatgttttggaaacgtgtagacaaagagcagtatgagttgaggaaaaaagaggaaaaagaagctgctgaagctttgaaacgggaagaggagctacgtgaagccaaaagacagcaacataggctaaattttctgctgtcccaaacagagctttatagtcatttcatgcagaacaagactggtggttcagcgccgcctgatgaggaagatgtccctgatgaagaagatcctgaggaagctcaattgaaaagagaggccttgagagcagctcagcatgccgtctctcaacaaaagatgaagacaaatgcatttgatagtgaaattgtgaggcttcgtcaaacttctgattctgctcttccaactgatgattcatctagcatggaccctagcaagattgatctattacacccctcaacaatgcctgagacgtcttctgtgcagaccccggagttgtttaagggtgtattaaaagaatatcagttaaaaggcttacagtggctggttaattgttatgagcagggcttgaatggcattcttgctgatgagatgggtcttggcaaaactgttcaggctatggcattcctgtctcatttggctgaggacaaaaacatatggggcccctttcttgtggtggctcctgcatctgttgtgaataattgggctgaggagttgattagattctgccctgacctaaagatacttccttactggggtccagagaggatgattcttcgaaagaatatcaaccccaagcgtctgtatcgcagagatgctagctttcatattcttattacaaactatcagatacttgtgaatgaagagaagcttttgagacgtgttaaatggcaatacatggtattggatgaggcccaggctatcaaaagttcaagcagccagcgatggaagacattactgagcttcaactgtagaaaccgtcttcttcttactgggacaccaatacagaacaatatggctgagttatgggcacttcttcatttcattatgcccactctatttgacagccatgaacagttcaacgagtggttctcaaagggtattgagggtcatgctgagcatggaggagctttgaatgaacatcaacttagtagattgcacgctattttgaagccctttatgctccgccgggttaagattgatgtcattgctgaaatgaccaaaaagaaagaagaaattgttccctgcaaattgagttctcgtcaacaagttttctatcaagccataaaaaataagatctcgcttaacgagttgcttgctggaagtcgtggcagtctaaatgacaagaagttacttagcctgatgaatattgtcatgcagttacggaaggtctgcaatcaccccgagctgtttgagcggaatgagggaagctcttacttcaactttgctgaaatcccaaactcacttctttctcccccatttggggaattgcaagatgtacactatgcaggcaagagaaatcccataatctttgagattccaaagttagtttatgagggaatcatctccaacatggaaaattctggaaacatctgtggatttcagaatggatatttgaacaggctgtttaatatatttttgcccagcaatatctatcgctcagccattccagaagttagttcatcaaaagagtctcttctatcatctggtgcatttggctttacacgtttgtcaaatctgtgcccagttgaagcttccttcctggctactgcttcattgtttgagagactagtcttttcagtaatgcaatggaatatgaactacactgctgaaattctggatgaattccttgattcagaagataccggcatccagtccagtcataatgattccacaaaagttcgtgcagttgcccgtttgttgctttcttctacaaaggtcaagcccagtttgcttaggacaaagattgggactgggccaattgatggcccatatgaagcactggtgctttctcatcgcgacaggctcgcttcaaacattaggcttcttcgttcagcatatgcttttattccgccagctagagcaccacctataaatgtttggtgtgctgatcgaaattttgcctataagttcaccgatgagatgtatgatccttgggccaagaaactgttcctgggatttgctcgtacttctgagttcaatggtcctagacaaccaattgctcctcatcctttgatacaagaacttaatactgatttgcccatcattgagccgatgctgcagctaccctataggatatttgggtcttctccaccgatgagtaattttgatccagctaaaatgctcacttgcttgatgacaggattctgggaagctccacaccttggatatgctactacgacgccttcgagctgaaggtcatcgtgtgcttctttttgctcagatgactaaaatgttggacattcttgaggattacatgaatttcagaaaattcaagtatttcagacttgatgggtcttcagccatctcagaccgccgtgacatggtccgagattttcagaacaggaatgacatatttgttttcttgttan

SEQ ID NO: 83928 - DNA, 3979 bp, Zea Mays
  misc_feature (3979)..(3979): n is a, c, g, or t
ctcctctccccccttcgcggccaagccaaagccatgcctccttcgacttctacttcccccaccacgtcacaacagggcctccacaccgcctccctccgcccccttccgcttgcgcccacgaaccctaaccctaaccccgtcgccgccgcgggacctacccggctagcactcgcaccgcgccttcggcgtcatattcggcgcctgcgctctccgtcctcgcgcggcgagccggggtgctagggttttctagatggatccacgccgcgcacccccgcggggcgggggcgccaacgggctctcttactccacgctgttcaatctcgagcctttgctgaacttcagggttcctgtaccggaagatcttgcccgctacgagaatagcagctcaaatgggagtccaagcagtgaaggtcagggatccttattggatcagtacaatggtgtaaatgatgcttcccatggcctgcaccggaagcggaaaaggcatcttgacggtgccagcgatgatgatgaggcagatgcctatagtaacaaaataactgaggagcaataccgtgctatgctcagtgaacatgtccagaagtaccggaggtcaaagttcaaggagggtgcttttagttctgatcctcctcgtgtggcaacccctcaattaaaacacaaaaatggtggtaaaaaaaatatgaagcgcataagtgatttcagcgatgatgtggcattagatgggatagaagcctcacatgaatataatgggatagagtgtattaaaactcatggcggttttaataagcttgttgcaactcttgattccacttatttagatatgggggatagtacacgttacttagttccagagggttatgataagttagcatcatccctcaatctccctgtttcttctgatatacgtgtcgaggaacacttcttgaagggcatgctagatttacgcaccctagcagcaatgcttggtactgaccaaaggtttgaggcttccaatcgtggtggaatatctgaacccctgccacaatttgaatctctcaaagaaagggtaaaggtgcaggaattttctcttcaagttaccaaggacccctttgcaattccggaaggatcagctgggaggatacgaaggtatattatatcagaagctggcgatttgcaggttcattatgttagagtcatggaaaaaggagatacatatgagattatcgagcgtagcttaccgaagaagcaaatagtaaagaaggaaccttcggtaattatgaaagaagagtctgaaaagacttacaaactatggcagtctcttgctacaaaaagcataccaaagcatcacaagaattttactgctttgataaagaaacgacaagtagatgcgaagcgcttctctgatagttgtcaacgagaggtaaagctcaaagtaagcaggtcactgaaactgatgaggtgtgctgcagtacgcacaagaaagtttgttaaggatatgcagatgttttggaaacgtgtagacaaagagcagtatgagttgaggaaaaaagaggaaaaagaagctgctgaagctttgaaacgggaagaggagctacgtgaagccaaaagacagcaacataggctaaattttctgctgtcccaaacagagctttatagtcatttcatgcagaacaagactggtggttcagcgccgcctgatgaggaagatgtccctgatgaagaagatcctgaggaagctcaattgaaaagagaggccttgagagcagctcagcatgccgtctctcaacaaaagatgaagacaaatgcatttgatagtgaaattgtgaggcttcgtcaaacttctgattctgctcttccaactgatgattcatctagcatggaccctagcaagattgatctattacacccaccccggagttgtttaagggtgtattaaaagaatatcagttaaaaggcttacagtggctggttaattgttatgagcagggcttgaatggcattcttgctgatgagatgggtcttggcaaaactgttcaggctatggcattcctgtctcatttggctgaggacaaaaacatatggggcccctttcttgtggtggctcctgcatctgttgtgaataattgggctgaggagttgattagattctgccctgacctaaagatacttccttactggggtccagagaggatgattcttcgaaagaatatcaaccccaagcgtctgtatcgcagagatgctagctttcatattcttattacaaactatcagatacttgtgaatgaagagaagcttttgagacgtgttaaatggcaatacatggtattggatgaggcccaggctatcaaaagttcaagcagccagcgatggaagacattactgagcttcaactgtagaaaccgtcttcttcttactgggacaccaatacagaacaatatggctgagttatgggcacttcttcatttcattatgcccactctatttgacagccatgaacagttcaacgagtggttctcaaagggtattgagggtcatgctgagcatggaggagctttgaatgaacatcaacttagtagattgcacgctattttgaagccctttatgctccgccgggttaagattgatgtcattgctgaaatgaccaaaaagaaagaagaaattgttccctgcaaattgagttctcgtcaacaagttttctatcaagccataaaaaataagatctcgcttaacgagttgcttgctggaagtcgtggcagtctaaatgacaagaagttacttagcctgatgaatattgtcatgcagttacggaaggtctgcaatcaccccgagctgtttgagcggaatgagggaagctcttacttcaactttgctgaaatcccaaactcacttctttctcccccatttggggaattgcaagatgtacactatgcaggcaagagaaatcccataatctttgagattccaaagttagtttatgagggaatcatctccaacatggaaaattctggaaacatctgtggatttcagaatggatatttgaacaggctgtttaatatatttttgcccagcaatatctatcgctcagccattccagaagttagttcatcaaaagagtctcttctatcatctggtgcatttggctttacacgtttgtcaaatctgtgcccagttgaagcttccttcctggctactgcttcattgtttgagagactagtcttttcagtaatgcaatggaatatgaactacactgctgaaattctggatgaattccttgattcagaagataccggcatccagtccagtcataatgattccacaaaagttcgtgcagttgcccgtttgttgctttcttctacaaaggtcaagcccagtttgcttaggacaaagattgggactgggccaattgatggcccatatgaagcactggtgctttctcatcgcgacaggctcgcttcaaacattaggcttcttcgttcagcatatgcttttattccgccagctagagcaccacctataaatgtttggtgtgctgatcgaaattttgcctataagttcaccgatgagatgtatgatccttgggccaagaaactgttcctgggatttgctcgtacttctgagttcaatggtcctagacaaccaattgctcctcatcctttgatacaagaacttaatactgatttgcccatcattgagccgatgctgcagctaccctataggatatttgggtcttctccaccgatgagtaattttgatccagctaaaatgctcactgattctgggaagctccacaccttggatatgctactacgacgccttcgagctgaaggtcatcgtgtgcttctttttgctcagatgactaaaatgttggacattcttgaggattacatgaatttcagaaaattcaagtatttcagacttgatgggtcttcagccatctcagaccgccgtgacatggtccgagattttcagaacaggaatgacatatttgttttcttgttan

SEQ ID NO: 83929 - DNA, 4003 bp, Zea Mays
  misc_feature (4003)..(4003): n is a, c, g, or t
cttctcctctccccccttcgcggccaagccaaagccatgcctccttcgacttctacttcccccaccacgtcacaacagggcctccacaccgcctccctccgcccccttccgcttgcgcccacgaaccctaaccctaaccccgtcgccgccgcgggacctacccggctagcactcgcaccgcgccttcggcgtcatattcggcgcctgcgctctccgtcctcgcgcggcgagccggggtgctagggttttctagatggatccacgccgcgcacccccgcggggcgggggcgccaacgggctctcttactccacgctgttcaatctcgagcctttgctgaacttcagggttcctgtaccggaagatcttgcccgctacgagaatagcagctcaaatgggagtccaagcagtgaaggtcagggatccttattggatcagtacaatggtgtaaatgatgcttcccatggcctgcaccggaagcggaaaaggcatcttgacggtgccagcgatgatgatgaggcagatgcctatagtaacaaaataactgaggagcaataccgtgctatgctcagtgaacatgtccagaagtaccggaggtcaaagttcaaggagggtgcttttagttctgatcctcctcgtgtggcaacccctcaattaaaacacaaaaatggtggtaaaaaaaatatgaagcgcataagtgatttcagcgatgatgtggcattagatgggatagaagcctcacatgaatataatgggatagagtgtattaaaactcatggcggttttaataagcttgttgcaactcttgattccacttatttagatatgggggatagtacacgttacttagttccagagggttatgataagttagcatcatccctcaatctccctgtttcttctgatatacgtgtcgaggaacacttcttgaagggcatgctagatttacgcaccctagcagcaatgcttggtactgaccaaaggtttgaggcttccaatcgtggtggaatatctgaacccctgccacaatttgaatctctcaaagaaagggtaaaggtgcaggaattttctcttcaagttaccaaggacccctttgcaattccggaaggatcagctgggaggatacgaaggtatattatatcagaagctggcgatttgcaggttcattatgttagagtcatggaaaaaggagatacatatgagattatcgagcgtagcttaccgaagaagcaaatagtaaagaaggaaccttcggtaattatgaaagaagagtctgaaaagacttacaaactatggcagtctcttgctacaaaaagcataccaaagcatcacaagaattttactgctttgataaagaaacgacaagtagatgcgaagcgcttctctgatagttgtcaacgagaggtaaagctcaaagtaagcaggtcactgaaactgatgaggtgtgctgcagtacgcacaagaaagtttgttaaggatatgcagatgttttggaaacgtgtagacaaagagcagtatgagttgaggaaaaaagaggaaaaagaagctgctgaagctttgaaacgggaagaggagctacgtgaagccaaaagacagcaacataggctaaattttctgctgtcccaaacagagctttatagtcatttcatgcagaacaagactggtggttcagcgccgcctgatgaggaagatgtccctgatgaagaagatcctgaggaagctcaattgaaaagagaggccttgagagcagctcagcatgccgtctctcaacaaaagatgaagacaaatgcatttgatagtgaaattgtgaggcttcgtcaaacttctgattctgctcttccaactgatgattcatctagcatggaccctagcaagattgatctattacacccctcaacaatgcctgagacgtcttctgtgcagaccccggagttgtttaagggtgtattaaaagaatatcagttaaaaggcttacagtggctggttaattgttatgagcagggcttgaatggcattcttgctgatgagatgggtcttggcaaaactgttcaggctatggcattcctgtctcatttggctgaggacaaaaacatatggggcccctttcttgtggtggctcctgcatctgttgtgaataattgggctgaggagttgattagattctgccctgacctaaagatacttccttactggggtccagagaggatgattcttcgaaagaatatcaaccccaagcgtctgtatcgcagagatgctagctttcatattcttattacaaactatcagatacttgtgaatgaagagaagcttttgagacgtgttaaatggcaatacatggtattggatgaggcccaggctatcaaaagttcaagcagccagcgatggaagacattactgagcttcaactgtagaaaccgtcttcttcttactgggacaccaatacagaacaatatggctgagttatgggcacttcttcatttcattatgcccactctatttgacagccatgaacagttcaacgagtggttctcaaagggtattgagggtcatgctgagcatggaggagctttgaatgaacatcaacttagtagattgcacgctattttgaagccctttatgctccgccgggttaagattgatgtcattgctgaaatgaccaaaaagaaagaagaaattgttccctgcaaattgagttctcgtcaacaagttttctatcaagccataaaaaataagatctcgcttaacgagttgcttgctggaagtcgtggcagtctaaatgacaagaagttacttagcctgatgaatattgtcatgcagtctgcaatcaccccgagctgtttgagcggaatgagggaagctcttacttcaactttgctgaaatcccaaactcacttctttctcccccatttggggaattgcaagatgtacactatgcaggcaagagaaatcccataatctttgagattccaaagttagtttatgagggaatcatctccaacatggaaaattctggaaacatctgtggatttcagaatggatatttgaacaggctgtttaatatatttttgcccagcaatatctatcgctcagccattccagaagttagttcatcaaaagagtctcttctatcatctggtgcatttggctttacacgtttgtcaaatctgtgcccagttgaagcttccttcctggctactgcttcattgtttgagagactagtcttttcagtaatgcaatggaatatgaactacactgctgaaattctggatgaattccttgattcagaagataccggcatccagtccagtcataatgattccacaaaagttcgtgcagttgcccgtttgttgctttcttctacaaaggtcaagcccagtttgcttaggacaaagattgggactgggccaattgatggcccatatgaagcactggtgctttctcatcgcgacaggctcgcttcaaacattaggcttcttcgttcagcatatgcttttattccgccagctagagcaccacctataaatgtttggtgtgctgatcgaaattttgcctataagttcaccgatgagatgtatgatccttgggccaagaaactgttcctgggatttgctcgtacttctgagttcaatggtcctagacaaccaattgctcctcatcctttgatacaagaacttaatactgatttgcccatcattgagccgatgctgcagctaccctataggatatttgggtcttctccaccgatgagtaattttgatccagctaaaatgctcactgattctgggaagctccacaccttggatatgctactacgacgccttcgagctgaaggtcatcgtgtgcttctttttgctcagatgactaaaatgttggacattcttgaggattacatgaatttcagaaaattcaagtatttcagacttgatgggtcttcagccatctcagaccgccgtgacatggtccgagattttcagaacaggaatgacatatttgttttcttgttan

SEQ ID NO: 83930 - DNA, 4015 bp, Zea Mays
  misc_feature (4015)..(4015): n is a, c, g, or t
ttcgctttcctgctcccatcttctcctctccccccttcgcggccaagccaaagccatgcctccttcgacttctacttcccccaccacgtcacaacagggcctccacaccgcctccctccgcccccttccgcttgcgcccacgaaccctaaccctaaccccgtcgccgccgcgggacctacccggctagcactcgcaccgcgccttcggcgtcatattcggcgcctgcgctctccgtcctcgcgcggcgagccggggtgctagggttttctagatggatccacgccgcgcacccccgcggggcgggggcgccaacgggctctcttactccacgctgttcaatctcgagcctttgctgaacttcagggttcctgtaccggaagatcttgcccgctacgagaatagcagctcaaatgggagtccaagcagtgaaggtcagggatccttattggatcagtacaatggtgtaaatgatgcttcccatggcctgcaccggaagcggaaaaggcatcttgacggtgccagcgatgatgatgaggcagatgcctatagtaacaaaataactgaggagcaataccgtgctatgctcagtgaacatgtccagaagtaccggaggtcaaagttcaaggagggtgcttttagttctgatcctcctcgtgtggcaacccctcaattaaaacacaaaaatggtggtaaaaaaaatatgaagcgcataagtgatttcagcgatgatgtggcattagatgggatagaagcctcacatgaatataatgggatagagtgtattaaaactcatggcggttttaataagcttgttgcaactcttgattccacttatttagatatgggggatagtacacgttacttagttccagagggttatgataagttagcatcatccctcaatctccctgtttcttctgatatacgtgtcgaggaacacttcttgaagggcatgctagatttacgcaccctagcagcaatgcttggtactgaccaaaggtttgaggcttccaatcgtggtggaatatctgaacccctgccacaatttgaatctctcaaagaaagggtaaaggtgcaggaattttctcttcaagttaccaaggacccctttgcaattccggaaggatcagctgggaggatacgaaggtatattatatcagaagctggcgatttgcaggttcattatgttagagtcatggaaaaaggagatacatatgagattatcgagcgtagcttaccgaagaagcaaatagtaaagaaggaaccttcggtaattatgaaagaagagtctgaaaagacttacaaactatggcagtctcttgctacaaaaagcataccaaagcatcacaagaattttactgctttgataaagaaacgacaagtagatgcgaagcgcttctctgatagttgtcaacgagaggtaaagctcaaagtaagcaggtcactgaaactgatgaggtgtgctgcagtacgcacaagaaagtttgttaaggatatgcagatgttttggaaacgtgtagacaaagagcagtatgagttgaggaaaaaagaggaaaaagaagctgctgaagctttgaaacgggaagaggagctacgtgaagccaaaagacagcaacataggctaaattttctgctgtcccaaacagagctttatagtcatttcatgcagaacaagactggtggttcagcgccgcctgatgaggaagatgtccctgatgaagaagatcctgaggaagctcaattgaaaagagaggccttgagagcagctcagcatgccgtctctcaacaaaagatgaagacaaatgcatttgatagtgaaattgtgaggcttcgtcaaacttctgattctgctcttccaactgatgattcatctagcatggaccctagcaagattgatctattacacccctcaacaatgcctgagacgtcttctgtgcagaccccggagttgtttaagggtgtattaaaagaatatcagttaaaaggcttacagtggctggttaattgttatgagcagggcttgaatggcattcttgctgatgagatgggtcttggcaaaactgttcaggctatggcattcctgtctcatttggctgaggacaaaaacatatggggcccctttcttgtggtggctcctgcatctgttgtgaataattgggctgaggagttgattagattctgccctgacctaaagatacttccttactggggtccagagaggatgattcttcgaaagaatatcaaccccaagcgtctgtatcgcagagatgctagctttcatattcttattacaaactatcagatacttgtgaatgaagagaagcttttgagacgtgttaaatggcaatacatggtattggatgaggcccaggctatcaaaagttcaagcagccagcgatggaagacattactgagcttcaactgtagaaaccgtcttcttcttactgggacaccaatacagaacaatatggctgagttatgggcacttcttcatttcattatgcccactctatttgacagccatgaacagttcaacgagtggttctcaaagggtattgagggtcatgctgagcatggaggagctttgaatgaacatcaacttagtagattgcacgctattttgaagccctttatgctccgccgggttaagattgatgtcattgctgaaatgaccaaaaagaaagaagaaattgttccctgcaaattgagttctcgtcaacaagttttctatcaagccataaaaaataagatctcgcttaacgagttgcttgctggaagtcgtggcagtctaaatgacaagaagttacttagcctgatgaatattgtcatgcagttacggaaggtctgcaatcaccccgagctgtttgagcggaatgagggaagctcttacttcaactttgctgaaatcccaaactcacttctttctcccccatttggggaattgcaagatgtacactatgcaggcaagagaaatcccataatctttgagattccaaagttagtttatgagggaatcatctccaacatggaaaattctggaaacatctgtggatttcagaatggatatttgaacaggctgtttaatatatttttgcccagcaatatctatcgctcagccattccagaagttagttcatcaaaagagtctcttctatcatctggtgcatttggctttacacgtttgtcaaatctgtgcccagttgaagcttccttcctggctactgcttcattgtttgagagactagtcttttcagtaatgcaatggaatatgaactacactgctgaaattctggatgaattccttgattcagaagataccggcatccagtccagtcataatgattccacaaaagttcgtgcagttgcccgtttgttgctttcttctacaaaggtcaagcccagtttgcttaggacaaagattgggactgggccaattgatggcccatatgaagcactggtgctttctcatcgcgacaggctcgcttcaaacattaggcttcttcgttcagcatatgcttttattccgccagctagagcaccacctataaatgtttggtgtgctgatcgaaattttgcctataagttcaccgatgagatgtatgatccttgggccaagaaactgttcctgggatttgctcgtacttctgagttcaatggtcctagacaaccaattgctcctcatcctttgatacaagaacttaatactgatttgcccatcattgagccgatgctgcagctaccctataggatatttgggtcttctccaccgatgagtaattttgatccagctaaaatgctcactgattctgggaagctccacaccttggatatgctactacgacgccttcgagctgaaggtcatcgtgtgcttctttttgctcagatgactaaaatgttggacattcttgagaaaattcaagtatttcagacttgatgggtcttcagccatctcagaccgccgtgacatggtccgagattttcagaacaggaatgacatatttgttttcttgttan

SEQ ID NO: 83931 - DNA, 4032 bp, Zea Mays
  misc_feature (4032)..(4032): n is a, c, g, or t
ccggtttcgctttcctgctcccatcttctcctctccccccttcgcggccaagccaaagccatgcctccttcgacttctacttcccccaccacgtcacaacagggcctccacaccgcctccctccgcccccttccgcttgcgcccacgaaccctaaccctaaccccgtcgccgccgcgggacctacccggctagcactcgcaccgcgccttcggcgtcatattcggcgcctgcgctctccgtcctcgcgcggcgagccggggtgctagggttttctagatggatccacgccgcgcacccccgcggggcgggggcgccaacgggctctcttactccacgctgttcaatctcgagcctttgctgaacttcagggttcctgtaccggaagatcttgcccgctacgagaatagcagctcaaatgggagtccaagcagtgaagggatccttattggatcagtacaatggtgtaaatgatgcttcccatggcctgcaccggaagcggaaaaggcatcttgacggtgccagcgatgatgatgaggcagatgcctatagtaacaaaataactgaggagcaataccgtgctatgctcagtgaacatgtccagaagtaccggaggtcaaagttcaaggagggtgcttttagttctgatcctcctcgtgtggcaacccctcaattaaaacacaaaaatggtggtaaaaaaaatatgaagcgcataagtgatttcagcgatgatgtggcattagatgggatagaagcctcacatgaatataatgggatagagtgtattaaaactcatggcggttttaataagcttgttgcaactcttgattccacttatttagatatgggggatagtacacgttacttagttccagagggttatgataagttagcatcatccctcaatctccctgtttcttctgatatacgtgtcgaggaacacttcttgaagggcatgctagatttacgcaccctagcagcaatgcttggtactgaccaaaggtttgaggcttccaatcgtggtggaatatctgaacccctgccacaatttgaatctctcaaagaaagggtaaaggtgcaggaattttctcttcaagttaccaaggacccctttgcaattccggaaggatcagctgggaggatacgaaggtatattatatcagaagctggcgatttgcaggttcattatgttagagtcatggaaaaaggagatacatatgagattatcgagcgtagcttaccgaagaagcaaatagtaaagaaggaaccttcggtaattatgaaagaagagtctgaaaagacttacaaactatggcagtctcttgctacaaaaagcataccaaagcatcacaagaattttactgctttgataaagaaacgacaagtagatgcgaagcgcttctctgatagttgtcaacgagaggtaaagctcaaagtaagcaggtcactgaaactgatgaggtgtgctgcagtacgcacaagaaagtttgttaaggatatgcagatgttttggaaacgtgtagacaaagagcagtatgagttgaggaaaaaagaggaaaaagaagctgctgaagctttgaaacgggaagaggagctacgtgaagccaaaagacagcaacataggctaaattttctgctgtcccaaacagagctttatagtcatttcatgcagaacaagactggtggttcagcgccgcctgatgaggaagatgtccctgatgaagaagatcctgaggaagctcaattgaaaagagaggccttgagagcagctcagcatgccgtctctcaacaaaagatgaagacaaatgcatttgatagtgaaattgtgaggcttcgtcaaacttctgattctgctcttccaactgatgattcatctagcatggaccctagcaagattgatctattacacccctcaacaatgcctgagacgtcttctgtgcagaccccggagttgtttaagggtgtattaaaagaatatcagttaaaaggcttacagtggctggttaattgttatgagcagggcttgaatggcattcttgctgatgagatgggtcttggcaaaactgttcaggctatggcattcctgtctcatttggctgaggacaaaaacatatggggcccctttcttgtggtggctcctgcatctgttgtgaataattgggctgaggagttgattagattctgccctgacctaaagatacttccttactggggtccagagaggatgattcttcgaaagaatatcaaccccaagcgtctgtatcgcagagatgctagctttcatattcttattacaaactatcagatacttgtgaatgaagagaagcttttgagacgtgttaaatggcaatacatggtattggatgaggcccaggctatcaaaagttcaagcagccagcgatggaagacattactgagcttcaactgtagaaaccgtcttcttcttactgggacaccaatacagaacaatatggctgagttatgggcacttcttcatttcattatgcccactctatttgacagccatgaacagttcaacgagtggttctcaaagggtattgagggtcatgctgagcatggaggagctttgaatgaacatcaacttagtagattgcacgctattttgaagccctttatgctccgccgggttaagattgatgtcattgctgaaatgaccaaaaagaaagaagaaattgttccctgcaaattgagttctcgtcaacaagttttctatcaagccataaaaaataagatctcgcttaacgagttgcttgctggaagtcgtggcagtctaaatgacaagaagttacttagcctgatgaatattgtcatgcagttacggaaggtctgcaatcaccccgagctgtttgagcggaatgagggaagctcttacttcaactttgctgaaatcccaaactcacttctttctcccccatttggggaattgcaagatgtacactatgcaggcaagagaaatcccataatctttgagattccaaagttagtttatgagggaatcatctccaacatggaaaattctggaaacatctgtggatttcagaatggatatttgaacaggctgtttaatatatttttgcccagcaatatctatcgctcagccattccagaagttagttcatcaaaagagtctcttctatcatctggtgcatttggctttacacgtttgtcaaatctgtgcccagttgaagcttccttcctggctactgcttcattgtttgagagactagtcttttcagtaatgcaatggaatatgaactacactgctgaaattctggatgaattccttgattcagaagataccggcatccagtccagtcataatgattccacaaaagttcgtgcagttgcccgtttgttgctttcttctacaaaggtcaagcccagtttgcttaggacaaagattgggactgggccaattgatggcccatatgaagcactggtgctttctcatcgcgacaggctcgcttcaaacattaggcttcttcgttcagcatatgcttttattccgccagctagagcaccacctataaatgtttggtgtgctgatcgaaattttgcctataagttcaccgatgagatgtatgatccttgggccaagaaactgttcctgggatttgctcgtacttctgagttcaatggtcctagacaaccaattgctcctcatcctttgatacaagaacttaatactgatttgcccatcattgagccgatgctgcagctaccctataggatatttgggtcttctccaccgatgagtaattttgatccagctaaaatgctcactgattctgggaagctccacaccttggatatgctactacgacgccttcgagctgaaggtcatcgtgtgcttctttttgctcagatgactaaaatgttggacattcttgaggattacatgaatttcagaaaattcaagtatttcagacttgatgggtcttcagccatctcagaccgccgtgacatggtccgagattttcagaacaggaatgacatatttgttttcttgttan

SEQ ID NO: 83932 - DNA, 4260 bp, Zea Mays
  misc_feature (4260)..(4260): n is a, c, g, or t
cccattcggagttccggtttcgctttcctgctcccatcttctcctctccccccttcgcggccaagccaaagccatgcctccttcgacttctacttcccccaccacgtcacaacagggcctccacaccgcctccctccgcccccttccgcttgcgcccacgaaccctaaccctaaccccgtcgccgccgcgggacctacccggctagcactcgcaccgcgccttcggcgtcatattcggcgcctgcgctctccgtcctcgcgcggcgagccggggtgctagggttttctagatggatccacgccgcgcacccccgcggggcgggggcgccaacgggctctcttactccacgctgttcaatctcgagcctttgctgaacttcagggttcctgtaccggaagatcttgcccgctacgagaatagcagctcaaatgggagtccaagcagtgaaggtcagggatccttattggatcagtacaatggtgtaaatgatgcttcccatggcctgcaccggaagcggaaaaggcatcttgacggtgccagcgatgatgatgaggcagatgcctatagtaacaaaataactgaggagcaataccgtgctatgctcagtgaacatgtccagaagtaccggaggtcaaagttcaaggagggtgcttttagttctgatcctcctcgtgtggcaacccctcaattaaaacacaaaaatggtggtaaaaaaaatatgaagcgcataagtgatttcagcgatgatgtggcattagatgggatagaagcctcacatgaatataatgggatagagtgtattaaaactcatggcggttttaataagcttgttgcaactcttgattccacttatttagatatgggggatagtacacgttacttagttccagagggttatgataagttagcatcatccctcaatctccctgtttcttctgatatacgtgtcgaggaacacttcttgaagggcatgctagatttacgcaccctagcagcaatgcttggtactgaccaaaggtttgaggcttccaatcgtggtggaatatctgaacccctgccacaatttgaatctctcaaagaaagggtaaaggtgcaggaattttctcttcaagttaccaaggacccctttgcaattccggaaggatcagctgggaggatacgaaggtatattatatcagaagctggcgatttgcaggttcattatgttagagtcatggaaaaaggagatacatatgagattatcgagcgtagcttaccgaagaagcaaatagtaaagaaggaaccttcggtaattatgaaagaagagtctgaaaagacttacaaactatggcagtctcttgctacaaaaagcataccaaagcatcacaagaattttactgctttgataaagaaacgacaagtagatgcgaagcgcttctctgatagttgtcaacgagaggtaaagctcaaagtaagcaggtcactgaaactgatgaggtgtgctgcagtacgcacaagaaagtttgttaaggatatgcagatgttttggaaacgtgtagacaaagagcagtatgagttgaggaaaaaagaggaaaaagaagctgctgaagctttgaaacgggaagaggagctacgtgaagccaaaagacagcaacataggctaaattttctgctgtcccaaacagagctttatagtcatttcatgcagaacaagactggtggttcagcgccgcctgatgaggaagatgtccctgatgaagaagatcctgaggaagctcaattgaaaagagaggccttgagagcagctcagcatgccgtctctcaacaaaagatgaagacaaatgcatttgatagtgaaattgtgaggcttcgtcaaacttctgattctgctcttccaactgatgattcatctagcatggaccctagcaagattgatctattacacccctcaacaatgcctgagacgtcttctgtgcagaccccggagttgtttaagggtgtattaaaagaatatcagttaaaaggcttacagtggctggttaattgttatgagcagggcttgaatggcattcttgctgatgagatgggtcttggcaaaactgttcaggctatggcattcctgtctcatttggctgaggacaaaaacatatggggcccctttcttgtggtggctcctgcatctgttgtgaataattgggctgaggagttgattagattctgccctgacctaaagatacttccttactggggtccagagaggatgattcttcgaaagaatatcaaccccaagcgtctgtatcgcagagatgctagctttcatattcttattacaaactatcagatacttgtgaatgaagagaagcttttgagacgtgttaaatggcaatacatggtattggatgaggcccaggctatcaaaagttcaagcagccagcgatggaagacattactgagcttcaactgtagaaaccgtcttcttcttactgggacaccaatacagaacaatatggctgagttatgggcacttcttcatttcattatgcccactctatttgacagccatgaacagttcaacgagtggttctcaaagggtattgagggtcatgctgagcatggaggagctttgaatgaacatcaacttagtagattgcacgctattttgaagccctttatgctccgccgggttaagattgatgtcattgctgaaatgaccaaaaagaaagaagaaattgttccctgcaaattgagttctcgtcaacaagttttctatcaagccataaaaaataagatctcgcttaacgagttgcttgctggaagtcgtggcagtctaaatgacaagaagttacttagcctgatgaatattgtcatgcagttacggaaggtctgcaatcaccccgagctgtttgagcggaatgagggaagctcttacttcaactttgctgaaatcccaaactcacttctttctcccccatttggggaattgcaagatgtacactatgcaggcaagagaaatcccataatctttgagattccaaagttagtttatgagggaatcatctccaacatggaaaattctggaaacatctgtggatttcagaatggatatttgaacaggctgtttaatatatttttgcccagcaatatctatcgctcagccattccagaagttagttcatcaaaagagtctcttctatcatctggtgcatttggctttacacgtttgtcaaatctgtgcccagttgaagcttccttcctggctactgcttcattgtttgagagactagtcttttcagtaatgcaatggaatatgaactacactgctgaaattctggatgaattccttgattcagaagataccggcatccagtccagtcataatgattccacaaaagttcgtgcagttgcccgtttgttgctttcttctacaaaggtcaagcccagtttgcttaggacaaagattgggactgggccaattgatggcccatatgaagcactggtgctttctcatcgcgacaggctcgcttcaaacattaggcttcttcgttcagcatatgcttttattccgccagctagagcaccacctgtgagtccatttgtcttgtccatgtgggtttcttttgtatattgcattgcatgaggccatcagtgtctatagtcatctgagtacattttttgctctaaatgttaaaagagtttggaacctccaagtattgtaagagttgttcttttacatctatctgtttttatcacatatattgtcagtgttcattaacagccctttccccttcaccagataaatgtttggtgtgctgatcgaaattttgcctataagttcaccgatgagatgtatgatccttgggccaagaaactgttcctgggatttgctcgtacttctgagttcaatggtcctagacaaccaattgctcctcatcctttgatacaagaacttaatactgatttgcccatcattgagccgatgctgcagctaccctataggatatttgggtcttctccaccgatgagtaattttgatccagctaaaatgctcactgattctgggaagctccacaccttggatatgctactacgacgccttcgagctgaaggtcatcgtgtgcttctttttgctcagatgactaaaatgttggacattcttgaggattacatgaatttcagaaaattcaagtatttcagacttgatgggtcttcagccatctcagaccgccgtgacatggtccgagattttcagaacaggaatgacatatttgttttcttgttan

SEQ ID NO: 83933 - DNA, 4048 bp, Zea Mays
  misc_feature (4048)..(4048): n is a, c, g, or t
gtcccattcggagttccggtttcgctttcctgctcccatcttctcctctccccccttcgcggccaagccaaagccatgcctccttcgacttctacttcccccaccacgtcacaacagggcctccacaccgcctccctccgcccccttccgcttgcgcccacgaaccctaaccctaaccccgtcgccgccgcgggacctacccggctagcactcgcaccgcgccttcggcgtcatattcggcgcctgcgctctccgtcctcgcgcggcgagccggggtgctagggttttctagatggatccacgccgcgcacccccgcggggcgggggcgccaacgggctctcttactccacgctgttcaatctcgagcctttgctgaacttcagggttcctgtaccggaagatcttgcccgctacgagaatagcagctcaaatgggagtccaagcagtgaaggtcagggatccttattggatcagtacaatggtgtaaatgatgcttcccatggcctgcaccggaagcggaaaaggcatcttgacggtgccagcgatgatgatgaggcagatgcctatagtaacaaaataactgaggagcaataccgtgctatgctcagtgaacatgtccagaagtaccggaggtcaaagttcaaggagggtgcttttagttctgatcctcctcgtgtggcaacccctcaattaaaacacaaaaatggtggtaaaaaaaatatgaagcgcataagtgatttcagcgatgatgtggcattagatgggatagaagcctcacatgaatataatgggatagagtgtattaaaactcatggcggttttaataagcttgttgcaactcttgattccacttatttagatatgggggatagtacacgttacttagttccagagggttatgataagttagcatcatccctcaatctccctgtttcttctgatatacgtgtcgaggaacacttcttgaagggcatgctagatttacgcaccctagcagcaatgcttggtactgaccaaaggtttgaggcttccaatcgtggtggaatatctgaacccctgccacaatttgaatctctcaaagaaagggtaaaggtgcaggaattttctcttcaagttaccaaggacccctttgcaattccggaaggatcagctgggaggatacgaaggtatattatatcagaagctggcgatttgcaggttcattatgttagagtcatggaaaaaggagatacatatgagattatcgagcgtagcttaccgaagaagcaaatagtaaagaaggaaccttcggtaattatgaaagaagagtctgaaaagacttacaaactatggcagtctcttgctacaaaaagcataccaaagcatcacaagaattttactgctttgataaagaaacgacaagtagatgcgaagcgcttctctgatagttgtcaacgagaggtaaagctcaaagtaagcaggtcactgaaactgatgaggtgtgctgcagtacgcacaagaaagtttgttaaggatatgcagatgttttggaaacgtgtagacaaagagcagtatgagttgaggaaaaaagaggaaaaagaagctgctgaagctttgaaacgggaagaggagctacgtgaagccaaaagacagcaacataggctaaattttctgctgtcccaaacagagctttatagtcatttcatgcagaacaagactggtggttcagcgccgcctgatgaggaagatgtccctgatgaagaagatcctgaggaagctcaattgaaaagagaggccttgagagcagctcagcatgccgtctctcaacaaaagatgaagacaaatgcatttgatagtgaaattgtgaggcttcgtcaaacttctgattctgctcttccaactgatgattcatctagcatggaccctagcaagattgatctattacacccctcaacaatgcctgagacgtcttctgtgcagaccccggagttgtttaagggtgtattaaaagaatatcagttaaaaggcttacagtggctggttaattgttatgagcagggcttgaatggcattcttgctgatgagatgggtcttggcaaaactgttcaggctatggcattcctgtctcatttggctgaggacaaaaacatatggggcccctttcttgtggtggctcctgcatctgttgtgaataattgggctgaggagttgattagattctgccctgacctaaagatacttccttactggggtccagagaggatgattcttcgaaagaatatcaaccccaagcgtctgtatcgcagagatgctagctttcatattcttattacaaactatcagatacttgtgaatgaagagaagcttttgagacgtgttaaatggcaatacatggtattggatgaggcccaggctatcaaaagttcaagcagcgatggaagacattactgagcttcaactgtagaaaccgtcttcttcttactgggacaccaatacagaacaatatggctgagttatgggcacttcttcatttcattatgcccactctatttgacagccatgaacagttcaacgagtggttctcaaagggtattgagggtcatgctgagcatggaggagctttgaatgaacatcaacttagtagattgcacgctattttgaagccctttatgctccgccgggttaagattgatgtcattgctgaaatgaccaaaaagaaagaagaaattgttccctgcaaattgagttctcgtcaacaagttttctatcaagccataaaaaataagatctcgcttaacgagttgcttgctggaagtcgtggcagtctaaatgacaagaagttacttagcctgatgaatattgtcatgcagttacggaaggtctgcaatcaccccgagctgtttgagcggaatgagggaagctcttacttcaactttgctgaaatcccaaactcacttctttctcccccatttggggaattgcaagatgtacactatgcaggcaagagaaatcccataatctttgagattccaaagttagtttatgagggaatcatctccaacatggaaaattctggaaacatctgtggatttcagaatggatatttgaacaggctgtttaatatatttttgcccagcaatatctatcgctcagccattccagaagttagttcatcaaaagagtctcttctatcatctggtgcatttggctttacacgtttgtcaaatctgtgcccagttgaagcttccttcctggctactgcttcattgtttgagagactagtcttttcagtaatgcaatggaatatgaactacactgctgaaattctggatgaattccttgattcagaagataccggcatccagtccagtcataatgattccacaaaagttcgtgcagttgcccgtttgttgctttcttctacaaaggtcaagcccagtttgcttaggacaaagattgggactgggccaattgatggcccatatgaagcactggtgctttctcatcgcgacaggctcgcttcaaacattaggcttcttcgttcagcatatgcttttattccgccagctagagcaccacctataaatgtttggtgtgctgatcgaaattttgcctataagttcaccgatgagatgtatgatccttgggccaagaaactgttcctgggatttgctcgtacttctgagttcaatggtcctagacaaccaattgctcctcatcctttgatacaagaacttaatactgatttgcccatcattgagccgatgctgcagctaccctataggatatttgggtcttctccaccgatgagtaattttgatccagctaaaatgctcactgattctgggaagctccacaccttggatatgctactacgacgccttcgagctgaaggtcatcgtgtgcttctttttgctcagatgactaaaatgttggacattcttgaggattacatgaatttcagaaaattcaagtatttcagacttgatgggtcttcagccatctcagaccgccgtgacatggtccgagattttcagaacaggaatgacatatttgttttcttgttan

SEQ ID NO: 83934 - DNA, 563 bp, Zea Mays
ataatgatagaaggtcgtagcacaaccttaaatgaggtgccgccgtcgccgccgatgatgctgaacggacgtgccgcgtccccatccagaaccatccctgctcaacaccttctccgttgctcaccatggcgtcgtagttgttgccggacccattgccaccagatagtcacggcctcttcgtaacttcactccgttcatgttcgtcgccgctcgtgccaccctcccgcggctccctcatcacccatcgttgctggttctgcccgctgttgctggagatcgtgaccatggaactcacgtcgtcgtcctagcgctcctcgcgatgttgctgctccagggcgtcatcctcatgtcaacggtggagggccttgtgtggatcatgcaagaagctccacaagttcctcatcaagaagatcaggcaaactggttggagggatcttatcagaaatgtagcggcggactactcatctctttggagagcggaaacagccttactttccaacttgataagcgaggttacaagtcacctgaagattatcctggtacctggaatctcatgtctcagg

SEQ ID NO: 83935 - DNA, 607 bp, Zea Mays
ataatgatagaaggtcgtagcacaaccttaaatgaggtgccgccgtcgccgccgatgatgctgaacggacgtgccgcgtccccatccagaaccatccctgctcaacaccttctccgttgctcaccatggcgtcgtagttgttgccggacccattgccaccagatagtcacggcctcttcgtaacttcactccgttcatgttcgtcgccgctcgtgccaccctcccgcggctgtaactccctctcccttcctcctctcaccgcaggcctcatcacgccctcatcacccatcgttgctggttctgcccgctgttgctggagatcgtgaccatggaactcacgtcgtcgtcctagcgctcctcgcgatgttgctgctccagggcgtcatcctcatgtcaacggtggagggccttgtgtggatcatgcaagaagctccacaagttcctcatcaagaagatcaggcaaactggttggagggatcttatcagaaatgtagcggcggactactcatctctttggagagcggaaacagccttactttccaacttgataagcgaggttacaagtcacctgaagattatcctggtacctggaatctcatgtctcagg

SEQ ID NO: 83936 - DNA, 1044 bp, Zea Mays
gttaggaaccgtggctgcaactgaactatatcttccactaatgtactggcatcagatatacgtcctttgccagttttacaagaaacaatggattatcttttgcatttactggattcttcagagcatccatttgagacaatacatgatttcatcttcgataggacgagatctataagacaagacttaagtatgcagaatatagtgaatgatcaagcagttcaaatatatgaggatgcggtaacatttcatatcaggtcccatcaaagactttccacgtcttgccaggattcagctgcatcttccctttgttacctaaacatggagcagctaacaaaatgcctgctttctctgtatgatatgtatcatgtacttcataagtgtgattcacacagcaaaaaggaggctgagtattattccttctatgtgcttctacatttgggatgcaagatacacaaaatgattcactctctttgtggtatggtcaattggctactccagtcagacggtcaaaggaaatgatatttgctagatctttattaagatgctatcgcctaggaaacttcaagcgtttcttttgcatggtagcagctgaagcaaccgatcttcagttgcgccttgtagaaccttttctcaacgaggtccgagctagagccttaatgtacttcaactatagtggctacaaactccaacatcaccctttggaacatctatcaggaatcctgatgatcgaggagtcggagctggaatctctgtgtggaatatgcggacttgaaatcaccaggagcgaaggtacgaaagcttttgtgcctaaacaaacaagcttcaacctaccgacatccatgccccaaagtaatggcatttatgtctcaagggagtttgaaagattaatatagcattgtagttcaggttttcaatggattgtataatgtgtcaggattcaggaaagagtttgtcacgcatgatatgtgtaatacttactgttacaagaaaaaggctgaatatctatctcgatgcgtttttacagactgcttagcattccggtgt

SEQ ID NO: 83937 - DNA, 1053 bp, Zea Mays
catgcgttaggaaccgtggctgcaactgaactatatcttccactaatgtactggcatcagatatacgtcctttgccagttttacaagaaacaatggattatcttttgcatttactggattcttcagagcatccatttgagacaatacatgatttcatcttcgataggacgagatctataagacaagacttaagtatgcagaatatagtgaatgatcaagcagttcaaatatatgaggatgcggtaacatttcatatcaggtcccatcaaagactttccacgtcttgccaggattcagctgcatcttccctttgttacctaaacatggagcagctaacaaaatgcctgctttctctgtatgatatgtatcatgtacttcataagtgtgattcacacagcaaaaaggaggctgagtattattccttctatgtgcttctacatttgggatgcaagatacacaaaatgatagattcactctctttgtggtatggtcaattggctactccagtcagacggtcaaaggaaatgatatttgctagatctttattaagatgctatcgcctaggaaacttcaagcgtttcttttgcatggtagcagctgaagcaaccgatcttcagttgcgccttgtagaaccttttctcaacgaggtccgagctagagccttaatgtacttcaactatagtggctacaaactccaacatcaccctttggaacatctatcaggaatcctgatgatcgaggagtcggagctggaatctctgtgtggaatatgcggacttgaaatcaccaggagcgaaggtacgaaagcttttgtgcctaaacaaacaagcttcaacctaccgacatccatgccccaaagtaatggcatttatgtctcaagggagtttgaaagattaatatagcattgtagttcaggttttcaatggattgtataatgtgtcaggattcaggaaagagtttgtcacgcatgatatgtgtaatacttactgttacaagaaaaaggctgaatatctatctcgatgcgtttttacagactgcttagcattccggtgt

SEQ ID NO: 83938 - DNA, 1316 bp, Zea Mays
gagagccagttagccatggatcgccgcggcgaggcgagccaccgtggccggagttcctaccgcggccgaggctggcgaggacgcggacgcggcggcggccgcccctccccatcaccaccttcctccaccgcctcccctgcggcgctcaaccccgtcccgtctctgaccccggccgttcctgtcgacgacgcagcgccgatcatgggcacctgccccgacatgtgtccagcgagggaacgagcgcagagagagcggctgagggacctggctgtgcttgagcgggtggacggcgaccccgcgcgcacgtctctctccctcgccgtcaagaaattttgcagaactatatcttccactaatgtactggcatcagatatacgtcctttgccagttttacaagaaacaatggattatcttttgcatttactggattcttcagagcatccatttgagacaatacatgatttcatcttcgataggacgagatctataagacaagacttaagtatgcagaatatagtgaatgatcaagcagttcaaatatatgaggatgcggtaacatttcatatcaggtcccatcaaagactttccacgtcttgccaggattcagctgcatcttccctttgttacctaaacatggagcagctaacaaaatgcctgctttctctgtatgatatgtatcatgtacttcataagtgtgattcacacagcaaaaaggaggctgagtattattccttctatgtgcttctacatttgggatgcaagatacacaaaatgatagattcactctctttgtggtatggtcaattggctactccagtcagacggtcaaaggaaatgatatttgctagatctttattaagctgaagcaaccgatcttcagttgcgccttgtagaaccttttctcaacgaggtccgagctagagccttaatgtacttcaactatagtggctacaaactccaacatcaccctttggaacatctatcaggaatcctgatgatcgaggagtcggagctggaatctctgtgtggaatatgcggacttgaaatcaccaggagcgaaggtacgaaagcttttgtgcctaaacaaacaagcttcaacctaccgacatccatgccccaaagtaatggcatttatgtctcaagggagtttgaaagattaatatagcattgtagttcaggttttcaatggattgtataatgtgtcaggattcaggaaagagtttgtcacgcatgatatgtgtaatacttactgttacaagaaaaaggctgaatatctatctcgatgcgtttttacagactgcttagcattccggtgt

SEQ ID NO: 83939 - DNA, 1798 bp, Zea Mays
gtacctccccagcaggccagggcctcgagagccagttagccatggatcgccgcggcgaggcgagccaccgtggccggagttcctaccgcggccgaggctggcgaggacgcggacgcggcggcggccgcccctccccatcaccaccttcctccaccgcctcccctgcggcgctcaaccccgtcccgtctctgaccccggccgttcctgtcgacgacgcagcgccgatcatgggcacctgccccgacatgtgtccagcgagggaacgagcgcagagagagcggctgagggacctggctgtgcttgagcgggtggacggcgaccccgcgcgcacgtctctctccctcgccgtcaagaaattttgcagaactatatcttccactaatgtactggcatcagatatacgtcctttgccagttttacaagaaacaatggattatcttttgcatttactggattcttcagagcatccatttgagacaatacatgatttcatcttcgataggacgagatctataagacaagacttaagtatgcagaatatagtgaatgatcaagcagttcaaatatatgaggatgcggtaacatttcatatcaggtcccatcaaagactttccacgtcttgccaggattcagctgcatcttccctttgttacctaaacatggagcagctaacaaaatgcctgctttctctgtatgatatgtatcatgtacttcataagtgtgattcacacagcaaaaaggaggctgagtattattccttctatgtgcttctacatttgggatgcaagatacacaaaatgatagattcactctctttgtggtatggtcaattggctactccagtcagacggtcaaaggaaatgatatttgctagatctttattaagatgctatcgcctaggaaacttcaagcgtttcttttgcatggtagcagctgaagcaaccgatcttcagttgcgccttgtagaaccttttctcaacgaggtgagtccatggtgaaattttcagttgaaggcataacattgtccttctatattgggtgtttagcctgttcttcttacaagcatgattgttatttgaaacaatctttgaaatgggattgaagcttaaatgatactgaatatatgtctcttctgcggcaaacggaataatagatttcaagttagtttgattgccagttatacctttagttgtgttttgatccttgcagatagaaaaactactacctgaagtttctggtgctagtgacacttgttcagttgttctatgtcgaagtctgtaccatttttttattgggggggggtaaacaaaatattattcttgccttgtgcacaagctgaactgtaacatatcatttgtattggtatcaactccttccatttgtctgctgaaggtccgagctagagccttaatgtacttcaactatagtggctacaaactccaacatcaccctttggaacatctatcaggaatcctgatgatcgaggagtcggagctggaatctctgtgtggaatatgcggacttgaaatcaccaggagcgaaggtacgaaagcttttgtgcctaaacaaacaagcttcaacctaccgacatccatgccccaaagtaatggcatttatgtctcaagggagtttgaaagattaatatagcattgtagttcaggttttcaatggattgtataatgtgtcaggattcaggaaagagtttgtcacgcatgatatgtgtaatacttactgttacaagaaaaaggctgaatatctatctcgatgcgtttttacagactgcttagcattccggtgt

SEQ ID NO: 83940 - DNA, 1384 bp, Zea Mays
gaagtacctccccagcaggccagggcctcgagagccagttagccatggatcgccgcggcgaggcgagccaccgtggccggagttcctaccgcggccgaggctggcgaggacgcggacgcggcggcggccgcccctccccatcaccaccttcctccaccgcctcccctgcggcgctcaaccccgtcccgtctctgaccccggccgttcctgtcgacgacgcagcgccgatcatgggcacctgccccgacatgtgtccagcgagggaacgagcgcagagagagcggctgagggacctggctgtgcttgagcgggtggacggcgaccccgcgcgcacgtctctctccctcgccgtcaagaaaaactatatcttccactaatgtactggcatcagatatacgtcctttgccagttttacaagaaacaatggattatcttttgcatttactggattcttcagagcatccatttgagacaatacatgatttcatcttcgataggacgagatctataagacaagacttaagtatgcagaatatagtgaatgatcaagcagttcaaatatatgaggatgcggtaacatttcatatcaggtcccatcaaagactttccacgtcttgccaggattcagctgcatcttccctttgttacctaaacatggagcagctaacaaaatgcctgctttctctgtatgatatgtatcatgtacttcataagtgtgattcacacagcaaaaaggaggctgagtattattccttctatgtgcttctacatttgggatgcaagatacacaaaatgatagattcactctctttgtggtatggtcaattggctactccagtcagacggtcaaaggaaatgatatttgctagatctttattaagatgctatcgcctaggaaacttcaagcgtttcttttgcatggtagcagctgaagcaaccgatcttcagttgcgccttgtagaaccttttctcaacgaggtccgagctagagccttaatgtacttcaactatagtggctacaaactccaacatcaccctttggaacatctatcaggaatcctgatgatcgaggagtcggagctggaatctctgtgtggaatatgcggacttgaaatcaccaggagcgaaggtacgaaagcttttgtgcctaaacaaacaagcttcaacctaccgacatccatgccccaaagtaatggcatttatgtctcaagggagtttgaaagattaatatagcattgtagttcaggttttcaatggattgtataatgtgtcaggattcaggaaagagtttgtcacgcatgatatgtgtaatacttactgttacaagaaaaaggctgaatatctatctcgatgcgtttttacagactgcttagcattccggtgt

SEQ ID NO: 83941 - DNA, 1411 bp, Zea Mays
agctggcttcttcggccatttgcgaagtacctccccagcaggccagggcctcgagagccagttagccatggatcgccgcggcgaggcgagccaccgtggccggagttcctaccgcggccgaggctggcgaggacgcggacgcggcggcggccgcccctccccatcaccaccttcctccaccgcctcccctgcggcgctcaaccccgtcccgtctctgaccccggccgttcctgtcgacgacgcagcgccgatcatgggcacctgccccgacatgtgtccagcgagggaacgagcgcagagagagcggctgagggacctggctgtgcttgagcgggtggacggcgaccccgcgcgcacgtctctctccctcgccgtcaagaaattttgcagaactatatcttccactaatgtactggcatcagatatacgtcctttgccagttttacaagaaacaatggattatcttttgcatttactggattcttcagagcatccatttgagacaatacatgatttcatcttcgataggacgagatctataagacaagacttaagtatgcagaatatagtgaatgatcaagcagttcaaatatatgaggatgcggtaacatttcatatcaggtcccatcaaagactttccacgtcttgccaggattcagctgcatcttccctttgttacctaaacatggagcagctaacaaaatgcctgctttctctgtatgatatgtatcatgtacttcataagtgtgattcacacagcaaaaaggaggctgagtattattccttctatgtgcttctacatttgggatgcaagatacacaaaatgattcactctctttgtggtatggtcaattggctactccagtcagacggtcaaaggaaatgatatttgctagatctttattaagatgctatcgcctaggaaacttcaagcgtttcttttgcatggtagcagctgaagcaaccgatcttcagttgcgccttgtagaaccttttctcaacgaggtccgagctagagccttaatgtacttcaactatagtggctacaaactccaacatcaccctttggaacatctatcaggaatcctgatgatcgaggagtcggagctggaatctctgtgtggaatatgcggacttgaaatcaccaggagcgaaggtacgaaagcttttgtgcctaaacaaacaagcttcaacctaccgacatccatgccccaaagtaatggcatttatgtctcaagggagtttgaaagattaatatagcattgtagttcaggttttcaatggattgtataatgtgtcaggattcaggaaagagtttgtcacgcatgatatgtgtaatacttactgttacaagaaaaaggctgaatatctatctcgatgcgtttttacagactgcttagcattccggtgt

SEQ ID NO: 83942 - DNA, 1412 bp, Zea Mays
tacaaacatctcccttcgtataattccttcagagagactgcattgcaaaaagtgaccacgaggcagtttaaacagttgactgagccgctactccagctggcttcttcggccatttgcgaagtacctccccagcaggccagggcctcgagagccagttagccatggatcgccgcggcgaggcgagccaccgtggccggagttcctaccgcggccgaggctggcgaggacgcggacgcggcggcggccgcccctccccatcaccaccttcctccaccgcctcccctgcggcgctcaaccccgtcccgtctctgaccccggccgttcctgtcgacgacgcagcgccgatcatgggcacctgccccgacatgtgtccagcgagggaacgagcgcagagagagcggctgagggacctggctgtgcttgagcgggtggacggcgaccccgcgcgcacgtctctctccctcgccgtcaagaaattttgcagaactatatcttccactaatgtactggcatcagatatacgtcctttgccagttttacaagaaacaatggattatcttttgcatttactggattcttcagagcatccatttgagacaatacatgatttcatcttcgataggacgagatctataagacaagacttaagtatgcagaatatagtgaatgatcaagcagttcaaatatatgaggatgcggtaacatttcatatcaggtcccatcaaagactttccacgtcttgccaggattcagctgcatcttccctttgttacctaaacatggagcagctaacaaaatgcctgctttctctgtatgatatgtatcatgtacttcataagtgtgattcacacagcaaaaaggaggctgagtattattccttctatgtgcttctacatttgggatgcaagatacacaaaatgatagattcactctctttgtggtatggtcaattggctactccagtcagacggtcaaaggaaatgatatttgctagatctttattaaggtccgagctagagccttaatgtacttcaactatagtggctacaaactccaacatcaccctttggaacatctatcaggaatcctgatgatcgaggagtcggagctggaatctctgtgtggaatatgcggacttgaaatcaccaggagcgaaggtacgaaagcttttgtgcctaaacaaacaagcttcaacctaccgacatccatgccccaaagtaatggcatttatgtctcaagggagtttgaaagattaatatagcattgtagttcaggttttcaatggattgtataatgtgtcaggattcaggaaagagtttgtcacgcatgatatgtgtaatacttactgttacaagaaaaaggctgaatatctatctcgatgcgtttttacagactgcttagcattccggtgt

SEQ ID NO: 83943 - DNA, 1455 bp, Zea Mays
aatgtaaatgaaactccgatccaacgggcggcagggcctgctggtcgttgcggaatagtaacgcaacttgactgcaatgtttggctgcgcctacaaatccaacgcaccaacacaccgcgcgcgtcctcatcctcacttcaggtctgcagcccccaactacccccagcctcggaaggaaccttccagaagcgcaagactctaaaggccgtcgccttcccattcttcctcgccgcgggggtcgcctgagatcacataaacaatggtgaaggctgttgctgtgcttggtagcagcgatggtgtcaagggcaccatctttttcacccaagagggagatggtaagccatttcatattctgtgatatggggtgtttggttccaccaaactaaagtttagtccttatcacatcgaatgtttgaatgataattatggatattaaatatagtttaattataagactaattgcatagatgaagactaaaagataagataaatttattaaacctaatcaagcatgtatttaatacttataattgatattcaaatatttgatgtgtcacgaactaaactttagtcagaaaaacttaacactcctatagtattctatattcaattgaatgttgtcttcaccttgttgactctagctgcttggatctattgttaggccctaccgctgtcaccggaagtgtctctggcctcaagcctggcctccatgggttccatgtacatgcacttggtgacaccaccaatggatgcatgtcaactggaccacactacaatcctgcgagcaaggagcatggggcaccagaagatgagaaccgccatgctggtgatcttggaaacgtgacagctggagcagatggtgttgctaatatcaatgtcaccgacagccagatcccactgactgggccaaactcaatcattggcagagctgttgttgttcacgctgatcctgatgatcttggaaagggtgggcacgagctcagcaagagcactggaaacgccggtggccgtgttgcttgtgggatcattggactccagggctgaaaacgatcgccggacttgggggtgcctgagaggtccgtctcctgccgtccccagcagacgagcctgaacattcggagacatcgtgaaataagagcgtcgctgatctgtgatcatcgtatttgtcattatgcacctgtagcaaccgatggactgaactgtgctggattatgctgttggatcacctgagtatgtgttacatgtcggttttgatgtgacatcctatcgtttcgatgtgttttgtggaagtgttgttgcaagatttcaacagtcacgacttggttttgatatgcagtcagcagcagctcctgagttgtgattgctcagctgcggtccttttctttttttgggataactgatttcttgttgaaatacgctcgctgcatcacctgtgtttagtgctgtcggctagat

SEQ ID NO: 83944 - DNA, 4802 bp, Zea Mays
ttagtccctaaaaaccaaacacccccttaagcttgtaagtgtatgcattattatgcctactgagcatctccaagagtttccaaaaactaatcctgatcttgagtttttttggtaagattgaaaataactgctctcaactcccaatcttgggaaaatggattcaattcaacgtgtaggtggatgtgggaagggaataagcaggacagggttcccaatgcaaatgtaaagagagaaaggaagtacaaaagcgtgatgatgtttaccttttccaattgcatgccattgagcaattaaagcagccgggggtatctaattagagctgaccctctccccacttgaagcacatttaatcatcccttttttgtgtggttctgcctaggaaggtcatttggatatgtgtgacaaccagcgcagtgccatttacattaggatggtaaattgtgcatcaagagaagatagggcttgatttctatgattgagcaaaggtgatgctgagcccttcttttttttctttctgtcttttcaactattcttcacttcaaagttttccaaccaagaaaaaattgcttaggtgctgatgtcagaacttggcattaggggcatgttgatgttgaaattgaagttatcttactatgtcacagcagccagcagcagcatcaaagaacaataatgattttcttgctctaagatttatttcggttgtaaacgaaattcaaatctttcttccacccattcagtccaaatactttgtttttcatgtgaatttgaactgatttatttataggaatttgttagtggaatacaggaatattgcagaaatcagcgttttttttcacaggagaaatgtgggtttcaggaaaaaagcactgcattccaaaggggacctgaaattcgtgctagattcatgtacaattcttacattccaaagaggcccaaatgccagcaagctaggatcactggtctctcttggacctgtgcttcctggtgccatccttcctgctccatcaaccatcatgttgactttatgaagctgatcagatggggatgcttgggaaccatggagtgggtttgctttggcttctggttcgggttttattaggtgatatgggatctagcctgtaatcgatgtttttttatttgtttcattgtaattttatatcctccattgccctcattcctccacctagccaacagccacctgggacctccacttctctagggcctccctttctgtgtcatgacacattggcatggaggctctatagcagctgccagtgggtccatggcagcagcaaggggtgggaattgagttggggttcatttaggctatggttggtggattgggctgccagcgtggtggtctggagaacatatggggaaatctgcgttccaaacaggcccgaaactacatcctcttatctcttcccccaccatgctttttgcaaacaagtgggacatgtttcacttttttctggtgtttacatatacaaaagatttttatggtttatatcatgatgccttatgagttatggcttccttttttgttttgtactattgagtcattgagtggtagtgatgattggacttttcatttgagaacttctgcattctagcatcttctgagctggttcctggaatcttctattctgtttgttctataggttgctcttcacttgccttcctgctgtatttgaatatgggtcattgttagtgggactaataatatgccaagttagttcacttccatctcataagttcctactgaagtgctcgtcaagaacgaagaagataaaatttattctcacctggggcaatgatcaacaaccatggctgacataagcgcctttgagcaatcaaggctgctatgggaaccaaactggaatcctcttatttttgaaacctttttaattatgttctaattgaggtggttttgtccgtggatggtcatgccattcttcatgggtgataaccagggcaggtccacttatcagaacaaattgaaccggtgatcagagttgatgaggatacagtcgaatgaatgagcaaaggcgaagctgagcccccccacaccccacccaaaaaaagatcatgaaagaaaaggaaaggaaaaatgaagtccgatatgttgtttcatgttttgttgtataacatgtattcaaaaagtttcccccttttgttgcgtttgtcttaacataatgtattcgcacttgaattttgttcatttttaggccgaaacgtttcctaatttccgccgttgattctgctgagtgtttgtgttggccttggtttgcatgatggatacttttggttattgttcgtcccagaatttatcgcagtaatttcatgagatgttagatcatgtactccagttggagcagggtgagtttgaacttaggagggcattgtgttttcacaattactacctttggggccatcgcagctataatcgccattcagggtgcagcactgatccattttggtagttcctatacaatttgtgttttctgatcttttgtttcttgtcttttaaccttcctttcttgtttgacactgttctttagtgtctgatgatcagactcaccaaccctatagagctatcacggtgcaacatcctgaattgttagctttgttattttgctcaaattgctggcaaactaggatgggtttgaccaacaagtaaccagtttgcaacgaattgttgccgttgctgctgctgtggtggtgtagtatgttatatatattcgaccgaatgttcccaagttcatttagaggggtgggagtacatggtgcttctacaaatattgtgtcgatactggggcagccagccttggcattaatggtcacaaatcctaattgtgtgccctgaccttgatgaatcttggttgattaaacaaatagagagacatacgaaattactatcatgagtgtggctgtacttttttggtcatttgtgtgaaaacctgtccatgtgtgcgcagttcacatgggaacgagctatttcttatcatgaggaacatagcctgcatgtttaggtcatggctcataagttactgcaaaggctaagattagttaggagtcaatactatactttattgggggatataatcattcaatcagtgaaacagcacaaggtcaacttattagaacttcgccctctgatctctgctgcatgttgctcctcccactgattgaaccacacgagctctcatgaagttgtcgccttgcatccttcttaggtaaccatcaccacccttctcaggtaaccatcccagatagtgttcctctcgtttgctaactgatctgtgctgctgagttttgcctccatgatatgtgctatctatctagctaagaagttctagaaggaacagcctagttcggcagtttacgagtttctgatgaatctggtggcctggacagtcgtttttatgaaataccttccataaatggtctgtacatcactgtcggtgtctttggggaactaaatcgtagctggattaaagattcattcacggcaatcatttgtactgctatagcgcattcttgtatgaaactaaaggcctgtagcagtaatagtgtttcctgttattggagttttttttcctgcgcatatcgatctgagccttacaaattgttaccagccaactatctaatcaatgcctcagccatgaaagagtaaatttacaagcttatttgtagatgatgcttttcattttgcagcagtgtgtagtccatggttattttggggaaagttctcacgatctaaatctctggcagctggtgatcgatctgtcagtttcggaattggagagctaatgcgtagacatccatgaggttacagtgtcttatcaatcagaggttggggccatcacctggtcatggacattcctctgagatttatggccctggagatggagtaggtggatgccatctatcttgctgttcttatggtggacaccgtggtaaatatcatgcttgccacaaccattcatcggaatgggccaggcacaacatttcacctgaacctggtcctatcagatcttactggataacgaaaaggacttcctccgatcatgtttctcattgtgcaaaaggatctgacagacagatacgcccagcaggaggttataggaagaattattctgctaaccaggggagtggcagtcagaacagaccgtatcatgatgatagctatctaccaactaaattcctggatgaccattttcctgagatagatgctgcaaaacatcagtcttacttatgcgattttcaatcttcaaattttcatgattgctttgatagcagtcagaaattcagaaatgcttataatgacaaggtagtaaaaaggaaatttataaaacaagatttccttggaaacacttacaatggtgcttgtgttggtaaatatgatagaaacagttgcaggaaaaggaatgcatatcattttggtggagagaaaaccaggaagaatgacacaaataaggacaggtctaaaaggcttcgctgcccccttgagcaggaccaacggcaacaggttgagtgcaacgagatgagaaatgatagtcgggagggaaatgttgaaatgaccaggttagtgtgtcaagatggagcaaaacggaacttcaaccaaaagaagaatgctacagctcctgcttctagtgactcaacaaagtgtgatgggaaaaatatattaagtcccaagtgcagcaaaactattgcttcatcacacacaccaaatttgagcgaaggaagtaatgacatggatccaaaatctgacaactacgttgatggttgcactgaaagag

SEQ ID NO: 83945 - DNA, 4791 bp, Zea Mays
atgagcgactaaagaactttgcacaccccctgaacccaaaccctagatcgaatcgagggtgtgcacggaccattcttcgtttcggccatcgtttcacaccgccgtcactacggtgccgcctcgccgccgttccattgcctggcattggtggcggtaagggatgggaaccgtgcggtggtgcctgacgcggcttacgagtcgggtttggtctgctagggctgccctcattcgtcactcctgatggatcgatggaccatgcaacgcaatggcggcggcgcagcagtggaaggtcatttggatatgtgtgacaaccagcgcagtgccatttacattaggatggtaaattgtgcatcaagagaagatagggcttgatttctatgattgagcaaaggtgatgctgagcccttcttttttttctttctgtcttttcaactattcttcacttcaaagttttccaaccaagaaaaaattgcttaggtgctgatgtcagaacttggcattaggggcatgttgatgttgaaattgaagttatcttactatgtcacagcagccagcagcagcatcaaagaacaataatgattttcttgctctaagatttatttcggttgtaaacgaaattcaaatctttcttccacccattcagtccaaatactttgtttttcatgtgaatttgaactgatttatttataggaatttgttagtggaatacaggaatattgcagaaatcagcgttttttttcacaggagaaatgtgggtttcaggaaaaaagcactgcattccaaaggggacctgaaattcgtgctagattcatgtacaattcttacattccaaagaggcccaaatgccagcaagctaggatcactggtctctcttggacctgtgcttcctggtgccatccttcctgctccatcaaccatcatgttgactttatgaagctgatcagatggggatgcttgggaaccatggagtgggtttgctttggcttctggttcgggttttattaggtgatatgggatctagcctgtaatcgatgtttttttatttgtttcattgtaattttatatcctccattgccctcattcctccacctagccaacagccacctgggacctccacttctctagggcctccctttctgtgtcatgacacattggcatggaggctctatagcagctgccagtgggtccatggcagcagcaaggggtgggaattgagttggggttcatttaggctatggttggtggattgggctgccagcgtggtggtctggagaacatatggggaaatctgcgttccaaacaggcccgaaactacatcctcttatctcttcccccaccatgctttttgcaaacaagtgggacatgtttcacttttttctggtgtttacatatacaaaagatttttatggtttatatcatgatgccttatgagttatggcttccttttttgttttgtactattgagtcattgagtggtagtgatgattggacttttcatttgagaacttctgcattctagcatcttctgagctggttcctggaatcttctattctgtttgttctataggttgctcttcacttgccttcctgctgtatttgaatatgggtcattgttagtgggactaataatatgccaagttagttcacttccatctcataagttcctactgaagtgctcgtcaagaacgaagaagataaaatttattctcacctggggcaatgatcaacaaccatggctgacataagcgcctttgagcaatcaaggctgctatgggaaccaaactggaatcctcttatttttgaaacctttttaattatgttctaattgaggtggttttgtccgtggatggtcatgccattcttcatgggtgataaccagggcaggtccacttatcagaacaaattgaaccggtgatcagagttgatgaggatacagtcgaatgaatgagcaaaggcgaagctgagcccccccacaccccacccaaaaaaagatcatgaaagaaaaggaaaggaaaaatgaagtccgatatgttgtttcatgttttgttgtataacatgtattcaaaaagtttcccccttttgttgcgtttgtcttaacataatgtattcgcacttgaattttgttcatttttaggccgaaacgtttcctaatttccgccgttgattctgctgagtgtttgtgttggccttggtttgcatgatggatacttttggttattgttcgtcccagaatttatcgcagtaatttcatgagatgttagatcatgtactccagttggagcagggtgagtttgaacttaggagggcattgtgttttcacaattactacctttggggccatcgcagctataatcgccattcagggtgcagcactgatccattttggtagttcctatacaatttgtgttttctgatcttttgtttcttgtcttttaaccttcctttcttgtttgacactgttctttagtgtctgatgatcagactcaccaaccctatagagctatcacggtgcaacatcctgaattgttagctttgttattttgctcaaattgctggcaaactaggatgggtttgaccaacaagtaaccagtttgcaacgaattgttgccgttgctgctgctgtggtggtgtagtatgttatatatattcgaccgaatgttcccaagttcatttagaggggtgggagtacatggtgcttctacaaatattgtgtcgatactggggcagccagccttggcattaatggtcacaaatcctaattgtgtgccctgaccttgatgaatcttggttgattaaacaaatagagagacatacgaaattactatcatgagtgtggctgtacttttttggtcatttgtgtgaaaacctgtccatgtgtgcgcagttcacatgggaacgagctatttcttatcatgaggaacatagcctgcatgtttaggtcatggctcataagttactgcaaaggctaagattagttaggagtcaatactatactttattgggggatataatcattcaatcagtgaaacagcacaaggtcaacttattagaacttcgccctctgatctctgctgcatgttgctcctcccactgattgaaccacacgagctctcatgaagttgtcgccttgcatccttcttaggtaaccatcaccacccttctcaggtaaccatcccagatagtgttcctctcgtttgctaactgatctgtgctgctgagttttgcctccatgatatgtgctatctatctagctaagaagttctagaaggtatatttctgaaacaatccagaaccatatctatcatctaatatgtggttctaatatgtgttcactgtgaacgttaggagcaggaacagcctagttcggcagtttacgagtttctgatgaatctggtggcctggacagtcgtttttatgaaataccttccataaatggtctgtacatcactgtcggtgtctttggggaactaaatcgtagctggattaaagattcattcacggcaatcatttgtactgctatagcgcattcttgtatgaaactaaaggcctgtagcagtaatagtgtttcctgttattggagttttttttcctgcgcatatcgatctgagccttacaaattgttaccagccaactatctaatcaatgcctcagccatgaaagagtaaatttacaagcttatttgtagatgatgcttttcattttgcagcagtgtgtagtccatggttattttggggaaagttctcacgatctaaatctctggcagctggtgatcgatctgtcagtttcggaattggagagctaatgcgtagacatccatgaggttacagtgtcttatcaatcagaggttggggccatcacctggtcatggacattcctctgagatttatggccctggagatggagtaggtggatgccatctatcttgctgttcttatggtggacaccgtggtaaatatcatgcttgccacaaccattcatcggaatgggccaggcacaacatttcacctgaacctggtcctatcagatcttactggataacgaaaaggacttcctccgatcatgtttctcattgtgcaaaaggatctgacagacagatacgcccagcaggaggttataggaagaattattctgctaaccaggggagtggcagtcagaacagaccgtatcatgatgatagctatctaccaactaaattcctggatgaccattttcctgagatagatgctgcaaaacatcagtcttacttatgcgattttcaatcttcaaattttcatgattgctttgatagcagtcagaaattcagaaatgcttataatgacaaggtagtaaaaaggaaatttataaaacaagatttccttggaaacacttacaatggtgcttgtgttggtaaatatgatagaaacagttgcaggaaaaggaatgcatatcattttggtggagagaaaaccaggaagaatgacacaaataaggacaggtctaaaaggcttcgctgcccccttgagcaggaccaacggcaacaggttgagtgcaacgagatgagaaatgatagtcgggagggaaatgttgaaatgaccaggttagtgtgtcaagatggagcaaaacggaacttcaaccaaaagaagaatgctacagctcctgcttctagtgactcaacaaagtgtgatgggaaaaatatattaagtcccaagtgcagcaaaactattgcttcatcacacacaccaaatttgagcgaaggaagtaatgacatggatccaaaatctgacaactacgttgatggttgcactgaaagag

SEQ ID NO: 83946 - DNA, 4420 bp, Zea Mays
atgagcgactaaagaactttgcacaccccctgaacccaaaccctagatcgaatcgagggtgtgcacggaccattcttcgtttcggccatcgtttcacaccgccgtcactacggtgccgcctcgccgccgttccattgcctggcattggtggcggtaagggatgggaaccgtgcggtggtgcctgacgcggcttacgagtcgggtttggtctgctagggctgccctcattcgtcactcctgatggatcgatggaccatgcaacgcaatggcggcggcgcagcagtggaaggtcatttggatatgtgtgacaaccagcgcagtgccatttacattaggatggtaaattgtgcatcaagagaagatagggcttgatttctatgattgagcaaaggaaaaaagcactgcattccaaaggggacctgaaattcgtgctagattcatgtacaattcttacattccaaagaggcccaaatgccagcaagctaggatcactggtctctcttggacctgtgcttcctggtgccatccttcctgctccatcaaccatcatgttgactttatgaagctgatcagatggggatgcttgggaaccatggagtgggtttgctttggcttctggttcgggttttattaggtgatatgggatctagcctgtaatcgatgtttttttatttgtttcattgtaattttatatcctccattgccctcattcctccacctagccaacagccacctgggacctccacttctctagggcctccctttctgtgtcatgacacattggcatggaggctctatagcagctgccagtgggtccatggcagcagcaaggggtgggaattgagttggggttcatttaggctatggttggtggattgggctgccagcgtggtggtctggagaacatatggggaaatctgcgttccaaacaggcccgaaactacatcctcttatctcttcccccaccatgctttttgcaaacaagtgggacatgtttcacttttttctggtgtttacatatacaaaagatttttatggtttatatcatgatgccttatgagttatggcttccttttttgttttgtactattgagtcattgagtggtagtgatgattggacttttcatttgagaacttctgcattctagcatcttctgagctggttcctggaatcttctattctgtttgttctataggttgctcttcacttgccttcctgctgtatttgaatatgggtcattgttagtgggactaataatatgccaagttagttcacttccatctcataagttcctactgaagtgctcgtcaagaacgaagaagataaaatttattctcacctggggcaatgatcaacaaccatggctgacataagcgcctttgagcaatcaaggctgctatgggaaccaaactggaatcctcttatttttgaaacctttttaattatgttctaattgaggtggttttgtccgtggatggtcatgccattcttcatgggtgataaccagggcaggtccacttatcagaacaaattgaaccggtgatcagagttgatgaggatacagtcgaatgaatgagcaaaggcgaagctgagcccccccacaccccacccaaaaaaagatcatgaaagaaaaggaaaggaaaaatgaagtccgatatgttgtttcatgttttgttgtataacatgtattcaaaaagtttcccccttttgttgcgtttgtcttaacataatgtattcgcacttgaattttgttcatttttaggccgaaacgtttcctaatttccgccgttgattctgctgagtgtttgtgttggccttggtttgcatgatggatacttttggttattgttcgtcccagaatttatcgcagtaatttcatgagatgttagatcatgtactccagttggagcagggtgagtttgaacttaggagggcattgtgttttcacaattactacctttggggccatcgcagctataatcgccattcagggtgcagcactgatccattttggtagttcctatacaatttgtgttttctgatcttttgtttcttgtcttttaaccttcctttcttgtttgacactgttctttagtgtctgatgatcagactcaccaaccctatagagctatcacggtgcaacatcctgaattgttagctttgttattttgctcaaattgctggcaaactaggatgggtttgaccaacaagtaaccagtttgcaacgaattgttgccgttgctgctgctgtggtggtgtagtatgttatatatattcgaccgaatgttcccaagttcatttagaggggtgggagtacatggtgcttctacaaatattgtgtcgatactggggcagccagccttggcattaatggtcacaaatcctaattgtgtgccctgaccttgatgaatcttggttgattaaacaaatagagagacatacgaaattactatcatgagtgtggctgtacttttttggtcatttgtgtgaaaacctgtccatgtgtgcgcagttcacatgggaacgagctatttcttatcatgaggaacatagcctgcatgtttaggtcatggctcataagttactgcaaaggctaagattagttaggagtcaatactatactttattgggggatataatcattcaatcagtgaaacagcacaaggtcaacttattagaacttcgccctctgatctctgctgcatgttgctcctcccactgattgaaccacacgagctctcatgaagttgtcgccttgcatccttcttaggtaaccatcaccacccttctcaggtaaccatcccagatagtgttcctctcgtttgctaactgatctgtgctgctgagttttgcctccatgatatgtgctatctatctagctaagaagttctagaaggtatatttctgaaacaatccagaaccatatctatcatctaatatgtggttctaatatgtgttcactgtgaacgttaggagcaggaacagcctagttcggcagtttacgagtttctgatgaatctggtggcctggacagtcgtttttatgaaataccttccataaatggtctgtacatcactgtcggtgtctttggggaactaaatcgtagctggattaaagattcattcacggcaatcatttgtactgctatagcgcattcttgtatgaaactaaaggcctgtagcagtaatagtgtttcctgttattggagttttttttcctgcgcatatcgatctgagccttacaaattgttaccagccaactatctaatcaatgcctcagccatgaaagagtaaatttacaagcttatttgtagatgatgcttttcattttgcagcagtgtgtagtccatggttattttggggaaagttctcacgatctaaatctctggcagctggtgatcgatctgtcagtttcggaattggagagctaatgcgtagacatccatgaggttacagtgtcttatcaatcagaggttggggccatcacctggtcatggacattcctctgagatttatggccctggagatggagtaggtggatgccatctatcttgctgttcttatggtggacaccgtggtaaatatcatgcttgccacaaccattcatcggaatgggccaggcacaacatttcacctgaacctggtcctatcagatcttactggataacgaaaaggacttcctccgatcatgtttctcattgtgcaaaaggatctgacagacagatacgcccagcaggaggttataggaagaattattctgctaaccaggggagtggcagtcagaacagaccgtatcatgatgatagctatctaccaactaaattcctggatgaccattttcctgagatagatgctgcaaaacatcagtcttacttatgcgattttcaatcttcaaattttcatgattgctttgatagcagtcagaaattcagaaatgcttataatgacaaggtagtaaaaaggaaatttataaaacaagatttccttggaaacacttacaatggtgcttgtgttggtaaatatgatagaaacagttgcaggaaaaggaatgcatatcattttggtggagagaaaaccaggaagaatgacacaaataaggacaggtctaaaaggcttcgctgcccccttgagcaggaccaacggcaacaggttgagtgcaacgagatgagaaatgatagtcgggagggaaatgttgaaatgaccaggttagtgtgtcaagatggagcaaaacggaacttcaaccaaaagaagaatgctacagctcctgcttctagtgactcaacaaagtgtgatgggaaaaatatattaagtcccaagtgcagcaaaactattgcttcatcacacacaccaaatttgagcgaaggaagtaatgacatggatccaaaatctgacaactacgttgatggttgcactgaaagag

SEQ ID NO: 83947 - DNA, 722 bp, Zea Mays
ttagtccctaaaaaccaaacacccccttaagcttgtaagtgtatgcattattatgcctactgagcatctccaagagtttccaaaaactaatcctgatcttgagtttttttggtaagattgaaaataactgctctcaactcccaatcttgggaaaatggattcaattcaacgtgtaggtggatgtgggaagggaataagcaggacagggttcccaatgcaaatgtaaagagagaaaggaagtacaaaagcgtgatgatgtttaccttttccaattgcatgccattgagcaattaaagcagccgggggtatctaattagagctgaccctctccccacttgaagcacatttaatcatcccttttttgtgtggttctgcctaggaaggtcatttggatatgtgtgacaaccagcgcagtgccatttacattaggatggtaaattgtgcatcaagagaagatagggcttgatttctatgattgagcaaagctggtgatcgatctgtcagtttcggaattggagagctaatgcgtagacatccatgaggttacagtgtcttatcaatcagagggcaaatctgaaccaattctgtaattcatagttcgagaaggcattttccacaattgtgcgcattatggttcacttcgtcttgtgctaaatcaaacttctaacttcggtcaagtttgtggaaaaaagtactgctacttgatattgtagtattaaaat

SEQ ID NO: 83948 - DNA, 2718 bp, Zea Mays
atgagcgactaaagaactttgcacaccccctgaacccaaaccctagatcgaatcgagggtgtgcacggaccattcttcgtttcggccatcgtttcacaccgccgtcactacggtgccgcctcgccgccgttccattgcctggcattggtggcggtaagggatgggaaccgtgcggtggtgcctgacgcggcttacgagtcgggtttggtctgctagggctgccctcattcgtcactcctgatggatcgatggaccatgcaacgcaatggcggcggcgcagcagtggttgctcttcacttgccttcctgctgtatttgaatatgggtcattgttagtgggactaataatatgccaagttagttcacttccatctcataagttcctactgaagtgctcgtcaagaacgaagaagataaaatttattctcacctggggcaatgatcaacaaccatggctgacataagcgcctttgagcaatcaaggctgctatgggaaccaaactggaatcctcttatttttgaaacctttttaattatgttctaattgaggtggttttgtccgtggatggtcatgccattcttcatgggtgataaccagggcaggtccacttatcagaacaaattgaaccggtgatcagagttgatgaggatacagtcgaatgaatgagcaaaggcgaagctgagcccccccacaccccacccaaaaaaagatcatgaaagaaaaggaaaggaaaaatgaagtccgatatgttgtttcatgttttgttgtataacatgtattcaaaaagtttcccccttttgttgcgtttgtcttaacataatgtattcgcacttgaattttgttcatttttaggccgaaacgtttcctaatttccgccgttgattctgctgagtgtttgtgttggccttggtttgcatgatggatacttttggttattgttcgtcccagaatttatcgcagtaatttcatgagatgttagatcatgtactccagttggagcagggtgagtttgaacttaggagggcattgtgttttcacaattactacctttggggccatcgcagctataatcgccattcagggtgcagcactgatccattttggtagttcctatacaatttgtgttttctgatcttttgtttcttgtcttttaaccttcctttcttgtttgacactgttctttagtgtctgatgatcagactcaccaaccctatagagctatcacggtgcaacatcctgaattgttagctttgttattttgctcaaattgctggcaaactaggatgggtttgaccaacaagtaaccagtttgcaacgaattgttgccgttgctgctgctgtggtggtgtagtatgttatatatattcgaccgaatgttcccaagttcatttagaggggtgggagtacatggtgcttctacaaatattgtgtcgatactggggcagccagccttggcattaatggtcacaaatcctaattgtgtgccctgaccttgatgaatcttggttgattaaacaaatagagagacatacgaaattactatcatgagtgtggctgtacttttttggtcatttgtgtgaaaacctgtccatgtgtgcgcagttcacatgggaacgagctatttcttatcatgaggaacatagcctgcatgtttaggtcatggctcataagttactgcaaaggctaagattagttaggagtcaatactatactttattgggggatataatcattcaatcagtgaaacagcacaaggtcaacttattagaacttcgccctctgatctctgctgcatgttgctcctcccactgattgaaccacacgagctctcatgaagttgtcgccttgcatccttcttaggtaaccatcaccacccttctcaggtaaccatcccagatagtgttcctctcgtttgctaactgatctgtgctgctgagttttgcctccatgatatgtgctatctatctagctaagaagttctagaaggtatatttctgaaacaatccagaaccatatctatcatctaatatgtggttctaatatgtgttcactgtgaacgttaggagcaggaacagcctagttcggcagtttacgagtttctgatgaatctggtggcctggacagtcgtttttatgaaataccttccataaatggtctgtacatcactgtcggtgtctttggggaactaaatcgtagctggattaaagattcattcacggcaatcatttgtactgctatagcgcattcttgtatgaaactaaaggcctgtagcagtaatagtgtttcctgttattggagttttttttcctgcgcatatcgatctgagccttacaaattgttaccagccaactatctaatcaatgcctcagccatgaaagagtaaatttacaagcttatttgtagatgatgcttttcattttgcagcagtgtgtagtccatggttattttggggaaagttctcacgatctaaatctctggcagctggtgatcgatctgtcagtttcggaattggagagctaatgcgtagacatccatgaggttacagtgtcttatcaatcagagggcaaatctgaaccaattctgtaattcatagttcgagaaggcattttccacaattgtgcgcattatggttcacttcgtcttgtgctaaatcaaacttctaacttcggtcaagtttgtggaaaaaagtactgctacttgatattgtagtattaaaat

SEQ ID NO: 83949 - DNA, 2406 bp, Zea Mays
atgagcgactaaagaactttgcacaccccctgaacccaaaccctagatcgaatcgagggtgtgcacggaccattcttcgtttcggccatcgtttcacaccgccgtcactacggtgccgcctcgccgccgttccattgcctggcattggtggcggtaagggatgggaaccgtgcggtggtgcctgacgcggcttacgagtcgggtttggtctgctagggctgccctcattcgtcactcctgatggatcgatggaccatgcaacgcaatggcggcggcgcagcagtgggcaggtccacttatcagaacaaattgaaccggtgatcagagttgatgaggatacagtcgaatgaatgagcaaaggcgaagctgagcccccccacaccccacccaaaaaaagatcatgaaagaaaaggaaaggaaaaatgaagtccgatatgttgtttcatgttttgttgtataacatgtattcaaaaagtttcccccttttgttgcgtttgtcttaacataatgtattcgcacttgaattttgttcatttttaggccgaaacgtttcctaatttccgccgttgattctgctgagtgtttgtgttggccttggtttgcatgatggatacttttggttattgttcgtcccagaatttatcgcagtaatttcatgagatgttagatcatgtactccagttggagcagggtgagtttgaacttaggagggcattgtgttttcacaattactacctttggggccatcgcagctataatcgccattcagggtgcagcactgatccattttggtagttcctatacaatttgtgttttctgatcttttgtttcttgtcttttaaccttcctttcttgtttgacactgttctttagtgtctgatgatcagactcaccaaccctatagagctatcacggtgcaacatcctgaattgttagctttgttattttgctcaaattgctggcaaactaggatgggtttgaccaacaagtaaccagtttgcaacgaattgttgccgttgctgctgctgtggtggtgtagtatgttatatatattcgaccgaatgttcccaagttcatttagaggggtgggagtacatggtgcttctacaaatattgtgtcgatactggggcagccagccttggcattaatggtcacaaatcctaattgtgtgccctgaccttgatgaatcttggttgattaaacaaatagagagacatacgaaattactatcatgagtgtggctgtacttttttggtcatttgtgtgaaaacctgtccatgtgtgcgcagttcacatgggaacgagctatttcttatcatgaggaacatagcctgcatgtttaggtcatggctcataagttactgcaaaggctaagattagttaggagtcaatactatactttattgggggatataatcattcaatcagtgaaacagcacaaggtcaacttattagaacttcgccctctgatctctgctgcatgttgctcctcccactgattgaaccacacgagctctcatgaagttgtcgccttgcatccttcttaggtaaccatcaccacccttctcaggtaaccatcccagatagtgttcctctcgtttgctaactgatctgtgctgctgagttttgcctccatgatatgtgctatctatctagctaagaagttctagaaggtatatttctgaaacaatccagaaccatatctatcatctaatatgtggttctaatatgtgttcactgtgaacgttaggagcaggaacagcctagttcggcagtttacgagtttctgatgaatctggtggcctggacagtcgtttttatgaaataccttccataaatggtctgtacatcactgtcggtgtctttggggaactaaatcgtagctggattaaagattcattcacggcaatcatttgtactgctatagcgcattcttgtatgaaactaaaggcctgtagcagtaatagtgtttcctgttattggagttttttttcctgcgcatatcgatctgagccttacaaattgttaccagccaactatctaatcaatgcctcagccatgaaagagtaaatttacaagcttatttgtagatgatgcttttcattttgcagcagtgtgtagtccatggttattttggggaaagttctcacgatctaaatctctggcagctggtgatcgatctgtcagtttcggaattggagagctaatgcgtagacatccatgaggttacagtgtcttatcaatcagagggcaaatctgaaccaattctgtaattcatagttcgagaaggcattttccacaattgtgcgcattatggttcacttcgtcttgtgctaaatcaaacttctaacttcggtcaagtttgtggaaaaaagtactgctacttgatattgtagtattaaaat

SEQ ID NO: 83950 - DNA, 2002 bp, Zea Mays
attttcaacttgcttctcaagtttgctcggtgtcgctcgcgactggctctagttgtactcagccagctatccttggtgtgggggtttgatcgacggagccgtcacaacggcgcctatggcgaagccttccgtacagactcatttcgtcttggacgcgatggccgcggagagggtgaaagtcgcggagaactgggagcgggcgttggattcgttggagaacatgaatcagcgcctgggaaagttcgccaaggtccagcgccagttggtggagcagtcggaggtcgcggcgcaggcggccaagcaggcggcgaaggagcgttctgttctgtcgcgtcaagtggaggaatctgggcagctgctggcgcgggtacagctggaatccatggcggcggagacggagaagtccaggaggagcggatccaccagcccgtcatctaggtcttcaccccctgttcagtgtttggattacttccatattttcaaggtttctgaagctatgtgggtacaagtggcgtctctgcacttggaagggattgctgctcgctggtttcacgtgcatagactgaaacagaggacggggtggaatcattttactcgggatgtgttgaacaagtttggcgcagacgagtatccaaaggcgatgaggagattgatgggtctcaggcagacggggtcactggacgagtttgtgcgggcgttcgaggaagcacggtacatggtatcgctgcataacccaaagttgggatgaactgaatgatcaatacaaaggaaggtcgacaaggtcagtgttccagtcgaggtcctcgtccacagcagtcaaggccaaggcgatcagtggtactactggtaaagggtgcatgaaggtgcggggtcttttgaagaacaaagttacgttgctgttgtcaattcattccgggagtcctacttgctttatcaacaagaatctggtggctcgggctcgtttgtctgctgtttcttgtcctccagccaggttcacattggcaaatggcgagtccctaacgtcggatttgttggttcctcagcttgcctggtgcgcaaatggccacacgttccacactgatatgagagtgttggatctgggaccgtatgacgccatcttgggttatgactggctgaaatcacatagccctatggaatgtgattgggcaaacaaggtcttggtctttcatgatgcaggggtggaggttactttgaaaggggatgatgataatatcaagaaggaggtgcaggaggtttcagccatttgccacaagtgttgatcagatggtccaatctatcggtggactcgtcgactcgggaagattactatatggttaagcggtatcctaatgccgctgtttcggtacaaacagtatctgaaggtctgtgtgtgtctgggtggggggcatgttcagagctgagcgctggacaagtgaagctgatgaggagtgatggcgtagtgtcatagggcgttttctattttacgttttccagttgggttggcgtctttaggcgcatactgtcccgaacaacccgtgcgtgcagcaagtcgctgatgggaggttacctcagctcatagtttatggaacagactacaacacgaagaatggaactagggtgcgtgattacatgtagtcagtcgaccatctaatcaggggatgctgcgatgggcctcgtttcttcgacgttatgaggagggagtaggggtcccatctcatccatccatcttgttgttctttttcttcaaatcattccgatcggctgatccgaagactactcgtgctgccatgcgctctgaatctgcatgatcgttccactcagagctgctactctaagacaagacgcgtaaaatccacgcgctttaatttgagcttaacgaaaatctttggatctgagagactgagacgagcatctaaaattatatgaaattgctctgctgtgcgctctatttcagacctaaaacagtacctccctcccaaaataatattcgttgattttattt

SEQ ID NO: 83951 - DNA, 2096 bp, Zea Mays
attttcaacttgcttctcaagtttgctcggtgtcgctcgcgactggctctagttgtactcagccagctatccttggtgtgggggtttgatcgacggagccgtcacaacggcgcctatggcgaagccttccgtacagactcatttcgtcttggacgcgatggccgcggagagggtgaaagtcgcggagaactgggagcgggcgttggattcgttggagaacatgaatcagcgcctgggaaagttcgccaaggtccagcgccagttggtggagcagtcggaggtcgcggcgcaggcggccaagcaggcggcgaaggagcgttctgttctgtcgcgtcaagtggaggaatctgggcagctgctggcgcgggtacagctggaatccatggcggcggagacggagaagtccaggaggagcggatccaccagcccgtcatctaggtcttcaccccctgttcaggtacggaagggtcctcagaagggtgttcagatcaatccactgcctgagatgtcattcccaaagtttgatggtgctaatccgagagtttggttggacaagtgtttggattacttccatattttcaaggtttctgaagctatgtgggtacaagtggcgtctctgcacttggaagggattgctgctcgctggtttcacgtgcatagactgaaacagaggacggggtggaatcattttactcgggatgtgttgaacaagtttggcgcagacgagtatccaaaggcgatgaggagattgatgggtctcaggcagacggggtcactggacgagtttgtgcgggcgttcgaggaagcacggtacatggtatcgctgcataacccaaagatgaactgaatgatcaatacaaaggaaggtcgacaaggtcagtgttccagtcgaggtcctcgtccacagcagtcaaggccaaggcgatcagtggtactactggtaaagggtgcatgaaggtgcggggtcttttgaagaacaaagttacgttgctgttgtcaattcattccgggagtcctacttgctttatcaacaagaatctggtggctcgggctcgtttgtctgctgtttcttgtcctccagccaggttcacattggcaaatggcgagtccctaacgtcggatttgttggttcctcagcttgcctggtgcgcaaatggccacacgttccacactgatatgagagtgttggatctgggaccgtatgacgccatcttgggttatgactggctgaaatcacatagccctatggaatgtgattgggcaaacaaggtcttggtctttcatgatgcaggggtggaggttactttgaaaggggatgatgataatatcaagaaggaggtgcaggaggtttcagccatttgccacaagtgttgatcagatggtccaatctatcggtggactcgtcgactcgggaagattactatatggttaagcggtatcctaatgccgctgtttcggtacaaacagtatctgaaggtctgtgtgtgtctgggtggggggcatgttcagagctgagcgctggacaagtgaagctgatgaggagtgatggcgtagtgtcatagggcgttttctattttacgttttccagttgggttggcgtctttaggcgcatactgtcccgaacaacccgtgcgtgcagcaagtcgctgatgggaggttacctcagctcatagtttatggaacagactacaacacgaagaatggaactagggtgcgtgattacatgtagtcagtcgaccatctaatcaggggatgctgcgatgggcctcgtttcttcgacgttatgaggagggagtaggggtcccatctcatccatccatcttgttgttctttttcttcaaatcattccgatcggctgatccgaagactactcgtgctgccatgcgctctgaatctgcatgatcgttccactcagagctgctactctaagacaagacgcgtaaaatccacgcgctttaatttgagcttaacgaaaatctttggatctgagagactgagacgagcatctaaaattatatgaaattgctctgctgtgcgctctatttcagacctaaaacagtacctccctcccaaaataatattcgttgattttattt

SEQ ID NO: 83952 - DNA, 2971 bp, Zea Mays
cagatgctggacgcggacaccgccatcgacgtcttgaggagccccgagaggaaggccatgggcacggggctcttcctggactgcgccgggagaaggcccacgatggcctccacgacggcgcgctgcttcttgacggcgtcggcgtccgcgccgccgcatctgtgcacgtccctggccatgagcccgtgcagcgcgttctgcgcgtagttgatgaggatcctggtgaccgtctcctgcttgagccccttggccttgaccgcggagagcagccgctggaagaagtcgaggccgagcgcggccacggacttgccccaccagtcggccggcgggtcgaggtcggcgaacgccgccgcgggcttgagctgcgcgcactggtccagcttggacagccccgaggtgagctgctccttgcacacgttggtggcgacggcggcgatgaggcggggcacgaggccgacgtcctcggcggccgggagcagcgcctcgcagctgcggagcacggcgacggagctggcgatgctggggagcaccgcgtcgcggaggaaggcctcggcgcggagctccaggctcttgtcggagaagtcgtcggtgatctgcaggtagtgcgcggcgcagcgcagcatggcgacgttggcgaccgtgacgtccacgtggacgccgtagcagaacttggcggcgagctcgaacgccggcgcgccccccggggtgccgtgcaggctgagccgcgccagcttggcgtccttggcctccgcgacgaggcgccggatcttgccgctccgggagaccagcgggaactgcgcgaacagctatgccgccggcgttagcacatcgttttaatcttctttctttttttttttcgttttcttgtggaagggcaaggagctctcagctctcaccttgtggagtgcgaagctggaggtgccgacctcgacggtgaggtcgctggagacgtcggtcggaggcctggcagaacgcagagtcgagttcaggagaggagcacaggatccgaggaacgaagcaggaacgcgagtgagttaccactcattggcgtggcggctgatgaggctcggccggaatgtcctcttcccggagatgctctgcttcagctctgtcaccgtcgccacgcccattttctctctctctctctctctctctctctctctctctctctctctctctctctctctctcctctactcttcactgtctctctctccaatgaagtcagcacagcaagcaaacactgcgaagggatgcacgccaaatatgtttacgtgggcgtcagggcagaggacagtgcagcttatttgtagcactagtgccttttagacagtggccggtgtgtgtgtggtgtgggagtgcgtgcagaaagccagtcccaaatctgatgcccacgcccatgggccgcagctatagctcaattcaaaaggctctcgctggcaaaaatgctacggctagcctagccacggccatggatcacagtcacagatggaacggaggtctgatgatggcggcgcggactgcaaagccatgagctataaggaaatgtatagaaaagggggacagggagcatcatgctcatataggccttttgcccttgagaagttaaggtgtgatcatgtgaatcatgctcgtcgtagcgtaggcgtctgcgtttctcctaacggccgctttcctgatgatgctgcggcgagctgccgggagagctgcaatcatgcggttcattcaggattcaacccaatgtgtttgggatgagacaggaaacatgcatacctctcatcttgttcggttgcatctagattaaagggattaaagaggataattctttgatctacacgcaaccgaacaagttctaaatatgcatgagtcatctcactttatactagctcggttccttttatagtagaactattctggcaccgtccttagttcagtaaacatgggtttgaggcctcacaactcaagatcctctatgagctcagcatcacacccccacccgttcggtttcaactttatcacaacacatcctaacacggttatagatgtacagaaagcacgtagcacgaaagcctctagcccgaagcactttttttggcccggtctgacccgcttttatacgggtccgggccggcacgaataagcgggccgggcctggacaagaaattatgcacggtgggctagcccggcacgacccgtttacctctaaacccgtcaaacccgttttttgcactaaaccgtgcttaccggtccgtttagcccacttttttggtccgctttttccgtgcttaccgggtcgtttaggcccgctgtgagcgggctcggacagggaaacaagcccgcaggcttagatggcccggtccggttttctaacgtgtttgacgggtcagacccaacccaaaacggaccgggcttcaccggacccgtgccgagccaggtggcccgtttggccatctctaaacacggtcgatcccattgtaacatttgcaggggaccagcatgacactgcagggctggtttcagtcgttggcaagataattgaaaggttattaattaagtagcctacaagtacgtatttggctacagtcactaatgtagaattgaagtgactaacccatatcagtcgttggcaagataattgaaaggttattaattaagtagcctacacggtcgatccggcacctaacccatatccatgtgctggtttacaagtctttgcataccatcacctttagttagttacttgtaaagacaatcgtttggagaagtcttttacgggcgtattttgactgtcagttattctcacgatgctatatcatcacaatctgctacaaaaccagtttgtatctaaatatgtttgggacgcgaatctagttgtacagatatcctttgcgatcaagagccggagactgcgattcacctttgcctcaagtgcccattgctttggaagtgtgggagttagtcaggtcatggac

SEQ ID NO: 83953 - DNA, 216 bp, Zea Mays
aagaaatagaaatcgctcggctgaacggaatttggccggaaactacagagaaaacaggaggaaccatgtgtccactggtcccaaagatacatacacccctcgaaacctttccatagtccatccatccatatacatgaatcgcatcgcatgctgtgtcgaacgccatgactttcatgagcagaagaccacgcgatgcccgcaccgcacgaaatccgg

SEQ ID NO: 83954 - DNA, 2524 bp, Zea Mays
atcagctgttgataagttgagatatcttcattgccttttggtttatgttcttccagtactgaagggaatttattctgaccaatgctttgaaataggtgttgaaacaagatcttctgatgtcctcagagcaaagataacttctgatgagcagatgtgctgtgacttttgcaaagtgccagtgtttgattatcaccgatactgcccaagatgttcatatgatttatgccttgattgctgtcatgacatacgtcattctcgggccaatgttgcacgaggagaatatactgaaggttatgttgaagataaaggtagagattcttttaatagaagagcaaggttggaaccatctgctgagagtgtcaatgacaagtcattatcttggccaatagatataaataatattgacattaaatctttattccctacatggagagtcaacaatgatggcagcatcacttgtggacctcacgaggctggtggttgtggctcctcaaagttggtattaaggcggatattcaaaataaattggattgctaaacttgtaaaaagttctgaagaaatggtcaatggttgcaaagtacatgatttggaggatggatgcttgtcttgcagtgatggcagaagatcggagtttactggtcagcaaaacctcggtctctcaaaatgctcaaacagtgatgagattggtaggaattgtttgtactcacctgtattggaggacttaaaatatgaaggcatcattcattttcgtaagcattggaaaaacgcggagcctattattatcagggaagcatttgagccttctctatcatcaagctgggatcccttgagtatttggagaggtatccaggagatcatggatgaagaaatggatgaagatgtcatagtcaaggctgtggactgctcgaaccaatcagaggtagatatcgagctcaaacagtttatcaaaggctactcagatggcagcaaaggaggagatggcccacttgttgatgctgaaattgaaagagtggccccgacccaatggggtctcctaaaccttgctgccaagttacccccagatgccttacaacctgaattagggatgaaactgctaattgcacatggaagtcaccgagaacttggtaaaggtgattcaatgacaaatctaatgattaacatgagcgatgtggttcacatgttaatgcatgcaactgaagtgcattaccaatgtcccaagagggtaagggtacagtctgatgtatctgaaatgattgctaatggaactagtgtccatgtaaatgctcatactcctgttcaaaatttgaatctggatattgaagagcaatcacacaaacactcgaaatcacacatcgaggagccaaacactaataattcagaaggatccctggctggtgctgtctgggatgtattccgcaggcaggatcttccaaagcttaatgaatatctagctgctcatcgggaagaatgtgcagctagatgtcaagcagtgtcttctgttaagtatcctatttatgatcaaactgtgtaccttaacgattatcataagaagatgttgaaggatcaatatggaattgaacccttcacattccaccaacatattggtgaggctgttttcattccagctgggtgtcctttccaattgaaaaacctccagtccacggttcaattggctctcaattttttgtcacctgagagtttgccagagtcagtccggctgtcccaagagatccgttgcctgccaaatggccatcttgcaaaactgaagatgcttgaggtaaaaaagatctccttatacgcagcaagttctgctgttagagaaattcagagaataacccttgatcccaagttcaatcttgatcctagttttgaggatcaaaatttgactagggcggtttcagagaacttggcaagagtaaacaaacggaaggtatcttgcagttgagattgtgggggcctggtgaaattatgacatgccattcagaggattgaagtagatatagtgcttgtacatgtattatattgtgtcatatgaaaggaacacattctaattcttattgggttacacattgactttacctgtatattgtgggttaggaagagtaacagttaagcttctgaggaacaagataaaaaggcgctggaaagctcatgtagaattgttagcacaataatctctgttggtagcatctgaagaataattaattagaccgaaattgttacattgtgaacacagggttcaagatttaaatactatattttcaccacggttttgcatttgtgtcaacctgcacgtagtaacgtctaaattactatagtgtttcaaaccaagtgccttttttatatatagcatgatttatctagaaaaatcaaaatatcttataatttataatagatttaaaatgaaagcaattacaatttaggatggaagtagttattgtatgtataattagttttaggatccatttggatctttgaaattgaaatatattcttgtgtccctggaccgacgagtaaattgtcg

SEQ ID NO: 83955 - DNA, 3185 bp, Zea Mays
atggcggccgtgccggaggacctccgctgcaagcgctccgacggcaagcagtggcgctgcagcgcgccctccatgcccgacaagaccgtctgcgagaagcactacgtccaggccaagaagcgctccgcctcctccgcgctccgcgcctcgctccgccgctcctcagcctcctccctcgcgcccgtcttcccattctcctcctccccctcctccgccgctcgcctccgcgccgccgacgaggacccgcccatggcggtcgcgaggcccctctacggcagggtcgccggggaggcggtgtacgtggctgaaccggtgccggcgcccgcgcggagggaggtcgcctacgaagggctgcctcggggcaatgcggctggtggcaggactgcggcggggctggtcggcagaggcccactatggtttcctggtggcggctctgaagggataaggagttgccaccagtgccggaaggctgggggtgtcatctggtgtaccagctgtgacaggagaggctactgtgccagatgcatctccagatggtactctgacattccgatggatgaagttcgaaatgtttgtccagcatgccgtggtatttgtaattgcaaagtttgcttacaaggagacaacttaataaaggctagggtgcaagaaatatcagctgttgataagttgagatatcttcattgccttttggtttatgttcttccagtactgaagggaatttattctgaccaatgctttgaaataggtgttgaaacaagatcttctggaccaaagacagatgtcctcagagcaaagataacttctgatgagcagatgtgctgtgacttttgcaaagtgccagtgtttgattatcaccgatactgcccaagatgttcatatgatttatgccttgattgctgtcatgacatacgtcattctcgggccaatgttgcacgaggagaatatactgaaggttatgttgaagataaaggtagagattcttttaatagaagagcaaggttggaaccatctgctgagagtgtcaatgacaagtcattatcttggccaatagatataaataatattgacattaaatctttattccctacatggagagtcaacaatgatggcagcatcacttgtggacctcacgaggctggtggttgtggctcctcaaagttggtattaaggcggatattcaaaataaattggattgctaaacttgtaaaaagttctgaagaaatggtcaatggttgcaaagtacatgatttggaggatggatgcttgtcttgcagtgatggcagaagatcggagtttactggtcagcaaaacctcggtctctcaaaatgctcaaacagtgatgagattggtaggaattgtttgtactcacctgtattggaggacttaaaatatgaaggcatcattcattttcgtaagcattggaaaaacgcggagcctattattatcagggaagcatttgagccttctctatcatcaagctgggatcccttgagtatttggagaggtatccaggagatcatggatgaagaaatggatgaagatgtcatagtcaaggctgtggactgctcgaaccaatcagagatatcgagctcaaacagtttatcaaaggctactcagatggcagcaaaggaggagatggcccacttgttgatgctgaaattgaaagagtggccccgacccaatggggtctcctaaaccttgctgccaagttacccccagatgccttacaacctgaattagggatgaaactgctaattgcacatggaagtcaccgagaacttggtaaaggtgattcaatgacaaatctaatgattaacatgagcgatgtggttcacatgttaatgcatgcaactgaagtgcattaccaatgtcccaagagggtaagggtacagtctgatgtatctgaaatgattgctaatggaactagtgtccatgtaaatgctcatactcctgttcaaaatttgaatctggatattgaagagcaatcacacaaacactcgaaatcacacatcgaggagccaaacactaataattcagaaggatccctggctggtgctgtctgggatgtattccgcaggcaggatcttccaaagcttaatgaatatctagctgctcatcgggaagaatgtgcagctagatgtcaagcagtgtcttctgttaagtatcctatttatgatcaaactgtgtaccttaacgattatcataagaagatgttgaaggatcaatatggaattgaacccttcacattccaccaacatattggtgaggctgttttcattccagctgggtgtcctttccaattgaaaaacctccagtccacggttcaattggctctcaattttttgtcacctgagagtttgccagagtcagtccggctgtcccaagagatccgttgcctgccaaatggccatcttgcaaaactgaagatgcttgaggtaaaaaagatctccttatacgcagcaagttctgctgttagagaaattcagagaataacccttgatcccaagttcaatcttgatcctagttttgaggatcaaaatttgactagggcggtttcagagaacttggcaagagtaaacaaacggaaggtatcttgcagttgagattgtgggggcctggtgaaattatgacatgccattcagaggattgaagtagatatagtgcttgtacatgtattatattgtgtcatatgaaaggaacacattctaattcttattgggttacacattgactttacctgtatattgtgggttaggaagagtaacagttaagcttctgaggaacaagataaaaaggcgctggaaagctcatgtagaattgttagcacaataatctctgttggtagcatctgaagaataattaattagaccgaaattgttacattgtgaacacagggttcaagatttaaatactatattttcaccacggttttgcatttgtgtcaacctgcacgtagtaacgtctaaattactatagtgtttcaaaccaagtgccttttttatatatagcatgatttatctagaaaaatcaaaatatcttataatttataatagatttaaaatgaaagcaattacaatttaggatggaagtagttattgtatgtataattagttttaggatccatttggatctttgaaattgaaatatattcttgtgtccctggaccgacgagtaaattgtcg

SEQ ID NO: 83956 - DNA, 4230 bp, Zea Mays
atggcggccgtgccggaggacctccgctgcaagcgctccgacggcaagcagtggcgctgcagcgcgccctccatgcccgacaagaccgtctgcgagaagcactacgtccaggccaagaagcgctccgcctcctccgcgctccgcgcctcgctccgccgctcctcagcctcctccctcgcgcccgtcttcccattctcctcctccccctcctccgccgctcgcctccgcgccgccgacgaggacccgcccatggcggtcgcgaggcccctctacggcagggtcgccggggaggcggtgtacgtggctgaaccggtgccggcgcccgcgcggagggaggtcgcctacgaagggctgcctcggggcaatgcggctggtggcaggactgcggcggggctggtcggcagaggcccactatggtttcctggtggcggctctgaagggataaggagttgccaccagtgccggaaggctgggggtgtcatctggtgtaccagctgtgacaggagaggctactgtgccagatgcatctccagatggtactctgacattccgatggatgaagttcgaaatgtttgtccagcatgccgtggtatttgtaattgcaaagtttgcttacaaggagacaacttaataaagcattcactgacgctattattgataggaccaaagacagatgtcctcagagcaaagataacttctgatgagcagatgtgctgtgacttttgcaaagtgccagtgtttgattatcaccgatactgcccaagatgttcatatgatttatgccttgattgctgtcatgacatacgtcattctcgggccaatgttgcacgaggagaatatactgaaggttatgttgaagataaaggtagagattcttttaatagaagagcaaggttggaaccatctgctgagagtgtcaatgacaagtcattatcttggccaatagatataaataatattgacattaaatctttattccctacatggagagtcaacaatgatggcagcatcacttgtggacctcacgaggctggtggttgtggctcctcaaagttggtattaaggcggatattcaaaataaattggattgctaaacttgtaaaaagttctgaagaaatggtcaatggttgcaaagtacatgatttggaggatggatgcttgtcttgcagtgatggcagaagatcggagtttactggtcagcaaaacctcggtctctcaaaatgctcaaacagtgatgagattggtaggaattgtttgtactcacctgtattggaggacttaaaatatgaaggcatcattcattttcgtaagcattggaaaaacgcggagcctattattatcagggaagcatttgagccttctctatcatcaagctgggatcccttgagtatttggagaggtatccaggagatcatggatgaagaaatggatgaagatgtcatagtcaaggctgtggactgctcgaaccaatcagagatatcgagctcaaacagtttatcaaaggctactcagatggcagcaaaggaggagatggcccacttgttgatgctgaaattgaaagagtggccccgacccaatggggtctcctaaaccttgctgccaagttacccccagatgccttacaacctgaattagggatgaaactgctaattgcacatggaagtcaccgagaacttggtaaaggtgattcaatgacaaatctaatgattaacatgagcgatgtggttcacatgttaatgcatgcaactgaagtgcattaccaatgtcccaagagggtaagggtacagtctgatgtatctgaaatgattgctaatggaactagtgtccatgtaaatgctcatactcctgttcaaaatttgaatctggatattgaagagcaatcacacaaacactcgaaatcacacatcgaggagccaaacactaataattcagaaggatccctggctggtgctgtctgggatgtattccgcaggcaggatcttccaaagcttaatgaatatctagctgctcatcgggaagaatgtgcagctagatgtcaagcagtgtcttctgttaagtatcctatttatgatcaaactgtgtaccttaacgattatcataagaagatgttgaaggatcaatatggaattgaacccttcacattccaccaacatattggtgaggctgttttcattccagctgggtgtcctttccaattgaaaaacctccaggtgatgcatctcgtcgtcatatttaaactttgtcatgctcagagtttttgttcttatttttgtaaaaagtggtgcctgaattttcaaccttaactattaagggataaaatgacctgggggttccataaattacttgtgttaacactacttgtatgctcagaccatcattttcaatgagcagagcttttctaaaatgtttcttgaatctgcatatttttatgcctgtttggtagtcactctagaacataatgaagtggtaggactcttatcaattttaattttaatttaggctatgaatatagtgatttacatgcgaacatgctaaagagcttggaaaaagaaaggaagaaaagcactagtagcagcagtgctcagaagtcagaaataaagcgagagtgttactgcacggaacatgtggaaactgtattttgacttgtttttttttccataaattacttgtgttaacactacttgtatgcgcagactaaggtgcgtttggttggagagttaactagaacggagcggctctattttagtttttgagaatgagccgttttattctgcgtgtttggcaaacagaacagtgtcgctccattttttgtttcgttgaagagtagaatagagtggagtcgcttcgttctttgtttggttggagacccatatgagtatagatagaaggagagggaggatagcgctcgcgtccgagagagcgctcacatccaatcgtttttgtggagcaagatcattccaaccatttatggtaaatttccatatgggtcttataggagccgctccgctcatttttgttggaaaccaaacatctaaaaaataagaatggagctactctattcttcactcctcaaccaaacatacactaagtttcatgcgtgctcatctctcactacgtgttgaatttgacttgcttgttcttatttgttatgcttattacttggagaagaattttgttcctctatctttgatatcatcttctttacatgtgattatttgaactagttatgtactatctactgaatgcggctgttatgctttgatttgttgaaaatgataatatcttctatgcttctgttattgtttgaatactttatttggggatgtagtttacatttgttttctgttatattgacatgatcagtccacggttcaattggctctcaattttttgtcacctgagagtttgccagagtcagtccggctgtcccaagagatccgttgcctgccaaatggccatcttgcaaaactgaagatgcttgaggtaaaaaagatctccttatacgcagcaagttctgctgttagagaaattcagagaataacccttgatcccaagttcaatcttgatcctagttttgaggatcaaaatttgactagggcggtttcagagaacttggcaagagtaaacaaacggaaggtatcttgcagttgagattgtgggggcctggtgaaattatgacatgccattcagaggattgaagtagatatagtgcttgtacatgtattatattgtgtcatatgaaaggaacacattctaattcttattgggttacacattgactttacctgtatattgtgggttaggaagagtaacagttaagcttctgaggaacaagataaaaaggcgctggaaagctcatgtagaattgttagcacaataatctctgttggtagcatctgaagaataattaattagaccgaaattgttacattgtgaacacagggttcaagatttaaatactatattttcaccacggttttgcatttgtgtcaacctgcacgtagtaacgtctaaattactatagtgtttcaaaccaagtgccttttttatatatagcatgatttatctagaaaaatcaaaatatcttataatttataatagatttaaaatgaaagcaattacaatttaggatggaagtagttattgtatgtataattagttttaggatccatttggatctttgaaattgaaatatattcttgtgtccctggaccgacgagtaaattgtcg

SEQ ID NO: 83957 - DNA, 4334 bp, Zea Mays
atggcggccgtgccggaggacctccgctgcaagcgctccgacggcaagcagtggcgctgcagcgcgccctccatgcccgacaagaccgtctgcgagaagcactacgtccaggccaagaagcgctccgcctcctccgcgctccgcgcctcgctccgccgctcctcagcctcctccctcgcgcccgtcttcccattctcctcctccccctcctccgccgctcgcctccgcgccgccgacgaggacccgcccatggcggtcgcgaggcccctctacggcagggtcgccggggaggcggtgtacgtggctgaaccggtgccggcgcccgcgcggagggaggtcgcctacgaagggctgcctcggggcaatgcggctggtggcaggactgcggcggggctggtcggcagaggcccactatggtttcctggtggcggctctgaagggataaggagttgccaccagtgccggaaggctgggggtgtcatctggtgtaccagctgtgacaggagaggctactgtgccagatgcatctccagatggtactctgacattccgatggatgaagttcgaaatgtttgtccagcatgccgtggtatttgtaattgcaaagtttgcttacaaggagacaacttaataaaggctagggtgcaagaaatatcagctgttgataagttgagatatcttcattgccttttggtttatgttcttccagtactgaagggaatttattctgaccaatgctttgaaataggtgttgaaacaagatcttctgacagatgtcctcagagcaaagataacttctgatgagcagatgtgctgtgacttttgcaaagtgccagtgtttgattatcaccgatactgcccaagatgttcatatgatttatgccttgattgctgtcatgacatacgtcattctcgggccaatgttgcacgaggagaatatactgaaggttatgttgaagataaaggtagagattcttttaatagaagagcaaggttggaaccatctgctgagagtgtcaatgacaagtcattatcttggccaatagatataaataatattgacattaaatctttattccctacatggagagtcaacaatgatggcagcatcacttgtggacctcacgaggctggtggttgtggctcctcaaagttggtattaaggcggatattcaaaataaattggattgctaaacttgtaaaaagttctgaagaaatggtcaatggttgcaaagtacatgatttggaggatggatgcttgtcttgcagtgatggcagaagatcggagtttactggtcagcaaaacctcggtctctcaaaatgctcaaacagtgatgagattggtaggaattgtttgtactcacctgtattggaggacttaaaatatgaaggcatcattcattttcgtaagcattggaaaaacgcggagcctattattatcagggaagcatttgagccttctctatcatcaagctgggatcccttgagtatttggagaggtatccaggagatcatggatgaagaaatggatgaagatgtcatagtcaaggctgtggactgctcgaaccaatcagaggtagatatcgagctcaaacagtttatcaaaggctactcagatggcagcaaaggaggagatggcccacttgttgatgctgaaattgaaagagtggccccgacccaatggggtctcctaaaccttgctgccaagttacccccagatgccttacaacctgaattagggatgaaactgctaattgcacatggaagtcaccgagaacttggtaaaggtgattcaatgacaaatctaatgattaacatgagcgatgtggttcacatgttaatgcatgcaactgaagtgcattaccaatgtcccaagagggtaagggtacagtctgatgtatctgaaatgattgctaatggaactagtgtccatgtaaatgctcatactcctgttcaaaatttgaatctggatattgaagagcaatcacacaaacactcgaaatcacacatcgaggagccaaacactaataattcagaaggatccctggctggtgctgtctgggatgtattccgcaggcaggatcttccaaagcttaatgaatatctagctgctcatcgggaagaatgtgcagctagatgtcaagcagtgtcttctgttaagtatcctatttatgatcaaactgtgtaccttaacgattatcataagaagatgttgaaggatcaatatggaattgaacccttcacattccaccaacatattggtgaggctgttttcattccagctgggtgtcctttccaattgaaaaacctccaggtgatgcatctcgtcgtcatatttaaactttgtcatgctcagagtttttgttcttatttttgtaaaaagtggtgcctgaattttcaaccttaactattaagggataaaatgacctgggggttccataaattacttgtgttaacactacttgtatgctcagaccatcattttcaatgagcagagcttttctaaaatgtttcttgaatctgcatatttttatgcctgtttggtagtcactctagaacataatgaagtggtaggactcttatcaattttaattttaatttaggctatgaatatagtgatttacatgcgaacatgctaaagagcttggaaaaagaaaggaagaaaagcactagtagcagcagtgctcagaagtcagaaataaagcgagagtgttactgcacggaacatgtggaaactgtattttgacttgtttttttttccataaattacttgtgttaacactacttgtatgcgcagactaaggtgcgtttggttggagagttaactagaacggagcggctctattttagtttttgagaatgagccgttttattctgcgtgtttggcaaacagaacagtgtcgctccattttttgtttcgttgaagagtagaatagagtggagtcgcttcgttctttgtttggttggagacccatatgagtatagatagaaggagagggaggatagcgctcgcgtccgagagagcgctcacatccaatcgtttttgtggagcaagatcattccaaccatttatggtaaatttccatatgggtcttataggagccgctccgctcatttttgttggaaaccaaacatctaaaaaataagaatggagctactctattcttcactcctcaaccaaacatacactaagtttcatgcgtgctcatctctcactacgtgttgaatttgacttgcttgttcttatttgttatgcttattacttggagaagaattttgttcctctatctttgatatcatcttctttacatgtgattatttgaactagttatgtactatctactgaatgcggctgttatgctttgatttgttgaaaatgataatatcttctatgcttctgttattgtttgaatactttatttggggatgtagtttacatttgttttctgttatattgacatgatcagtccacggttcaattggctctcaattttttgtcacctgagagtttgccagagtcagtccggctgtcccaagagatccgttgcctgccaaatggccatcttgcaaaactgaagatgcttgaggtaaaaaagatctccttatacgcagcaagttctgctgttagagaaattcagagaataacccttgatcccaagttcaatcttgatcctagttttgaggatcaaaatttgactagggcggtttcagagaacttggcaagagtaaacaaacggaaggtatcttgcagttgagattgtgggggcctggtgaaattatgacatgccattcagaggattgaagtagatatagtgcttgtacatgtattatattgtgtcatatgaaaggaacacattctaattcttattgggttacacattgactttacctgtatattgtgggttaggaagagtaacagttaagcttctgaggaacaagataaaaaggcgctggaaagctcatgtagaattgttagcacaataatctctgttggtagcatctgaagaataattaattagaccgaaattgttacattgtgaacacagggttcaagatttaaatactatattttcaccacggttttgcatttgtgtcaacctgcacgtagtaacgtctaaattactatagtgtttcaaaccaagtgccttttttatatatagcatgatttatctagaaaaatcaaaatatcttataatttataatagatttaaaatgaaagcaattacaatttaggatggaagtagttattgtatgtataattagttttaggatccatttggatctttgaaattgaaatatattcttgtgtccctggaccgacgagtaaattgtcg

SEQ ID NO: 83958 - DNA, 3958 bp, Zea Mays
atggcggccgtgccggaggacctccgctgcaagcgctccgacggcaagcagtggcgctgcagcgcgccctccatgcccgacaagaccgtctgcgagaagcactacgtccaggccaagaagcgctccgcctcctccgcgctccgcgcctcgctccgccgctcctcagcctcctccctcgcgcccgtcttcccattctcctcctccccctcctccgccgctcgcctccgcgccgccgacgaggacccgcccatggcggtcgcgaggcccctctacggcagggtcgccggggaggcggtgtacgtggctgaaccggtgccggcgcccgcgcggagggaggtcgcctacgaagggctgcctcggggcaatgcggctggtggcaggactgcggcggggctggtcggcagaggcccactatggtttcctggtggcggctctgaagggataaggagttgccaccagtgccggaaggctgggggtgtcatctggtgtaccagctgtgacaggagaggctactgtgccagatgcatctccagatggtactctgacattccgatggatgaagttcgaaatgtttgtccagcatgccgtggtatttgtaattgcaaagtttgcttacaaggagacaacttaataaagcattcactgacgctattattgataggaccaaagacagatgtcctcagagcaaagataacttctgatgagcagatgtgctgtgacttttgcaaagtgccagtgtttgattatcaccgatactgcccaagatgttcatatgatttatgccttgattgctgtcatgacatacgtcattctcgggccaatgttgcacgaggagaatatactgaaggttatgttgaagataaaggtagagattcttttaatagaagagcaaggttggaaccatctgctgagagtgtcaatgacaagtcattatcttggccaatagatataaataatattgacattaaatctttattccctacatggagagtcaacaatgatggcagcatcacttgtggacctcacgaggctggtggttgtggctcctcaaagttggtattaaggcggatattcaaaataaattggattgctaaacttgtaaaaagttctgaagaaatggtcaatggttgcaaagtacatgatttggaggatggatgcttgtcttgcagtgatggcagaagatcggagtttactggtcagcaaaacctcggtctctcaaaatgctcaaacagtgatgagattggtaggaattgtttgtactcacctgtattggaggacttaaaatatgaaggcatcattcattttcgtaagcattggaaaaacgcggagcctattattatcagggaagcatttgagccttctctatcatcaagctgggatcccttgagtatttggagaggtatccaggagatcatggatgaagaaatggatgaagatgtcatagtcaaggctgtggactgctcgaaccaatcagaggtagatatcgagctcaaacagtttatcaaaggctactcagatggcagcaaaggaggagatggcccacttgttgatgctgaaattgaaagagtggccccgacccaatggggtctcctaaaccttgctgccaagttacccccagatgccttacaacctgaattagggatgaaactgctaattgcacatggaagtcaccgagaacttggtaaaggtgattcaatgacaaatctaatgattaacatgagcgatgtggttcacatgttaatgcatgcaactgaagtgcattaccaatgtcccaagagggttaagtatcctatttatgatcaaactgtgtaccttaacgattatcataagaagatgttgaaggatcaatatggaattgaacccttcacattccaccaacatattggtgaggctgttttcattccagctgggtgtcctttccaattgaaaaacctccaggtgatgcatctcgtcgtcatatttaaactttgtcatgctcagagtttttgttcttatttttgtaaaaagtggtgcctgaattttcaaccttaactattaagggataaaatgacctgggggttccataaattacttgtgttaacactacttgtatgctcagaccatcattttcaatgagcagagcttttctaaaatgtttcttgaatctgcatatttttatgcctgtttggtagtcactctagaacataatgaagtggtaggactcttatcaattttaattttaatttaggctatgaatatagtgatttacatgcgaacatgctaaagagcttggaaaaagaaaggaagaaaagcactagtagcagcagtgctcagaagtcagaaataaagcgagagtgttactgcacggaacatgtggaaactgtattttgacttgtttttttttccataaattacttgtgttaacactacttgtatgcgcagactaaggtgcgtttggttggagagttaactagaacggagcggctctattttagtttttgagaatgagccgttttattctgcgtgtttggcaaacagaacagtgtcgctccattttttgtttcgttgaagagtagaatagagtggagtcgcttcgttctttgtttggttggagacccatatgagtatagatagaaggagagggaggatagcgctcgcgtccgagagagcgctcacatccaatcgtttttgtggagcaagatcattccaaccatttatggtaaatttccatatgggtcttataggagccgctccgctcatttttgttggaaaccaaacatctaaaaaataagaatggagctactctattcttcactcctcaaccaaacatacactaagtttcatgcgtgctcatctctcactacgtgttgaatttgacttgcttgttcttatttgttatgcttattacttggagaagaattttgttcctctatctttgatatcatcttctttacatgtgattatttgaactagttatgtactatctactgaatgcggctgttatgctttgatttgttgaaaatgataatatcttctatgcttctgttattgtttgaatactttatttggggatgtagtttacatttgttttctgttatattgacatgatcagtccacggttcaattggctctcaattttttgtcacctgagagtttgccagagtcagtccggctgtcccaagagatccgttgcctgccaaatggccatcttgcaaaactgaagatgcttgaggtaaaaaagatctccttatacgcagcaagttctgctgttagagaaattcagagaataacccttgatcccaagttcaatcttgatcctagttttgaggatcaaaatttgactagggcggtttcagagaacttggcaagagtaaacaaacggaaggtatcttgcagttgagattgtgggggcctggtgaaattatgacatgccattcagaggattgaagtagatatagtgcttgtacatgtattatattgtgtcatatgaaaggaacacattctaattcttattgggttacacattgactttacctgtatattgtgggttaggaagagtaacagttaagcttctgaggaacaagataaaaaggcgctggaaagctcatgtagaattgttagcacaataatctctgttggtagcatctgaagaataattaattagaccgaaattgttacattgtgaacacagggttcaagatttaaatactatattttcaccacggttttgcatttgtgtcaacctgcacgtagtaacgtctaaattactatagtgtttcaaaccaagtgccttttttatatatagcatgatttatctagaaaaatcaaaatatcttataatttataatagatttaaaatgaaagcaattacaatttaggatggaagtagttattgtatgtataattagttttaggatccatttggatctttgaaattgaaatatattcttgtgtccctggaccgacgagtaaattgtcg

SEQ ID NO: 83959 - DNA, 4330 bp, Zea Mays
atggcggccgtgccggaggacctccgctgcaagcgctccgacggcaagcagtggcgctgcagcgcgccctccatgcccgacaagaccgtctgcgagaagcactacgtccaggccaagaagcgctccgcctcctccgcgctccgcgcctcgctccgccgctcctcagcctcctccctcgcgcccgtcttcccattctcctcctccccctcctccgccgctcgcctccgcgccgccgacgaggacccgcccatggcggtcgcgaggcccctctacggcagggtcgccggggaggcggtgtacgtggctgaaccggtgccggcgcccgcgcggagggaggtcgcctacgaagggctgcctcggggcaatgcggctggtggcaggactgcggcggggctggtcggcagaggcccactatggtttcctggtggcggctctgaagggataaggagttgccaccagtgccggaaggctgggggtgtcatctggtgtaccagctgtgacaggagaggctactgtgccagatgcatctccagatggtactctgacattccgatggatgaagttcgaaatgtttgtccagcatgccgtggtatttgtaattgcaaagtttgcttacaaggagacaacttaataaaggctagggtgcaagaaatatcagctgttgataagttgagatatcttcattgccttttggtttatgttcttccagtactgaagggaatttattctgaccaatgctttgaaataggtgttgaaacaagatcttctgacagatgtcctcagagcaaagataacttctgatgagcagatgtgctgtgacttttgcaaagtgccagtgtttgattatcaccgatactgcccaagatgttcatatgatttatgccttgattgctgtcatgacatacgtcattctcgggccaatgttgcacgaggagaatatactgaaggttatgttgaagataaaggtagagattcttttaatagaagagcaaggttggaaccatctgctgagagtgtcaatgacaagtcattatcttggccaatagatataaataatattgacattaaatctttattccctacatggagagtcaacaatgatggcagcatcacttgtggacctcacgaggctggtggttgtggctcctcaaagttggtattaaggcggatattcaaaataaattggattgctaaacttgtaaaaagttctgaagaaatggtcaatggttgcaaagtacatgatttggaggatggatgcttgtcttgcagtgatggcagaagatcggagtttactggtcagcaaaacctcggtctctcaaaatgctcaaacagtgatgagattggtaggaattgtttgtactcacctgtattggaggacttaaaatatgaaggcatcattcattttcgtaagcattggaaaaacgcggagcctattattatcagggaagcatttgagccttctctatcatcaagctgggatcccttgagtatttggagaggtatccaggagatcatggatgaagaaatggatgaagatgtcatagtcaaggctgtggactgctcgaaccaatcagagatatcgagctcaaacagtttatcaaaggctactcagatggcagcaaaggaggagatggcccacttgttgatgctgaaattgaaagagtggccccgacccaatggggtctcctaaaccttgctgccaagttacccccagatgccttacaacctgaattagggatgaaactgctaattgcacatggaagtcaccgagaacttggtaaaggtgattcaatgacaaatctaatgattaacatgagcgatgtggttcacatgttaatgcatgcaactgaagtgcattaccaatgtcccaagagggtaagggtacagtctgatgtatctgaaatgattgctaatggaactagtgtccatgtaaatgctcatactcctgttcaaaatttgaatctggatattgaagagcaatcacacaaacactcgaaatcacacatcgaggagccaaacactaataattcagaaggatccctggctggtgctgtctgggatgtattccgcaggcaggatcttccaaagcttaatgaatatctagctgctcatcgggaagaatgtgcagctagatgtcaagcagtgtcttctgttaagtatcctatttatgatcaaactgtgtaccttaacgattatcataagaagatgttgaaggatcaatatggaattgaacccttcacattccaccaacatattggtgaggctgttttcattccagctgggtgtcctttccaattgaaaaacctccaggtgatgcatctcgtcgtcatatttaaactttgtcatgctcagagtttttgttcttatttttgtaaaaagtggtgcctgaattttcaaccttaactattaagggataaaatgacctgggggttccataaattacttgtgttaacactacttgtatgctcagaccatcattttcaatgagcagagcttttctaaaatgtttcttgaatctgcatatttttatgcctgtttggtagtcactctagaacataatgaagtggtaggactcttatcaattttaattttaatttaggctatgaatatagtgatttacatgcgaacatgctaaagagcttggaaaaagaaaggaagaaaagcactagtagcagcagtgctcagaagtcagaaataaagcgagagtgttactgcacggaacatgtggaaactgtattttgacttgtttttttttccataaattacttgtgttaacactacttgtatgcgcagactaaggtgcgtttggttggagagttaactagaacggagcggctctattttagtttttgagaatgagccgttttattctgcgtgtttggcaaacagaacagtgtcgctccattttttgtttcgttgaagagtagaatagagtggagtcgcttcgttctttgtttggttggagacccatatgagtatagatagaaggagagggaggatagcgctcgcgtccgagagagcgctcacatccaatcgtttttgtggagcaagatcattccaaccatttatggtaaatttccatatgggtcttataggagccgctccgctcatttttgttggaaaccaaacatctaaaaaataagaatggagctactctattcttcactcctcaaccaaacatacactaagtttcatgcgtgctcatctctcactacgtgttgaatttgacttgcttgttcttatttgttatgcttattacttggagaagaattttgttcctctatctttgatatcatcttctttacatgtgattatttgaactagttatgtactatctactgaatgcggctgttatgctttgatttgttgaaaatgataatatcttctatgcttctgttattgtttgaatactttatttggggatgtagtttacatttgttttctgttatattgacatgatcagtccacggttcaattggctctcaattttttgtcacctgagagtttgccagagtcagtccggctgtcccaagagatccgttgcctgccaaatggccatcttgcaaaactgaagatgcttgaggtaaaaaagatctccttatacgcagcaagttctgctgttagagaaattcagagaataacccttgatcccaagttcaatcttgatcctagttttgaggatcaaaatttgactagggcggtttcagagaacttggcaagagtaaacaaacggaaggtatcttgcagttgagattgtgggggcctggtgaaattatgacatgccattcagaggattgaagtagatatagtgcttgtacatgtattatattgtgtcatatgaaaggaacacattctaattcttattgggttacacattgactttacctgtatattgtgggttaggaagagtaacagttaagcttctgaggaacaagataaaaaggcgctggaaagctcatgtagaattgttagcacaataatctctgttggtagcatctgaagaataattaattagaccgaaattgttacattgtgaacacagggttcaagatttaaatactatattttcaccacggttttgcatttgtgtcaacctgcacgtagtaacgtctaaattactatagtgtttcaaaccaagtgccttttttatatatagcatgatttatctagaaaaatcaaaatatcttataatttataatagatttaaaatgaaagcaattacaatttaggatggaagtagttattgtatgtataattagttttaggatccatttggatctttgaaattgaaatatattcttgtgtccctggaccgacgagtaaattgtcg

SEQ ID NO: 83960 - DNA, 3202 bp, Zea Mays
atggcggccgtgccggaggacctccgctgcaagcgctccgacggcaagcagtggcgctgcagcgcgccctccatgcccgacaagaccgtctgcgagaagcactacgtccaggccaagaagcgctccgcctcctccgcgctccgcgcctcgctccgccgctcctcagcctcctccctcgcgcccgtcttcccattctcctcctccccctcctccgccgctcgcctccgcgccgccgacgaggacccgcccatggcggtcgcgaggcccctctacggcagggtcgccggggaggcggtgtacgtggctgaaccggtgccggcgcccgcgcggagggaggtcgcctacgaagggctgcctcggggcaatgcggctggtggcaggactgcggcggggctggtcggcagaggcccactatggtttcctggtggcggctctgaagggataaggagttgccaccagtgccggaaggctgggggtgtcatctggtgtaccagctgtgacaggagaggctactgtgccagatgcatctccagatggtactctgacattccgatggatgaagttcgaaatgtttgtccagcatgccgtggtatttgtaattgcaaagtttgcttacaaggagacaacttaataaagggtgcaagaaatatcagctgttgataagttgagatatcttcattgccttttggtttatgttcttccagtactgaagggaatttattctgaccaatgctttgaaataggtgttgaaacaagatcttctgatgtcctcagagcaaagataacttctgatgagcagatgtgctgtgacttttgcaaagtgccagtgtttgattatcaccgatactgcccaagatgttcatatgatttatgccttgattgctgtcatgacatacgtcattctcgggccaatgttgcacgaggagaatatactgaaggttatgttgaagataaaggtagagattcttttaatagaagagcaaggttggaaccatctgctgagagtgtcaatgacaagtcattatcttggccaatagatataaataatattgacattaaatctttattccctacatggagagtcaacaatgatggcagcatcacttgtggacctcacgaggctggtggttgtggctcctcaaagttggtattaaggcggatattcaaaataaattggattgctaaacttgtaaaaagttctgaagaaatggtcaatggttgcaaagtacatgatttggaggatggatgcttgtcttgcagtgatggcagaagatcggagtttactggtcagcaaaacctcggtctctcaaaatgctcaaacagtgatgagattggtaggaattgtttgtactcacctgtattggaggacttaaaatatgaaggcatcattcattttcgtaagcattggaaaaacgcggagcctattattatcagggaagcatttgagccttctctatcatcaagctgggatcccttgagtatttggagaggtatccaggagatcatggatgaagaaatggatgaagatgtcatagtcaaggctgtggactgctcgaaccaatcagagatatcgagctcaaacagtttatcaaaggctactcagatggcagcaaaggaggagatggcccacttgttgatgctgaaattgaaagagtggccccgacccaatggggtctcctaaaccttgctgccaagttacccccagatgccttacaacctgaattagggatgaaactgctaattgcacatggaagtcaccgagaacttggtaaaggtgattcaatgacaaatctaatgattaacatgagcgatgtggttcacatgttaatgcatgcaactgaagtgcattaccaatgtcccaagagggtaagggtacagtctgatgtatctgaaatgattgctaatggaactagtgtccatgtaaatgctcatactcctgttcaaaatttgaatctggatattgaagagcaatcacacaaacactcgaaatcacacatcgaggagccaaacactaataattcagaaggatccctggctggtgctgtctgggatgtattccgcaggcaggatcttccaaagcttaatgaatatctagctgctcatcgggaagaatgtgcagctagatgtcaagcagtgtcttctgtaatgactcatttcttccctatgtcaaattagtcttaaataaattctcaaaggtgtttcatgttactatacttttgatgcaggttaagtatcctatttatgatcaaactgtgtaccttaacgattatcataagaagatgttgaaggatcaatatggaattgaacccttcacattccaccaacatattggtgaggctgttttcattccagctgggtgtcctttccaattgaaaaacctccagagtcagtccggctgtcccaagagatccgttgcctgccaaatggccatcttgcaaaactgaagatgcttgaggtaaaaaagatctccttatacgcagcaagttctgctgttagagaaattcagagaataacccttgatcccaagttcaatcttgatcctagttttgaggatcaaaatttgactagggcggtttcagagaacttggcaagagtaaacaaacggaaggtatcttgcagttgagattgtgggggcctggtgaaattatgacatgccattcagaggattgaagtagatatagtgcttgtacatgtattatattgtgtcatatgaaaggaacacattctaattcttattgggttacacattgactttacctgtatattgtgggttaggaagagtaacagttaagcttctgaggaacaagataaaaaggcgctggaaagctcatgtagaattgttagcacaataatctctgttggtagcatctgaagaataattaattagaccgaaattgttacattgtgaacacagggttcaagatttaaatactatattttcaccacggttttgcatttgtgtcaacctgcacgtagtaacgtctaaattactatagtgtttcaaaccaagtgccttttttatatatagcatgatttatctagaaaaatcaaaatatcttataatttataatagatttaaaatgaaagcaattacaatttaggatggaagtagttattgtatgtataattagttttaggatccatttggatctttgaaattgaaatatattcttgtgtccctggaccgacgagtaaattgtcg

SEQ ID NO: 83961 - DNA, 4234 bp, Zea Mays
atggcggccgtgccggaggacctccgctgcaagcgctccgacggcaagcagtggcgctgcagcgcgccctccatgcccgacaagaccgtctgcgagaagcactacgtccaggccaagaagcgctccgcctcctccgcgctccgcgcctcgctccgccgctcctcagcctcctccctcgcgcccgtcttcccattctcctcctccccctcctccgccgctcgcctccgcgccgccgacgaggacccgcccatggcggtcgcgaggcccctctacggcagggtcgccggggaggcggtgtacgtggctgaaccggtgccggcgcccgcgcggagggaggtcgcctacgaagggctgcctcggggcaatgcggctggtggcaggactgcggcggggctggtcggcagaggcccactatggtttcctggtggcggctctgaagggataaggagttgccaccagtgccggaaggctgggggtgtcatctggtgtaccagctgtgacaggagaggctactgtgccagatgcatctccagatggtactctgacattccgatggatgaagttcgaaatgtttgtccagcatgccgtggtatttgtaattgcaaagtttgcttacaaggagacaacttaataaagcattcactgacgctattattgataggaccaaagacagatgtcctcagagcaaagataacttctgatgagcagatgtgctgtgacttttgcaaagtgccagtgtttgattatcaccgatactgcccaagatgttcatatgatttatgccttgattgctgtcatgacatacgtcattctcgggccaatgttgcacgaggagaatatactgaaggttatgttgaagataaaggtagagattcttttaatagaagagcaaggttggaaccatctgctgagagtgtcaatgacaagtcattatcttggccaatagatataaataatattgacattaaatctttattccctacatggagagtcaacaatgatggcagcatcacttgtggacctcacgaggctggtggttgtggctcctcaaagttggtattaaggcggatattcaaaataaattggattgctaaacttgtaaaaagttctgaagaaatggtcaatggttgcaaagtacatgatttggaggatggatgcttgtcttgcagtgatggcagaagatcggagtttactggtcagcaaaacctcggtctctcaaaatgctcaaacagtgatgagattggtaggaattgtttgtactcacctgtattggaggacttaaaatatgaaggcatcattcattttcgtaagcattggaaaaacgcggagcctattattatcagggaagcatttgagccttctctatcatcaagctgggatcccttgagtatttggagaggtatccaggagatcatggatgaagaaatggatgaagatgtcatagtcaaggctgtggactgctcgaaccaatcagaggtagatatcgagctcaaacagtttatcaaaggctactcagatggcagcaaaggaggagatggcccacttgttgatgctgaaattgaaagagtggccccgacccaatggggtctcctaaaccttgctgccaagttacccccagatgccttacaacctgaattagggatgaaactgctaattgcacatggaagtcaccgagaacttggtaaaggtgattcaatgacaaatctaatgattaacatgagcgatgtggttcacatgttaatgcatgcaactgaagtgcattaccaatgtcccaagagggtaagggtacagtctgatgtatctgaaatgattgctaatggaactagtgtccatgtaaatgctcatactcctgttcaaaatttgaatctggatattgaagagcaatcacacaaacactcgaaatcacacatcgaggagccaaacactaataattcagaaggatccctggctggtgctgtctgggatgtattccgcaggcaggatcttccaaagcttaatgaatatctagctgctcatcgggaagaatgtgcagctagatgtcaagcagtgtcttctgttaagtatcctatttatgatcaaactgtgtaccttaacgattatcataagaagatgttgaaggatcaatatggaattgaacccttcacattccaccaacatattggtgaggctgttttcattccagctgggtgtcctttccaattgaaaaacctccaggtgatgcatctcgtcgtcatatttaaactttgtcatgctcagagtttttgttcttatttttgtaaaaagtggtgcctgaattttcaaccttaactattaagggataaaatgacctgggggttccataaattacttgtgttaacactacttgtatgctcagaccatcattttcaatgagcagagcttttctaaaatgtttcttgaatctgcatatttttatgcctgtttggtagtcactctagaacataatgaagtggtaggactcttatcaattttaattttaatttaggctatgaatatagtgatttacatgcgaacatgctaaagagcttggaaaaagaaaggaagaaaagcactagtagcagcagtgctcagaagtcagaaataaagcgagagtgttactgcacggaacatgtggaaactgtattttgacttgtttttttttccataaattacttgtgttaacactacttgtatgcgcagactaaggtgcgtttggttggagagttaactagaacggagcggctctattttagtttttgagaatgagccgttttattctgcgtgtttggcaaacagaacagtgtcgctccattttttgtttcgttgaagagtagaatagagtggagtcgcttcgttctttgtttggttggagacccatatgagtatagatagaaggagagggaggatagcgctcgcgtccgagagagcgctcacatccaatcgtttttgtggagcaagatcattccaaccatttatggtaaatttccatatgggtcttataggagccgctccgctcatttttgttggaaaccaaacatctaaaaaataagaatggagctactctattcttcactcctcaaccaaacatacactaagtttcatgcgtgctcatctctcactacgtgttgaatttgacttgcttgttcttatttgttatgcttattacttggagaagaattttgttcctctatctttgatatcatcttctttacatgtgattatttgaactagttatgtactatctactgaatgcggctgttatgctttgatttgttgaaaatgataatatcttctatgcttctgttattgtttgaatactttatttggggatgtagtttacatttgttttctgttatattgacatgatcagtccacggttcaattggctctcaattttttgtcacctgagagtttgccagagtcagtccggctgtcccaagagatccgttgcctgccaaatggccatcttgcaaaactgaagatgcttgaggtaaaaaagatctccttatacgcagcaagttctgctgttagagaaattcagagaataacccttgatcccaagttcaatcttgatcctagttttgaggatcaaaatttgactagggcggtttcagagaacttggcaagagtaaacaaacggaaggtatcttgcagttgagattgtgggggcctggtgaaattatgacatgccattcagaggattgaagtagatatagtgcttgtacatgtattatattgtgtcatatgaaaggaacacattctaattcttattgggttacacattgactttacctgtatattgtgggttaggaagagtaacagttaagcttctgaggaacaagataaaaaggcgctggaaagctcatgtagaattgttagcacaataatctctgttggtagcatctgaagaataattaattagaccgaaattgttacattgtgaacacagggttcaagatttaaatactatattttcaccacggttttgcatttgtgtcaacctgcacgtagtaacgtctaaattactatagtgtttcaaaccaagtgccttttttatatatagcatgatttatctagaaaaatcaaaatatcttataatttataatagatttaaaatgaaagcaattacaatttaggatggaagtagttattgtatgtataattagttttaggatccatttggatctttgaaattgaaatatattcttgtgtccctggaccgacgagtaaattgtcg

SEQ ID NO: 83962 - DNA, 4337 bp, Zea Mays
atggcggccgtgccggaggacctccgctgcaagcgctccgacggcaagcagtggcgctgcagcgcgccctccatgcccgacaagaccgtctgcgagaagcactacgtccaggccaagaagcgctccgcctcctccgcgctccgcgcctcgctccgccgctcctcagcctcctccctcgcgcccgtcttcccattctcctcctccccctcctccgccgctcgcctccgcgccgccgacgaggacccgcccatggcggtcgcgaggcccctctacggcagggtcgccggggaggcggtgtacgtggctgaaccggtgccggcgcccgcgcggagggaggtcgcctacgaagggctgcctcggggcaatgcggctggtggcaggactgcggcggggctggtcggcagaggcccactatggtttcctggtggcggctctgaagggataaggagttgccaccagtgccggaaggctgggggtgtcatctggtgtaccagctgtgacaggagaggctactgtgccagatgcatctccagatggtactctgacattccgatggatgaagttcgaaatgtttgtccagcatgccgtggtatttgtaattgcaaagtttgcttacaaggagacaacttaataaagggtgcaagaaatatcagctgttgataagttgagatatcttcattgccttttggtttatgttcttccagtactgaagggaatttattctgaccaatgctttgaaataggtgttgaaacaagatcttctggaccaaagacagatgtcctcagagcaaagataacttctgatgagcagatgtgctgtgacttttgcaaagtgccagtgtttgattatcaccgatactgcccaagatgttcatatgatttatgccttgattgctgtcatgacatacgtcattctcgggccaatgttgcacgaggagaatatactgaaggttatgttgaagataaaggtagagattcttttaatagaagagcaaggttggaaccatctgctgagagtgtcaatgacaagtcattatcttggccaatagatataaataatattgacattaaatctttattccctacatggagagtcaacaatgatggcagcatcacttgtggacctcacgaggctggtggttgtggctcctcaaagttggtattaaggcggatattcaaaataaattggattgctaaacttgtaaaaagttctgaagaaatggtcaatggttgcaaagtacatgatttggaggatggatgcttgtcttgcagtgatggcagaagatcggagtttactggtcagcaaaacctcggtctctcaaaatgctcaaacagtgatgagattggtaggaattgtttgtactcacctgtattggaggacttaaaatatgaaggcatcattcattttcgtaagcattggaaaaacgcggagcctattattatcagggaagcatttgagccttctctatcatcaagctgggatcccttgagtatttggagaggtatccaggagatcatggatgaagaaatggatgaagatgtcatagtcaaggctgtggactgctcgaaccaatcagaggtagatatcgagctcaaacagtttatcaaaggctactcagatggcagcaaaggaggagatggcccacttgttgatgctgaaattgaaagagtggccccgacccaatggggtctcctaaaccttgctgccaagttacccccagatgccttacaacctgaattagggatgaaactgctaattgcacatggaagtcaccgagaacttggtaaaggtgattcaatgacaaatctaatgattaacatgagcgatgtggttcacatgttaatgcatgcaactgaagtgcattaccaatgtcccaagagggtaagggtacagtctgatgtatctgaaatgattgctaatggaactagtgtccatgtaaatgctcatactcctgttcaaaatttgaatctggatattgaagagcaatcacacaaacactcgaaatcacacatcgaggagccaaacactaataattcagaaggatccctggctggtgctgtctgggatgtattccgcaggcaggatcttccaaagcttaatgaatatctagctgctcatcgggaagaatgtgcagctagatgtcaagcagtgtcttctgttaagtatcctatttatgatcaaactgtgtaccttaacgattatcataagaagatgttgaaggatcaatatggaattgaacccttcacattccaccaacatattggtgaggctgttttcattccagctgggtgtcctttccaattgaaaaacctccaggtgatgcatctcgtcgtcatatttaaactttgtcatgctcagagtttttgttcttatttttgtaaaaagtggtgcctgaattttcaaccttaactattaagggataaaatgacctgggggttccataaattacttgtgttaacactacttgtatgctcagaccatcattttcaatgagcagagcttttctaaaatgtttcttgaatctgcatatttttatgcctgtttggtagtcactctagaacataatgaagtggtaggactcttatcaattttaattttaatttaggctatgaatatagtgatttacatgcgaacatgctaaagagcttggaaaaagaaaggaagaaaagcactagtagcagcagtgctcagaagtcagaaataaagcgagagtgttactgcacggaacatgtggaaactgtattttgacttgtttttttttccataaattacttgtgttaacactacttgtatgcgcagactaaggtgcgtttggttggagagttaactagaacggagcggctctattttagtttttgagaatgagccgttttattctgcgtgtttggcaaacagaacagtgtcgctccattttttgtttcgttgaagagtagaatagagtggagtcgcttcgttctttgtttggttggagacccatatgagtatagatagaaggagagggaggatagcgctcgcgtccgagagagcgctcacatccaatcgtttttgtggagcaagatcattccaaccatttatggtaaatttccatatgggtcttataggagccgctccgctcatttttgttggaaaccaaacatctaaaaaataagaatggagctactctattcttcactcctcaaccaaacatacactaagtttcatgcgtgctcatctctcactacgtgttgaatttgacttgcttgttcttatttgttatgcttattacttggagaagaattttgttcctctatctttgatatcatcttctttacatgtgattatttgaactagttatgtactatctactgaatgcggctgttatgctttgatttgttgaaaatgataatatcttctatgcttctgttattgtttgaatactttatttggggatgtagtttacatttgttttctgttatattgacatgatcagtccacggttcaattggctctcaattttttgtcacctgagagtttgccagagtcagtccggctgtcccaagagatccgttgcctgccaaatggccatcttgcaaaactgaagatgcttgaggtaaaaaagatctccttatacgcagcaagttctgctgttagagaaattcagagaataacccttgatcccaagttcaatcttgatcctagttttgaggatcaaaatttgactagggcggtttcagagaacttggcaagagtaaacaaacggaaggtatcttgcagttgagattgtgggggcctggtgaaattatgacatgccattcagaggattgaagtagatatagtgcttgtacatgtattatattgtgtcatatgaaaggaacacattctaattcttattgggttacacattgactttacctgtatattgtgggttaggaagagtaacagttaagcttctgaggaacaagataaaaaggcgctggaaagctcatgtagaattgttagcacaataatctctgttggtagcatctgaagaataattaattagaccgaaattgttacattgtgaacacagggttcaagatttaaatactatattttcaccacggttttgcatttgtgtcaacctgcacgtagtaacgtctaaattactatagtgtttcaaaccaagtgccttttttatatatagcatgatttatctagaaaaatcaaaatatcttataatttataatagatttaaaatgaaagcaattacaatttaggatggaagtagttattgtatgtataattagttttaggatccatttggatctttgaaattgaaatatattcttgtgtccctggaccgacgagtaaattgtcg

SEQ ID NO: 83963 - DNA, 3364 bp, Zea Mays
aaaccacccttgctccactgcgcgaccgagacggtgtcgccatgggcatgccggtactctgacattccgatggatgaagttcgaaatgtttgtccagcatgccgtggtatttgtaattgcaaagtttgcttacaaggagacaacttaataaaggctagggtgcaagaaatatcagctgttgataagttgagatatcttcattgccttttggtttatgttcttccagtactgaagggaatttattctgaccaatgctttgaaataggtgttgaaacaagatcttctgatgtcctcagagcaaagataacttctgatgagcagatgtgctgtgacttttgcaaagtgccagtgtttgattatcaccgatactgcccaagatgttcatatgatttatgccttgattgctgtcatgacatacgtcattctcgggccaatgttgcacgaggagaatatactgaaggttatgttgaagataaaggtagagattcttttaatagaagagcaaggttggaaccatctgctgagagtgtcaatgacaagtcattatcttggccaatagatataaataatattgacattaaatctttattccctacatggagagtcaacaatgatggcagcatcacttgtggacctcacgaggctggtggttgtggctcctcaaagttggtattaaggcggatattcaaaataaattggattgctaaacttgtaaaaagttctgaagaaatggtcaatggttgcaaagtacatgatttggaggatggatgcttgtcttgcagtgatggcagaagatcggagtttactggtcagcaaaacctcggtctctcaaaatgctcaaacagtgatgagattggtaggaattgtttgtactcacctgtattggaggacttaaaatatgaaggcatcattcattttcgtaagcattggaaaaacgcggagcctattattatcagggaagcatttgagccttctctatcatcaagctgggatcccttgagtatttggagaggtatccaggagatcatggatgaagaaatggatgaagatgtcatagtcaaggctgtggactgctcgaaccaatcagaggtagatatcgagctcaaacagtttatcaaaggctactcagatggcagcaaaggaggagatggcccacttgttgatgctgaaattgaaagagtggccccgacccaatggggtctcctaaaccttgctgccaagttacccccagatgccttacaacctgaattagggatgaaactgctaattgcacatggaagtcaccgagaacttggtaaaggtgattcaatgacaaatctaatgattaacatgagcgatgtggttcacatgttaatgcatgcaactgaagtgcattaccaatgtcccaagagggtaagggtacagtctgatgtatctgaaatgattgctaatggaactagtgtccatgtaaatgctcatactcctgttcaaaatttgaatctggatattgaagagcaatcacacaaacactcgaaatcacacatcgaggagccaaacactaataattcagaaggatccctggctggtgctgtctgggatgtattccgcaggcaggatcttccaaagcttaatgaatatctagctgctcatcgggaagaatgtgcagctagatgtcaagcagtgtcttctgttaagtatcctatttatgatcaaactgtgtaccttaacgattatcataagaagatgttgaaggatcaatatggaattgaacccttcacattccaccaacatattggtgaggctgttttcattccagctgggtgtcctttccaattgaaaaacctccagactaaggtgcgtttggttggagagttaactagaacggagcggctctattttagtttttgagaatgagccgttttattctgcgtgtttggcaaacagaacagtgtcgctccattttttgtttcgttgaagagtagaatagagtggagtcgcttcgttctttgtttggttggagacccatatgagtatagatagaaggagagggaggatagcgctcgcgtccgagagagcgctcacatccaatcgtttttgtggagcaagatcattccaaccatttatggtaaatttccatatgggtcttataggagccgctccgctcatttttgttggaaaccaaacatctaaaaaataagaatggagctactctattcttcactcctcaaccaaacatacactaagtttcatgcgtgctcatctctcactacgtgttgaatttgacttgcttgttcttatttgttatgcttattacttggagaagaattttgttcctctatctttgatatcatcttctttacatgtgattatttgaactagttatgtactatctactgaatgcggctgttatgctttgatttgttgaaaatgataatatcttctatgcttctgttattgtttgaatactttatttggggatgtagtttacatttgttttctgttatattgacatgatcagtccacggttcaattggctctcaattttttgtcacctgagagtttgccagagtcagtccggctgtcccaagagatccgttgcctgccaaatggccatcttgcaaaactgaagatgcttgaggtaaaaaagatctccttatacgcagcaagttctgctgttagagaaattcagagaataacccttgatcccaagttcaatcttgatcctagttttgaggatcaaaatttgactagggcggtttcagagaacttggcaagagtaaacaaacggaaggtatcttgcagttgagattgtgggggcctggtgaaattatgacatgccattcagaggattgaagtagatatagtgcttgtacatgtattatattgtgtcatatgaaaggaacacattctaattcttattgggttacacattgactttacctgtatattgtgggttaggaagagtaacagttaagcttctgaggaacaagataaaaaggcgctggaaagctcatgtagaattgttagcacaataatctctgttggtagcatctgaagaataattaattagaccgaaattgttacattgtgaacacagggttcaagatttaaatactatattttcaccacggttttgcatttgtgtcaacctgcacgtagtaacgtctaaattactatagtgtttcaaaccaagtgccttttttatatatagcatgatttatctagaaaaatcaaaatatcttataatttataatagatttaaaatgaaagcaattacaatttaggatggaagtagttattgtatgtataattagttttaggatccatttggatctttgaaattgaaatatattcttgtgtccctggaccgacgagtaaattgtcg

SEQ ID NO: 83964 - DNA, 2947 bp, Zea Mays
catagatgtggaggtgatccccatctcagatggcccagtggggggctggggcgagacatgcatttagggagtcatgatgaggcgagctcagcccccagggaatgacggcggcccagcagttgagttacgctggggcaaggtcagcctgattgagccccggcggtccatcatggagagacaatgccctagcagggtcattaatatcacatgcgcctgtagctgccttcataatattactctggtggatgtccacaccttcctcgggaatacacgaaatctgtgcatcagccacaagatactccacgcgctctgaggaataagccgtcgggtgacatgaatgcgccaagcgctccccacagttctcgtctaccgtgacgcacttaggcgtcgagtccagagccctaggcgcatgcttagcccgcgccccctcggaccctgtggacccaggcggagatgaacaggtcgccgcggatcctgggagcctcctggacgtcgaggctgctggtcaggcttattgcgatcttcattagcatcaggccctccgtcagaagccggagggaggggaggttgagaaaccatggatgatgactgcaaattcgccgggaaaaacctgatggaaatcttgtatgttaggcatctcttttgttgcatgtcaagatctggctcaataatatgaaggtccatgtcactatgcagcctttctggatcaaaacaccatgcccgcaccttgaaggatgagaaatccctcacactctcagtgtccggatgcaagtcagaaatccagcaagattcatgcaagatgtgctctgccgttgaacggaaccaagcatgctcaggaatacctctaatttcaacatctcagtgtccggatgttgatggcatgttgggaaggcgggagaaccctggagaacatgaagccatgcggaagatgaaaaatgagtttatggtgaactgggatggtctgagaacaagggagaaagaacgtgtattagtacttgctgcaactaacaggccatttgatcttgatgaggctgttgttaggcggcttccaaggaggttgatggtgaatttgccagatgcatcaaataggagaaaaattcttagtgtaatactagccaaggaagatttggcagacgacgttgatctagaaactatagctaacctgacagaagggtactcaggcagtgatctcaagaatctgtgtgttactgctgcacaccgtcctattagggagattcttgaaaaggaaaagaaggaattgcaattgagtttcaagtggatttgctcacatgcaggagagagcttcagcagaagcagaaaatagatcattgcctccgtcacacactagcaatgatgtccgtgcattaagaacaagtgatttcatacatgcgcatgaacaggtgtgtgcaagtgttccctcggattccagtaacatgagcgagcttgtgcaatggaatgatctctatggagaaggcggatcaaggaaaaagacaacgctaagctacttcatgtagcttaggttataaatatattgggagaagtgccctggcacaaagcagcaatagttggaggcggtgcagttggaaaaaaaaagctatgctcatctgccagacatccatatcaaagagaattgatggttcaggtggagcggaatagaatggaatggaatagtatacatacacatggttgctgcctctgctctgggccatgcatcatgcatctggacaggacggctatcctggcttgcagttgccctatgcagttttgagtgcaatggtcaccatctgtgaagcacggataccacagagatcctggccccaaccactcttttcacaaatggagctgaggacctttggagttctaccaaaagtgatcttaaatctttgttctttgactttccgttttgtgaacggaaggccccactctgctagtatggattgttgatcctccgtttctctggtactgactgaactgctcatacaaaactcgttcaacaggcagaaatgctgcctggtggccttctagagtgcttctttgacgccgcagagagcacatcaaaaaaaatgtgtttgtttcgaacgatttgtgctgcattccattcacggcgatatcaggtgccgttgtttgtgtttggttccgcaatcaagggagtgaaagccattagcacatccaatcaaacaaatagcgatatctctttcactgtaccagttagcgctggtctcggatgctattaacattgctgttgtctgtctcggaaccaaacaccgcctaactcgtcggctgttaaatatttctgaactgaattactgcacttggttggggtttcatgcttatcaagttggcttatatagccaacaatactttgtgcagttctgcatcctctgcctgcttatgcgcgatctcattggctgagcggtacgaagataaaacggtagctaatccgaagcgatggcttctctttttctttctacggtattttgtctctatgaattacagttacagcagtcagaacagctgatttaaaaccgcagcgaaaaggctgattgccttgcccatttttgggtgggtggaggttaatacagatttctgtaatttttttactttaatattgtttgacatattgtgcaaggcaaatgatttcctaatgatttgttctacttgatattgtaatccatattgacctatatgctatgctcagttccttagagcatctccagtacttgatattgtaatccatattgacctaggggaaaaaaaggagaatttaacctgatgacactggtggactatgctatgctcagttccttggaacatctctagtagttttgtaaaaaaatctctctaaagacagatgtaaggagttgctacataataatagggagtaaaaatatctgtactctcatgtagtctttatttttagttaccaaatattataaattatgcctgc

SEQ ID NO: 83965 - DNA, 3837 bp, Zea Mays
gaacagccaaggctgctactacgtctcgtgtatgttcaggtgttggataggcacttcgttatcagtcccctggtgtcctgaaatcagagaagcatcaataggcttcggcggtacagtcaaggctgctacaacgccagagcccaagatgggggaggaaggagctgaattatgttggtccatagatgccaattcgtcatccgtagctagaccatcatcttgatcatcttgttgctgttgaaaacctaatgaacgttttcttgagtaaactttcagtgctggcatttgaactggtggttttgtcggtcttcaatctcacttcatcatgcatagatgtggaggtgatccccatctcagatggcccagtggggggctggggcgagacatgcatttagggagtcatgatgaggcgagctcagcccccagggaatgacggcggcccagcagttgagttacgctggggcaagcctttctggatcaaaacaccatgcccgcaccttgaaggatgagaaatccctcacactctcagtgtccggatgcaagtcagaaatccagcaagattcatgcaagatgtgctctgccgttgaacggaaccaagcatgctcaggaatacctctaatttcaacatctcagtgtccggatgtgtgaacctcgactaacgtttgaatagaagattaaaatgaggtcctctgagcatctttccatcattgaaaacccttgtagctgaatcttcatcaggtaaaatcaaaaggaaatcttctggtttggtttggtggatcgtcaatgagtccaaatgaaggtaaaaaactcgcaccacttcttccattaccaacataccaggaatcaacggtctagtcccaaccaatgtgacaaacagagctcgtcgaaatgccacctcttctcttgccatagcagtagaagtccaaaacgcatgagtggttcacaggccggctggacgcagcatctccacaacgaacctgcaaatccggggaggggcagcatcaacagaagggtccagggaagcctgtcttgagctagagcaaggctcccctacgcctcttccccgcatggatcgcttcctcttcctcttgaagcgaaaccccccatgattatcatcttcggggttccgcaatgggggtctctccagtaacaacctcctgaggagatatccttcaccacaccgatcctttggaatggggaccggaactagcacccaccggggggagggcttccttcttcatagagagacgctgccacaccgaaactctcccttcccttcttcccagacgctgccacacgtcctccttttgatcttcaaggaaggaaaggcagctggcagcctgagacacttgaaacacctggtggagcgacgacaggctgcagcaagatgggaggagaaacagttgtagcacttccctcagagatccacaggggaccctcaacgaggaaaattcaacactgcgaaacttcctcctacgttcaaccacctgccaaccgtccttgtccagtcgcgacatcgccgggctgctcgaacctgtgaaggtgcgtgggggccaaccttcaccgcacttgaggctcttgcactcgatgccgagggagaggagatgcgggtagaagagatgccacgcagagaactggatgtcaaagcttctttataggaaagaggagctagactggacccgcccgacgaagagacatggccagacttactccacctctgggactttgaacgtccaatgtggagagcctggcagccgaggaggtgggaggctttcctgctcatttatcctgcccttgtttttaggttgatggcatgttgggaaggcgggagaaccctggagaacatgaagccatgcggaagatgaaaaatgagtttatggtgaactgggatggtctgagaacaagggagaaagaacgtgtattagtacttgctgcaactaacaggccatttgatcttgatgaggctgttgttaggcggcttccaaggaggttgatggtgaatttgccagatgcatcaaataggagaaaaattcttagtgtaatactagccaaggaagatttggcagacgacgttgatctagaaactatagctaacctgacagaagggtactcaggcagtgatctcaagaatctgtgtgttactgctgcacaccgtcctattagggagattcttgaaaaggaaaagaaggagagagcttcagcagaagcagaaaatagatcattgcctccgtcacacactagcaatgatgtccgtgcattaagaacaagtgatttcatacatgcgcatgaacaggtgtgtgcaagtgttccctcggattccagtaacatgagcgagcttgtgcaatggaatgatctctatggagaaggcggatcaaggaaaaagacaacgctaagctacttcatgtagcttaggttataaatatattgggagaagtgccctggcacaaagcagcaatagttggaggcggtgcagttggaaaaaaaaagctatgctcatctgccagacatccatatcaaagagaattgatggttcaggtggagcggaatagaatggaatggaatagtatacatacacatggttgctgcctctgctctgggccatgcatcatgcatctggacaggacggctatcctggcttgcagttgccctatgcagttttgagtgcaatggtcaccatctgtgaagcacggataccacagagatcctggccccaaccactcttttcacaaatggagctgaggacctttggagttctaccaaaagtgatcttaaatctttgttctttgactttccgttttgtgaacggaaggccccactctgctagtatggattgttgatcctccgtttctctggtactgactgaactgctcatacaaaactcgttcaacaggcagaaatgctgcctggtggccttctagagtgcttctttgacgccgcagagagcacatcaaaaaaaatgtgtttgtttcgaacgatttgtgctgcattccattcacggcgatatcaggtgccgttgtttgtgtttggttccgcaatcaagggagtgaaagccattagcacatccaatcaaacaaatagcgatatctctttcactgtaccagttagcgctggtctcggatgctattaacattgctgttgtctgtctcggaaccaaacaccgcctaactcgtcggctgttaaatatttctgaactgaattactgcacttggttggggtttcatgcttatcaagttggcttatatagccaacaatactttgtgcagttctgcatcctctgcctgcttatgcgcgatctcattggctgagcggtacgaagataaaacggtagctaatccgaagcgatggcttctctttttctttctacggtattttgtctctatgaattacagttacagcagtcagaacagctgatttaaaaccgcagcgaaaaggctgattgccttgcccatttttgggtgggtggaggttaatacagatttctgtaatttttttactttaatattgtttgacatattgtgcaaggcaaatgatttcctaatgatttgttctacttgatattgtaatccatattgacctatatgctatgctcagttccttagagcatctccagtacttgatattgtaatccatattgacctaggggaaaaaaaggagaatttaacctgatgacactggtggactatgctatgctcagttccttggaacatctctagtagttttgtaaaaaaatctctctaaagacagatgtaaggagttgctacataataatagggagtaaaaatatctgtactctcatgtagtctttatttttagttaccaaatattataaattatgcctgc

SEQ ID NO: 83966 - DNA, 3916 bp, Zea Mays
gtgcccttcacaccctaccctttctatttacggtgcgattttcacaattggtcatggagcgcatcatgatttcagactggatgaatcatccactgcctcatctgtttgtagactgaagcaagctaagatatttgagcaacttcatgaggagaaatcaagcacttcagtgttatcttccacttgcacttgcagtagtatccagctggggcaacactcacatttcaatgatattcaggatcatgtgtcatctaaagggcgcaaagcctcatcctttctctttggaagaggtcggtgttcattgttgtcttgtggtctatcagcagacccacttaatatatgtaaaacgacggagggccggagccagtttatctctgaagataatatatcatctggtcggtgtcagctactaaaggaggatttgattaatgcaacggttgatgtgagtgacatctctgagtcatttgatagttgcccatattatctaagtgagcataccaaacatgctctaatgtcagcagcatttgtacatttacattgcaagaactacttcaagtttacaaaagatatatcttctcttagtcaacgagtgctgctatctggcccaacaggaactgatatgtatcaagaatatctggtgaaggcccttgcaaagtattttggtgctagattgctcactatagattcttccatgctgtttgggggcaaacttccaaggaatcagaatcatacaaaaagggtgatagagtgaggtatattggctcaggcattatccttgatggacagagccctccagattttggttcacagggtgaaatatttcttccttttgaagaaaacagatcatcaaaggttggtgtaaggtttgataaaaaaattctgggaggaaacaatcttggaggcaattgtgaagttgatcatgttgattctttatgccccgacattccaggatgggaggttacgttcaaacatccatttgatgtgatagttgagtttatctctgaagaaattcggcatggccctttaatcctttttctgaaggacacagagaaaatttgtgggaataatgattcctatcatggtctgaagagcaagctaaaacattttccagctggcgcttttataattggatctcaaatccagcctgacaatcgcaaagagaaggcaaatgttagttctccttttctttcgaagttccggtacagccaagctatacttggcctcacattacaggacattgatgggggaaatgataataataaagaaacatcaaaggcaataatgaagcatttgatcaaacttttcccgaataaagtgacacttgaggcaccacaagctgaaatggagctttcacggtggaaccagatgttaaaccgagatattgaagtccttaaaggaaatgcaaacatttcaaaaatacgctcttttctaacaaggcttggattggaatgcactgaccctgaagcgatattggtcacggatcgcattcttacaaatgagtgtattgataaaataattggttttgctttgagccatcaacttaagaactgtacaaatccagacccccctttgggtagtgtgcagtttgctctatccagcggaagtcttaagcatggcgttgacatgttgaaaagtatccagtctggctcgaagagcagcaccaaaaggaaatcacttaaggatattgctactgaaaacgaatttgaaaagagccttcttgctgatgtcacccctccacatgaaattggtgttacctttgaggacattggagctttagaaagtgtcaaagatactctgaaggagttggtgatgcttcctttgcaaagacccgaacttttcaaccgaggacaacttatgaagccatgtaaaggaattttactttttggcccacctggtacggggaagacaaatgctggctaaggctgtggcaactgaggctggtgctaatttcataaacatatcgatgtcaagcatctcttcaaagtggcttggtgaaggagaaaaatttgtgaaagctgtgttttcactggcaagtaaaattgctccaagtgtaatttttgtggacgaggttgatggtgaatttgccagatgcatcaaataggagaaaaattcttagtgtaatactagccaaggaagatttggcagacgacgttgatctagaaactatagctaacctgacagaagggtactcaggcagtgatctcaagaatctgtgtgttactgctgcacaccgtcctattagggagattcttgaaaaggaaaagaaggagagagcttcagcagaagcagaaaatagatcattgcctccgtcacacactagcaatgatgtccgtgcattaagaacaagtgatttcatacatgcgcatgaacaggtgtgtgcaagtgttccctcggattccagtaacatgagcgagcttgtgcaatggaatgatctctatggagaaggcggatcaaggaaaaagacaacgctaagctacttcatgtagcttaggttataaatatattgggagaagtgccctggcacaaagcagcaatagttggaggcggtgcagttggaaaaaaaaagctatgctcatctgccagacatccatatcaaagagaattgatggttcaggtggagcggaatagaatggaatggaatagtatacatacacatggttgctgcctctgctctgggccatgcatcatgcatctggacaggacggctatcctggcttgcagttgccctatgcagttttgagtgcaatggtcaccatctgtgaagcacggataccacagagatcctggccccaaccactcttttcacaaatggagctgaggacctttggagttctaccaaaagtgatcttaaatctttgttctttgactttccgttttgtgaacggaaggccccactctgctagtatggattgttgatcctccgtttctctggtactgactgaactgctcatacaaaactcgttcaacaggcagaaatgctgcctggtggccttctagagtgcttctttgacgccgcagagagcacatcaaaaaaaatgtgtttgtttcgaacgatttgtgctgcattccattcacggcgatatcaggtgccgttgtttgtgtttggttccgcaatcaagggagtgaaagccattagcacatccaatcaaacaaatagcgatatctctttcactgtaccagttagcgctggtctcggatgctattaacattgctgttgtctgtctcggaaccaaacaccgcctaactcgtcggctgttaaatatttctgaactgaattactgcacttggttggggtttcatgcttatcaagttggcttatatagccaacaatactttgtgcagttctgcatcctctgcctgcttatgcgcgatctcattggctgagcggtacgaagataaaacggtagctaatccgaagcgatggcttctctttttctttctacggtattttgtctctatgaattacagttacagcagtcagaacagctgatttaaaaccgcagcgaaaaggctgattgccttgcccatttttgggtgggtggaggttaatacagatttctgtaatttttttactttaatattgtttgacatattgtgcaaggcaaatgatttcctaatgatttgttctacttgatattgtaatccatattgacctatatgctatgctcagttccttagagcatctccagtacttgatattgtaatccatattgacctaggggaaaaaaaggagaatttaacctgatgacactggtggactatgctatgctcagttccttggaacatctctagtagttttgtaaaaaaatctctctaaagacagatgtaaggagttgctacataataatagggagtaaaaatatctgtactctcatgtagtctttatttttagttaccaaatattataaattatgcctgc

SEQ ID NO: 83967 - DNA, 4117 bp, Zea Mays
cttcaatgttccatacttccattgttatcgcttttatgcatatgctactgtataaaacaccctaccctttctatttacggtgcgattttcacaattggtcatggagcgcatcatgatttcagactggatgaatcatccactgcctcatctgtttgtagactgaagcaagctaagcgaggtgcactccttgaaatctttgaatccaaagttgttcgtgtaaacgggaaatctttggacaaggctgccaaggttaccttaaatggaggagatgaaattatcttctgttcaccagtgagatatttgagcaacttcatgaggagaaatcaagcacttcagtgttatcttccacttgcacttgcagtagtatccagctggggcaacactcacatttcaatgatattcaggatcatgtgtcatctaaagggcgcaaagcctcatcctttctctttggaagaggtctatcagcagacccacttaatatatgtaaaacgacggagggccggagccagtttatctctgaagataatatatcatctggtcggtgtcagctactaaaggaggatttgattaatgcaacggttgatgtgagtgacatctctgagtcatttgatagttgcccatattatctaagtgagcataccaaacatgctctaatgtcagcagcatttgtacatttacattgcaagaactacttcaagtttacaaaagatatatcttctcttagtcaacgagtgctgctatctggcccaacaggaactgatatgtatcaagaatatctggtgaaggcccttgcaaagtattttggtgctagattgctcactatagattcttccatgctgtttggtgggcaaacttccaaggaatcagaatcatacaaaaagggtgatagagtgaggtatattggctcaggcattatccttgatggacagagccctccagattttggttcacagggtgaaatatttcttccttttgaagaaaacagatcatcaaaggttggtgtaaggtttgataaaaaaattctgggaggaaacaatcttggaggcaattgtgaagttgatcatggtttgttctgttctgttgattctttatgccccgacattccaggatgggaggttacgttcaaacatccatttgatgtgatagttgagtttatctctgaagaaattcggcatggccctttaatcctttttctgaaggacacagagaaaatttgtgggaataatgattcctatcatggtctgaagagcaagctaaaacattttccagctggcgcttttataattggatctcaaatccagcctgacaatcgcaaagagaaggcaaatgttagttctccttttctttcgaagttccggtacagccaagctatacttggcctcacattacaggacattgatgggggaaatgataataataaagaaacatcaaaggcaataatgaagcatttgatcaaacttttcccgaataaagtgacacttgaggcaccacaagctgaaatggagctttcacggtggaaccagatgttaaaccgagatattgaagtccttaaaggaaatgcaaacatttcaaaaatacgctcttttctaacaaggcttggattggaatgcactgaccctgaagcgatattggtcacggatcgcattcttacaaatgagtgtattgataaaataattggttttgctttgagccatcaacttaagaactgtacaaatccagacccccctttgggtagtgtgcagtttgctctatccagcggaagtcttaagcatggcgttgacatgttgaaaagtatccagtctggctcgaagagcagcaccaaaaggaaatcacttaaggatattgctactgaaaacgaatttgaaaagagccttcttgctgatgtcacccctccacatgaaattggtgttacctttgaggacattggagctttagaaagtgtcaaagatactctgaaggagttggtgatgcttcctttgcaaagacccgaacttttcaaccgaggacaacttatgaagccatgtaaaggaattttactttttggcccacctggtacggggaagacaaatgctggctaaggctgtggcaactgaggctggtgctaatttcataaacatatcgatgtcaagcatctcttcaaagtggcttggtgaaggagaaaaatttgtgaaagctgtgttttcactggcaagtaaaattgctccaagtgtaatttttgtggacgaggttgatggtgaatttgccagatgcatcaaataggagaaaaattcttagtgtaatactagccaaggaagatttggcagacgacgttgatctagaaactatagctaacctgacagaagggtactcaggcagtgatctcaagaatctgtgtgttactgctgcacaccgtcctattagggagattcttgaaaaggaaaagaaggaattgcaattgagtttcaagtggatttgctcacatgcaggagagagcttcagcagaagcagaaaatagatcattgcctccgtcacacactagcaatgatgtccgtgcattaagaacaagtgatttcatacatgcgcatgaacaggtgtgtgcaagtgttccctcggattccagtaacatgagcgagcttgtgcaatggaatgatctctatggagaaggcggatcaaggaaaaagacaacgctaagctacttcatgtagcttaggttataaatatattgggagaagtgccctggcacaaagcagcaatagttggaggcggtgcagttggaaaaaaaaagctatgctcatctgccagacatccatatcaaagagaattgatggttcaggtggagcggaatagaatggaatggaatagtatacatacacatggttgctgcctctgctctgggccatgcatcatgcatctggacaggacggctatcctggcttgcagttgccctatgcagttttgagtgcaatggtcaccatctgtgaagcacggataccacagagatcctggccccaaccactcttttcacaaatggagctgaggacctttggagttctaccaaaagtgatcttaaatctttgttctttgactttccgttttgtgaacggaaggccccactctgctagtatggattgttgatcctccgtttctctggtactgactgaactgctcatacaaaactcgttcaacaggcagaaatgctgcctggtggccttctagagtgcttctttgacgccgcagagagcacatcaaaaaaaatgtgtttgtttcgaacgatttgtgctgcattccattcacggcgatatcaggtgccgttgtttgtgtttggttccgcaatcaagggagtgaaagccattagcacatccaatcaaacaaatagcgatatctctttcactgtaccagttagcgctggtctcggatgctattaacattgctgttgtctgtctcggaaccaaacaccgcctaactcgtcggctgttaaatatttctgaactgaattactgcacttggttggggtttcatgcttatcaagttggcttatatagccaacaatactttgtgcagttctgcatcctctgcctgcttatgcgcgatctcattggctgagcggtacgaagataaaacggtagctaatccgaagcgatggcttctctttttctttctacggtattttgtctctatgaattacagttacagcagtcagaacagctgatttaaaaccgcagcgaaaaggctgattgccttgcccatttttgggtgggtggaggttaatacagatttctgtaatttttttactttaatattgtttgacatattgtgcaaggcaaatgatttcctaatgatttgttctacttgatattgtaatccatattgacctatatgctatgctcagttccttagagcatctccagtacttgatattgtaatccatattgacctaggggaaaaaaaggagaatttaacctgatgacactggtggactatgctatgctcagttccttggaacatctctagtagttttgtaaaaaaatctctctaaagacagatgtaaggagttgctacataataatagggagtaaaaatatctgtactctcatgtagtctttatttttagttaccaaatattataaattatgcctgc

SEQ ID NO: 83968 - DNA, 4459 bp, Zea Mays
atccttcggttttgtattcttcgcttcctttcgccttcctcttcgcctctctctcgtgttctggcgtcgccgtcgccgctggcgcgagatggtggagacgcggcgaagcgccgcggcgaagcgctcggcggcggtggtggaggaggagaagggctcgctggcatcgccagcgctggagcccgcggaggacgcgccggcgggtcttggagcgggtgacgatgtcgcgtcgtcgcagcccccgaagcgcgcgaaggttgggtgcacggagtcggataccgcgaagccgtcggtggcgccggctgccggcgctgttgcgggtccactgcccaacacggctgggctgcaggccaggaccggcgccatggacaagctggaggccttcttgaagtccaaggaggctcagtccaatccggccggtcataagcaggggactaatgataaagatttatcggcgaagatgaagagagtcatggatttgtcggaggatatatcggagaagataaagagaagcaaggataggttggctgtgttattgaataagccggctgcaggcaccagcaggcgtcaggagccctggtgcagactaatttcacaacattccatgcaccctaccctttctatttacggtgcgattttcacaattggtcatggagcgcatcatgatttcagactggatgaatcatccactgcctcatctgtttgtagactgaagcaagctaagcgaggtgcactccttgaaatctttgaatccaaagttgttcgtgtaaacgggaaatctttggacaaggctgccaaggttaccttaaatggaggagatgaaattatcttctgttcaccagtgaggcatgcttatatatttgagcaacttcatgaggagaaatcaagcacttcagtgttatcttccacttgcacttgcagtagtatccagctggggcaacactcacatttcaatgatattcaggatcatgtgtcatctaaagggcgcaaagcctcatcctttctctttggaagaggtcggtgttcattgttgtcttgtggtctatcagcagacccacttaatatatgtaaaacgacggagggccggagccagtttatctctgaagataatatatcatctggtcggtgtcagctactaaaggaggatttgattaatgcaacggttgatgtgagtgacatctctgagtcatttgatagttgcccatattatctaagtgagcataccaaacatgctctaatgtcagcagcatttgtacatttacattgcaagaactacttcaagtttacaaaagatatatcttctcttagtcaacgagtgctgctatctggcccaacaggaactgatatgtatcaagaatatctggtgaaggcccttgcaaagtattttggtgctagattgctcactatagattcttccatgctgtttggtgggcaaacttccaaggaatcagaatcatacaaaaagggtgatagagtgaggtatattggctcaggcattatccttgatggacagagccctccagattttggttcacagggtgaaatatttcttccttttgaagaaaacagatcatcaaaggttggtgtaaggtttgataaaaaaattctgggaggaaacaatcttggaggcaattgtgaagttgatcatggtttgttctgttctgttgattctttatgccccgacattccaggatgggaggttacgttcaaacatccatttgatgtgatagttgagtttatctctgaagaaattcggcatggccctttaatcctttttctgaaggacacagagaaaatttgtgggaataatgattcctatcatggtctgaagagcaagctaaaacattttccagctggcgcttttataattggatctcaaatccagcctgacaatcgcaaagagaaggcaaatgttagttctccttttctttcgaagttccggtacagccaagctatacttggcctcacattacaggacattgatgggggaaatgataataataaagaaacatcaaaggcaataatgaagcatttgatcaaacttttcccgaataaagtgacacttgaggcaccacaagctgaaatggagctttcacggtggaaccagatgttaaaccgagatattgaagtccttaaaggaaatgcaaacatttcaaaaatacgctcttttctaacaaggcttggattggaatgcactgaccctgaagcgatattggtcacggatcgcattcttacaaatgagtgtattgataaaataattggttttgctttgagccatcaacttaagaactgtacaaatccagacccccctttgggtagtgtgcagtttgctctatccagcggaagtcttaagcatggcgttgacatgttgaaaagtatccagtctggctcgaagagcagcaccaaaaggaaatcacttaaggatattgctactgaaaacgaatttgaaaagagccttcttgctgatgtcacccctccacatgaaattggtgttacctttgaggacattggagctttagaaagtgtcaaagatactctgaaggagttggtgatgcttcctttgcaaagacccgaacttttcaaccgaggacaacttatgaagccatgtaaaggaattttactttttggcccacctggtacggggaagacaaatgctggctaaggctgtggcaactgaggctggtgctaatttcataaacatatcgatgtcaagcatctcttcaaagtggcttggtgaaggagaaaaatttgtgaaagctgtgttttcactggcaagtaaaattgctccaagtgtaatttttgtggacgaggagagagcttcagcagaagcagaaaatagatcattgcctccgtcacacactagcaatgatgtccgtgcattaagaacaagtgatttcatacatgcgcatgaacaggtgtgtgcaagtgttccctcggattccagtaacatgagcgagcttgtgcaatggaatgatctctatggagaaggcggatcaaggaaaaagacaacgctaagctacttcatgtagcttaggttataaatatattgggagaagtgccctggcacaaagcagcaatagttggaggcggtgcagttggaaaaaaaaagctatgctcatctgccagacatccatatcaaagagaattgatggttcaggtggagcggaatagaatggaatggaatagtatacatacacatggttgctgcctctgctctgggccatgcatcatgcatctggacaggacggctatcctggcttgcagttgccctatgcagttttgagtgcaatggtcaccatctgtgaagcacggataccacagagatcctggccccaaccactcttttcacaaatggagctgaggacctttggagttctaccaaaagtgatcttaaatctttgttctttgactttccgttttgtgaacggaaggccccactctgctagtatggattgttgatcctccgtttctctggtactgactgaactgctcatacaaaactcgttcaacaggcagaaatgctgcctggtggccttctagagtgcttctttgacgccgcagagagcacatcaaaaaaaatgtgtttgtttcgaacgatttgtgctgcattccattcacggcgatatcaggtgccgttgtttgtgtttggttccgcaatcaagggagtgaaagccattagcacatccaatcaaacaaatagcgatatctctttcactgtaccagttagcgctggtctcggatgctattaacattgctgttgtctgtctcggaaccaaacaccgcctaactcgtcggctgttaaatatttctgaactgaattactgcacttggttggggtttcatgcttatcaagttggcttatatagccaacaatactttgtgcagttctgcatcctctgcctgcttatgcgcgatctcattggctgagcggtacgaagataaaacggtagctaatccgaagcgatggcttctctttttctttctacggtattttgtctctatgaattacagttacagcagtcagaacagctgatttaaaaccgcagcgaaaaggctgattgccttgcccatttttgggtgggtggaggttaatacagatttctgtaatttttttactttaatattgtttgacatattgtgcaaggcaaatgatttcctaatgatttgttctacttgatattgtaatccatattgacctatatgctatgctcagttccttagagcatctccagtacttgatattgtaatccatattgacctaggggaaaaaaaggagaatttaacctgatgacactggtggactatgctatgctcagttccttggaacatctctagtagttttgtaaaaaaatctctctaaagacagatgtaaggagttgctacataataatagggagtaaaaatatctgtactctcatgtagtctttatttttagttaccaaatattataaattatgcctgc

SEQ ID NO: 83969 - DNA, 4799 bp, Zea Mays
atccttcggttttgtattcttcgcttcctttcgccttcctcttcgcctctctctcgtgttctggcgtcgccgtcgccgctggcgcgagatggtggagacgcggcgaagcgccgcggcgaagcgctcggcggcggtggtggaggaggagaagggctcgctggcatcgccagcgctggagcccgcggaggacgcgccggcgggtcttggagcgggtgacgatgtcgcgtcgtcgcagcccccgaagcgcgcgaaggttgggtgcacggagtcggataccgcgaagccgtcggtggcgccggctgccggcgctgttgcgggtccactgcccaacacggctgggctgcaggccaggaccggcgccatggacaagctggaggccttcttgaagtccaaggaggctcagtccaatccggccggtcataagcaggggactaatgataaagatttatcggcgaagatgaagagagtcatggatttgtcggaggatatatcggagaagataaagagaagcaaggataggttggctgtgttattgaataagccggctgcaggcaccagcaggcgtcaggagccctggtgcagactaatttcacaacattccatggctgtatttgatgcgacgtttggctgcatttgttgggacgtttggctgcatttgttgggaaacttcaatgttccatacttccattgttatcgcttttatgcatatgctactgtataaaagtaggatttaaggtgcccttcacaccctaccctttctatttacggtgcgattttcacaattggtcatggagcgcatcatgatttcagactggatgaatcatccactgcctcatctgtttgtagactgaagcaagctaagcgaggtgcactccttgaaatctttgaatccaaagttgttcgtgtaaacgggaaatctttggacaaggctgccaaggttaccttaaatggaggagatgaaattatcttctgttcaccagtgaggcatgcttatatatttgagcaacttcatgaggagaaatcaagcacttcagtgttatcttccacttgcacttgcagtagtatccagctggggcaacactcacatttcaatgatattcaggatcatgtgtcatctaaagggcgcaaagcctcatcctttctctttggaagaggtcggtgttcattgttgtcttgtggtctatcagcagacccacttaatatatgtaaaacgacggagggccggagccagtttatctctgaagataatatatcatctggtcggtgtcagctactaaaggaggatttgattaatgcaacggttgatgtgagtgacatctctgagtcatttgatagttgcccatattatctaagtgagcataccaaacatgctctaatgtcagcagcatttgtacatttacattgcaagaactacttcaagtttacaaaagatatatcttctcttagtcaacgagtgctgctatctggcccaacaggaactgatatgtatcaagaatatctggtgaaggcccttgcaaagtattttggtgctagattgctcactatagattcttccatgctgtttggtgggcaaacttccaaggaatcagaatcatacaaaaagggtgatagagtgaggtatattggctcaggcattatccttgatggacagagccctccagattttggttcacagggtgaaatatttcttccttttgaagaaaacagatcatcaaaggttggtgtaaggtttgataaaaaaattctgggaggaaacaatcttggaggcaattgtgaagttgatcatggtttgttctgttctgttgattctttatgccccgacattccaggatgggaggttacgttcaaacatccatttgatgtgatagttgagtttatctctgaagaaattcggcatggccctttaatcctttttctgaaggacacagagaaaatttgtgggaataatgattcctatcatggtctgaagagcaagctaaaacattttccagctggcgcttttataattggatctcaaatccagcctgacaatcgcaaagagaaggcaaatgttagttctccttttctttcgaagttccggtacagccaagctatacttggcctcacattacaggacattgatgggggaaatgataataataaagaaacatcaaaggcaataatgaagcatttgatcaaacttttcccgaataaagtgacacttgaggcaccacaagctgaaatggagctttcacggtggaaccagatgttaaaccgagatattgaagtccttaaaggaaatgcaaacatttcaaaaatacgctcttttctaacaaggcttggattggaatgcactgaccctgaagcgatattggtcacggatcgcattcttacaaatgagtgtattgataaaataattggttttgctttgagccatcaacttaagaactgtacaaatccagacccccctttgggtagtgtgcagtttgctctatccagcggaagtcttaagcatggcgttgacatgttgaaaagtatccagtctggctcgaagagcagcaccaaaaggaaatcacttaaggatattgctactgaaaacgaatttgaaaagagccttcttgctgatgtcacccctccacatgaaattggtgttacctttgaggacattggagctttagaaagtgtcaaagatactctgaaggagttggtgatgcttcctttgcaaagacccgaacttttcaaccgaggacaacttatgaagccatgtaaaggaattttactttttggcccacctggtacggggaagacaaatgctggctaaggctgtggcaactgaggctggtgctaatttcataaacatatcgatgtcaagcatctcttcaaagtggcttggtgaaggagaaaaatttgtgaaagctgtgttttcactggcaagtaaaattgctccaagtgtaatttttgtggacgaggttgatggtgaatttgccagatgcatcaaataggagaaaaattcttagtgtaatactagccaaggaagatttggcagacgacgttgatctagaaactatagctaacctgacagaagggtactcaggcagtgatctcaagaatctgtgtgttactgctgcacaccgtcctattagggagattcttgaaaaggaaaagaaggagagagcttcagcagaagcagaaaatagatcattgcctccgtcacacactagcaatgatgtccgtgcattaagaacaagtgatttcatacatgcgcatgaacaggtgtgtgcaagtgttccctcggattccagtaacatgagcgagcttgtgcaatggaatgatctctatggagaaggcggatcaaggaaaaagacaacgctaagctacttcatgtagcttaggttataaatatattgggagaagtgccctggcacaaagcagcaatagttggaggcggtgcagttggaaaaaaaaagctatgctcatctgccagacatccatatcaaagagaattgatggttcaggtggagcggaatagaatggaatggaatagtatacatacacatggttgctgcctctgctctgggccatgcatcatgcatctggacaggacggctatcctggcttgcagttgccctatgcagttttgagtgcaatggtcaccatctgtgaagcacggataccacagagatcctggccccaaccactcttttcacaaatggagctgaggacctttggagttctaccaaaagtgatcttaaatctttgttctttgactttccgttttgtgaacggaaggccccactctgctagtatggattgttgatcctccgtttctctggtactgactgaactgctcatacaaaactcgttcaacaggcagaaatgctgcctggtggccttctagagtgcttctttgacgccgcagagagcacatcaaaaaaaatgtgtttgtttcgaacgatttgtgctgcattccattcacggcgatatcaggtgccgttgtttgtgtttggttccgcaatcaagggagtgaaagccattagcacatccaatcaaacaaatagcgatatctctttcactgtaccagttagcgctggtctcggatgctattaacattgctgttgtctgtctcggaaccaaacaccgcctaactcgtcggctgttaaatatttctgaactgaattactgcacttggttggggtttcatgcttatcaagttggcttatatagccaacaatactttgtgcagttctgcatcctctgcctgcttatgcgcgatctcattggctgagcggtacgaagataaaacggtagctaatccgaagcgatggcttctctttttctttctacggtattttgtctctatgaattacagttacagcagtcagaacagctgatttaaaaccgcagcgaaaaggctgattgccttgcccatttttgggtgggtggaggttaatacagatttctgtaatttttttactttaatattgtttgacatattgtgcaaggcaaatgatttcctaatgatttgttctacttgatattgtaatccatattgacctatatgctatgctcagttccttagagcatctccagtacttgatattgtaatccatattgacctaggggaaaaaaaggagaatttaacctgatgacactggtggactatgctatgctcagttccttggaacatctctagtagttttgtaaaaaaatctctctaaagacagatgtaaggagttgctacataataatagggagtaaaaatatctgtactctcatgtagtctttatttttagttaccaaatattataaattatgcctgc

SEQ ID NO: 83970 - DNA, 4643 bp, Zea Mays
atccttcggttttgtattcttcgcttcctttcgccttcctcttcgcctctctctcgtgttctggcgtcgccgtcgccgctggcgcgagatggtggagacgcggcgaagcgccgcggcgaagcgctcggcggcggtggtggaggaggagaagggctcgctggcatcgccagcgctggagcccgcggaggacgcgccggcgggtcttggagcgggtgacgatgtcgcgtcgtcgcagcccccgaagcgcgcgaaggttgggtgcacggagtcggataccgcgaagccgtcggtggcgccggctgccggcgctgttgcgggtccactgcccaacacggctgggctgcaggccaggaccggcgccatggacaagctggaggccttcttgaagtccaaggaggctcagtccaatccggccggtcataagcaggggactaatgataaagatttatcggcgaagatgaagagagtcatggatttgtcggaggatatatcggagaagataaagagaagcaaggataggttggctgtgttattgaataagccggctgcaggcaccagcaggcgtcaggagccctggtgcagactaatttcacaacattccatgcaccctaccctttctatttacggtgcgattttcacaattggtcatggagcgcatcatgatttcagactggatgaatcatccactgcctcatctgtttgtagactgaagcaagctaagcgaggtgcactccttgaaatctttgaatccaaagttgttcgtgtaaacgggaaatctttggacaaggctgccaaggttaccttaaatggaggagatgaaattatcttctgttcaccagtgaggcatgcttatatatttgagcaacttcatgaggagaaatcaagcacttcagtgttatcttccacttgcacttgcagtagtatccagctggggcaacactcacatttcaatgatattcaggatcatgtgtcatctaaagggcgcaaagcctcatcctttctctttggaagaggtcggtgttcattgttgtcttgtggtctatcagcagacccacttaatatatgtaaaacgacggagggccggagccagtttatctctgaagataatatatcatctggtcggtgtcagctactaaaggaggatttgattaatgcaacggttgatgtgagtgacatctctgagtcatttgatagttgcccatattatctaagtgagcataccaaacatgctctaatgtcagcagcatttgtacatttacattgcaagaactacttcaagtttacaaaagatatatcttctcttagtcaacgagtgctgctatctggcccaacaggaactgatatgtatcaagaatatctggtgaaggcccttgcaaagtattttggtgctagattgctcactatagattcttccatgctgtttggtgggcaaacttccaaggaatcagaatcatacaaaaagggtgatagagtgaggtatattggctcaggcattatccttgatggacagagccctccagattttggttcacagggtgaaatatttcttccttttgaagaaaacagatcatcaaaggttggtgtaaggtttgataaaaaaattctgggaggaaacaatcttggaggcaattgtgaagttgatcatgttgattctttatgccccgacattccaggatgggaggttacgttcaaacatccatttgatgtgatagttgagtttatctctgaagaaattcggcatggccctttaatcctttttctgaaggacacagagaaaatttgtgggaataatgattcctatcatggtctgaagagcaagctaaaacattttccagctggcgcttttataattggatctcaaatccagcctgacaatcgcaaagagaaggcaaatgttagttctccttttctttcgaagttccggtacagccaagctatacttggcctcacattacaggacattgatgggggaaatgataataataaagaaacatcaaaggcaataatgaagcatttgatcaaacttttcccgaataaagtgacacttgaggcaccacaagctgaaatggagctttcacggtggaaccagatgttaaaccgagatattgaagtccttaaaggaaatgcaaacatttcaaaaatacgctcttttctaacaaggcttggattggaatgcactgaccctgaagcgatattggtcacggatcgcattcttacaaatgagtgtattgataaaataattggttttgctttgagccatcaacttaagaactgtacaaatccagacccccctttgggtagtgtgcagtttgctctatccagcggaagtcttaagcatggcgttgacatgttgaaaagtatccagtctggctcgaagagcagcaccaaaaggaaatcacttaaggatattgctactgaaaacgaatttgaaaagagccttcttgctgatgtcacccctccacatgaaattggtgttacctttgaggacattggagctttagaaagtgtcaaagatactctgaaggagttggtgatgcttcctttgcaaagacccgaacttttcaaccgaggacaacttatgaagccatgtaaaggaattttactttttggcccacctggtacggggaagacaaatgctggctaaggctgtggcaactgaggctggtgctaatttcataaacatatcgatgtcaagcatctcttcaaagtggcttggtgaaggagaaaaatttgtgaaagctgtgttttcactggcaagtaaaattgctccaagtgtaatttttgtggacgaggttgatggtgaatttgccagatgcatcaaataggagaaaaattcttagtgtaatactagccaaggaagatttggcagacgacgttgatctagaaactatagctaacctgacagaagggtactcaggcagtgatctcaagaatctgtgtgttactgctgcacaccgtcctattagggagattcttgaaaaggaaaagaaggagagagcttcagcagaagcagaaaatagatcattgcctccgtcacacactagcaatgatgtccgtgcattaagaacaagtgatttcatacatgcgcatgaacaggtgtgtgcaagtgttccctcggattccagtaacatgagcgagcttgtgcaatggaatgatctctatggagaaggcggatcaaggaaaaagacaacgctaagctacttcatgtagcttaggttataaatatattgggagaagtgccctggcacaaagcagcaatagttggaggcggtgcagttggaaaaaaaaagctatgctcatctgccagacatccatatcaaagagaattgatggttcaggtggagcggaatagaatggaatggaatagtatacatacacatggttgctgcctctgctctgggccatgcatcatgcatctggacaggacggctatcctggcttgcagttgccctatgcagttttgagtgcaatggtcaccatctgtgaagcacggataccacagagatcctggccccaaccactcttttcacaaatggagctgaggacctttggagttctaccaaaagtgatcttaaatctttgttctttgactttccgttttgtgaacggaaggccccactctgctagtatggattgttgatcctccgtttctctggtactgactgaactgctcatacaaaactcgttcaacaggcagaaatgctgcctggtggccttctagagtgcttctttgacgccgcagagagcacatcaaaaaaaatgtgtttgtttcgaacgatttgtgctgcattccattcacggcgatatcaggtgccgttgtttgtgtttggttccgcaatcaagggagtgaaagccattagcacatccaatcaaacaaatagcgatatctctttcactgtaccagttagcgctggtctcggatgctattaacattgctgttgtctgtctcggaaccaaacaccgcctaactcgtcggctgttaaatatttctgaactgaattactgcacttggttggggtttcatgcttatcaagttggcttatatagccaacaatactttgtgcagttctgcatcctctgcctgcttatgcgcgatctcattggctgagcggtacgaagataaaacggtagctaatccgaagcgatggcttctctttttctttctacggtattttgtctctatgaattacagttacagcagtcagaacagctgatttaaaaccgcagcgaaaaggctgattgccttgcccatttttgggtgggtggaggttaatacagatttctgtaatttttttactttaatattgtttgacatattgtgcaaggcaaatgatttcctaatgatttgttctacttgatattgtaatccatattgacctatatgctatgctcagttccttagagcatctccagtacttgatattgtaatccatattgacctaggggaaaaaaaggagaatttaacctgatgacactggtggactatgctatgctcagttccttggaacatctctagtagttttgtaaaaaaatctctctaaagacagatgtaaggagttgctacataataatagggagtaaaaatatctgtactctcatgtagtctttatttttagttaccaaatattataaattatgcctgc

SEQ ID NO: 83971 - DNA, 4550 bp, Zea Mays
atccttcggttttgtattcttcgcttcctttcgccttcctcttcgcctctctctcgtgttctggcgtcgccgtcgccgctggcgcgagatggtggagacgcggcgaagcgccgcggcgaagcgctcggcggcggtggtggaggaggagaagggctcgctggcatcgccagcgctggagcccgcggaggacgcgccggcgggtcttggagcgggtgacgatgtcgcgtcgtcgcagcccccgaagcgcgcgaaggttgggtgcacggagtcggataccgcgaagccgtcggtggcgccggctgccggcgctgttgcgggtccactgcccaacacggctgggctgcaggccaggaccggcgccatggacaagctggaggccttcttgaagtccaaggaggctcagtccaatccggccggtcataagcaggggactaatgataaagatttatcggcgaagatgaagagagtcatggatttgtcggaggatatatcggagaagataaagagaagcaaggataggttggctgtgttattgaataagccggctgcaggcaccagcaggcgtcaggagccctggtgcagactaatttcacaacattccatgcaccctaccctttctatttacggtgcgattttcacaattggtcatggagcgcatcatgatttcagactggatgaatcatccactgcctcatctgtttgtagactgaagcaagctaagcgaggtgcactccttgaaatctttgaatccaaagttgttcgtgtaaacgggaaatctttggacaaggctgccaaggttaccttaaatggaggagatgaaattatcttctgttcaccagtgaggcatgcttatatatttgagcaacttcatgaggagaaatcaagcacttcagtgttatcttccacttgcacttgcagtagtatccagctggggcaacactcacatttcaatgatattcaggatcatgtgtcatctaaagggcgcaaagcctcatcctttctctttggaagaggtctatcagcagacccacttaatatatgtaaaacgacggagggccggagccagtttatctctgaagataatatatcatctggtcggtgtcagctactaaaggaggatttgattaatgcaacggttgatgtgagtgacatctctgagtcatttgatagttgcccatattatctaagtgagcataccaaacatgctctaatgtcagcagcatttgtacatttacattgcaagaactacttcaagtttacaaaagatatatcttctcttagtcaacgagtgctgctatctggcccaacaggaactgatatgtatcaagaatatctggtgaaggcccttgcaaagtattttggtgctagattgctcactatagattcttccatgctgtttggtgggcaaacttccaaggaatcagaatcatacaaaaagggtgatagagtgaggtatattggctcaggcattatccttgatggacagagccctccagattttggttcacagggtgaaatatttcttccttttgaagaaaacagatcatcaaaggttggtgtaaggtttgataaaaaaattctgggaggaaacaatcttggaggcaattgtgaagttgatcatggtttgttctgttctgttgattctttatgccccgacattccaggatgggaggttacgttcaaacatccatttgatgtgatagttgagtttatctctgaagaaattcggcatggccctttaatcctttttctgaaggacacagagaaaatttgtgggaataatgattcctatcatggtctgaagagcaagctaaaacattttccagctggcgcttttataattggatctcaaatccagcctgacaatcgcaaagagaaggcaaatgttagttctccttttctttcgaagttccggtacagccaagctatacttggcctcacattacaggacattgatgggggaaatgataataataaagaaacatcaaaggcaataatgaagcatttgatcaaacttttcccgaataaagtgacacttgaggcaccacaagctgaaatggagctttcacggtggaaccagatgttaaaccgagatattgaagtccttaaaggaaatgcaaacatttcaaaaatacgctcttttctaacaaggcttggattggaatgcactgaccctgaagcgatattggtcacggatcgcattcttacaaatgagtgtattgataaaataattggttttgctttgagccatcaacttaagaactgtacaaatccagacccccctttgggtagtgtgcagtttgctctatccagcggaagtcttaagcatggcgttgacatgttgaaaagtatccagtctggctcgaagagcagcaccaaaaggaaatcacttaaggatattgctactgaaaacgaatttgaaaagagccttcttgctgatgtcacccctccacatgaaattggtgttacctttgaggacattggagctttagaaagtgtcaaagatactctgaaggagttggtgatgcttcctttgcaaagacccgaacttttcaaccgaggacaacttatgaagccatgtaaaggaattttactttttggcccacctggtacggggaagacaaatgctggctaaggctgtggcaactgaggctggtgctaatttcataaacatatcgatgtcaagcatctcttcaaaggttgatggtgaatttgccagatgcatcaaataggagaaaaattcttagtgtaatactagccaaggaagatttggcagacgacgttgatctagaaactatagctaacctgacagaagggtactcaggcagtgatctcaagaatctgtgtgttactgctgcacaccgtcctattagggagattcttgaaaaggaaaagaaggagagagcttcagcagaagcagaaaatagatcattgcctccgtcacacactagcaatgatgtccgtgcattaagaacaagtgatttcatacatgcgcatgaacaggtgtgtgcaagtgttccctcggattccagtaacatgagcgagcttgtgcaatggaatgatctctatggagaaggcggatcaaggaaaaagacaacgctaagctacttcatgtagcttaggttataaatatattgggagaagtgccctggcacaaagcagcaatagttggaggcggtgcagttggaaaaaaaaagctatgctcatctgccagacatccatatcaaagagaattgatggttcaggtggagcggaatagaatggaatggaatagtatacatacacatggttgctgcctctgctctgggccatgcatcatgcatctggacaggacggctatcctggcttgcagttgccctatgcagttttgagtgcaatggtcaccatctgtgaagcacggataccacagagatcctggccccaaccactcttttcacaaatggagctgaggacctttggagttctaccaaaagtgatcttaaatctttgttctttgactttccgttttgtgaacggaaggccccactctgctagtatggattgttgatcctccgtttctctggtactgactgaactgctcatacaaaactcgttcaacaggcagaaatgctgcctggtggccttctagagtgcttctttgacgccgcagagagcacatcaaaaaaaatgtgtttgtttcgaacgatttgtgctgcattccattcacggcgatatcaggtgccgttgtttgtgtttggttccgcaatcaagggagtgaaagccattagcacatccaatcaaacaaatagcgatatctctttcactgtaccagttagcgctggtctcggatgctattaacattgctgttgtctgtctcggaaccaaacaccgcctaactcgtcggctgttaaatatttctgaactgaattactgcacttggttggggtttcatgcttatcaagttggcttatatagccaacaatactttgtgcagttctgcatcctctgcctgcttatgcgcgatctcattggctgagcggtacgaagataaaacggtagctaatccgaagcgatggcttctctttttctttctacggtattttgtctctatgaattacagttacagcagtcagaacagctgatttaaaaccgcagcgaaaaggctgattgccttgcccatttttgggtgggtggaggttaatacagatttctgtaatttttttactttaatattgtttgacatattgtgcaaggcaaatgatttcctaatgatttgttctacttgatattgtaatccatattgacctatatgctatgctcagttccttagagcatctccagtacttgatattgtaatccatattgacctaggggaaaaaaaggagaatttaacctgatgacactggtggactatgctatgctcagttccttggaacatctctagtagttttgtaaaaaaatctctctaaagacagatgtaaggagttgctacataataatagggagtaaaaatatctgtactctcatgtagtctttatttttagttaccaaatattataaattatgcctgc

SEQ ID NO: 83972 - DNA, 4809 bp, Zea Mays
atccttcggttttgtattcttcgcttcctttcgccttcctcttcgcctctctctcgtgttctggcgtcgccgtcgccgctggcgcgagatggtggagacgcggcgaagcgccgcggcgaagcgctcggcggcggtggtggaggaggagaagggctcgctggcatcgccagcgctggagcccgcggaggacgcgccggcgggtcttggagcgggtgacgatgtcgcgtcgtcgcagcccccgaagcgcgcgaaggttgggtgcacggagtcggataccgcgaagccgtcggtggcgccggctgccggcgctgttgcgggtccactgcccaacacggctgggctgcaggccaggaccggcgccatggacaagctggaggccttcttgaagtccaaggaggctcagtccaatccggccggtcataagcaggggactaatgataaagatttatcggcgaagatgaagagagtcatggatttgtcggaggatatatcggagaagataaagagaagcaaggataggttggctgtgttattgaataagccggctgcaggcaccagcaggcgtcaggagccctggtgcagactaatttcacaacattccatgcaccctaccctttctatttacggtgcgattttcacaattggtcatggagcgcatcatgatttcagactggatgaatcatccactgcctcatctgtttgtagactgaagcaagctaagttgttcgtgtaaacgggaaatctttggacaaggctgccaaggttaccttaaatggaggagatgaaattatcttctgttcaccagtgaggcatgcttatatatttgagcaacttcatgaggagaaatcaagcacttcagtgttatcttccacttgcacttgcagtagtatccagctggggcaacactcacatttcaatgatattcaggatcatgtgtcatctaaagggcgcaaagcctcatcctttctctttggaagaggtcggtgttcattgttgtcttgtggtctatcagcagacccacttaatatatgtaaaacgacggagggccggagccagtttatctctgaagataatatatcatctggtcggtgtcagctactaaaggaggatttgattaatgcaacggttgatgtgagtgacatctctgagtcatttgatagttgcccatattatctaagtgagcataccaaacatgctctaatgtcagcagcatttgtacatttacattgcaagaactacttcaagtttacaaaagatatatcttctcttagtcaacgagtgctgctatctggcccaacaggaactgatatgtatcaagaatatctggtgaaggcccttgcaaagtattttggtgctagattgctcactatagattcttccatgctgtttggtgggcaaacttccaaggaatcagaatcatacaaaaagggtgatagagtgaggtatattggctcaggcattatccttgatggacagagccctccagattttggttcacagggtgaaatatttcttccttttgaagaaaacagatcatcaaaggttggtgtaaggtttgataaaaaaattctgggaggaaacaatcttggaggcaattgtgaagttgatcatggtttgttctgttctgttgattctttatgccccgacattccaggatgggaggttacgttcaaacatccatttgatgtgatagttgagtttatctctgaagaaattcggcatggccctttaatcctttttctgaaggacacagagaaaatttgtgggaataatgattcctatcatggtctgaagagcaagctaaaacattttccagctggcgcttttataattggatctcaaatccagcctgacaatcgcaaagagaaggcaaatgttagttctccttttctttcgaagttccggtacagccaagctatacttggcctcacattacaggacattgatgggggaaatgataataataaagaaacatcaaaggcaataatgaagcatttgatcaaacttttcccgaataaagtgacacttgaggcaccacaagctgaaatggagctttcacggtggaaccagatgttaaaccgagatattgaagtccttaaaggaaatgcaaacatttcaaaaatacgctcttttctaacaaggcttggattggaatgcactgaccctgaagcgatattggtcacggatcgcattcttacaaatgagtgtattgataaaataattggttttgctttgagccatcaacttaagaactgtacaaatccagacccccctttgggtagtgtgcagtttgctctatccagcggaagtcttaagcatggcgttgacatgttgaaaagtatccagtctggctcgaagagcagcaccaaaaggaaatcacttaaggatattgctactgaaaacgaatttgaaaagagccttcttgctgatgtcacccctccacatgaaattggtgttacctttgaggacattggagctttagaaagtgtcaaagatactctgaaggagttggtgatgcttcctttgcaaagacccgaacttttcaaccgaggacaacttatgaagccatgtaaaggaattttactttttggcccacctggtacggggaagacaaatgctggctaaggctgtggcaactgaggctggtgctaatttcataaacatatcgatgtcaagcatctcttcaaagtggcttggtgaaggagaaaaatttgtgaaagctgtgttttcactggcaagtaaaattgctccaagtgtaatttttgtggacgaggttgatggcatgttgggaaggcgggagaaccctggagaacatgaagccatgcggaagatgaaaaatgagtttatggtgaactgggatggtctgagaacaagggagaaagaacgtgtattagtacttgctgcaactaacaggccatttgatcttgatgaggctgttgttaggcggcttccaaggaggttgatggtgaatttgccagatgcatcaaataggagaaaaattcttagtgtaatactagccaaggaagatttggcagacgacgttgatctagaaactatagctaacctgacagaagggtactcaggcagtgatctcaagaatctgtgtgttactgctgcacaccgtcctattagggagattcttgaaaaggaaaagaaggagagagcttcagcagaagcagaaaatagatcattgcctccgtcacacactagcaatgatgtccgtgcattaagaacaagtgatttcatacatgcgcatgaacaggtgtgtgcaagtgttccctcggattccagtaacatgagcgagcttgtgcaatggaatgatctctatggagaaggcggatcaaggaaaaagacaacgctaagctacttcatgtagcttaggttataaatatattgggagaagtgccctggcacaaagcagcaatagttggaggcggtgcagttggaaaaaaaaagctatgctcatctgccagacatccatatcaaagagaattgatggttcaggtggagcggaatagaatggaatggaatagtatacatacacatggttgctgcctctgctctgggccatgcatcatgcatctggacaggacggctatcctggcttgcagttgccctatgcagttttgagtgcaatggtcaccatctgtgaagcacggataccacagagatcctggccccaaccactcttttcacaaatggagctgaggacctttggagttctaccaaaagtgatcttaaatctttgttctttgactttccgttttgtgaacggaaggccccactctgctagtatggattgttgatcctccgtttctctggtactgactgaactgctcatacaaaactcgttcaacaggcagaaatgctgcctggtggccttctagagtgcttctttgacgccgcagagagcacatcaaaaaaaatgtgtttgtttcgaacgatttgtgctgcattccattcacggcgatatcaggtgccgttgtttgtgtttggttccgcaatcaagggagtgaaagccattagcacatccaatcaaacaaatagcgatatctctttcactgtaccagttagcgctggtctcggatgctattaacattgctgttgtctgtctcggaaccaaacaccgcctaactcgtcggctgttaaatatttctgaactgaattactgcacttggttggggtttcatgcttatcaagttggcttatatagccaacaatactttgtgcagttctgcatcctctgcctgcttatgcgcgatctcattggctgagcggtacgaagataaaacggtagctaatccgaagcgatggcttctctttttctttctacggtattttgtctctatgaattacagttacagcagtcagaacagctgatttaaaaccgcagcgaaaaggctgattgccttgcccatttttgggtgggtggaggttaatacagatttctgtaatttttttactttaatattgtttgacatattgtgcaaggcaaatgatttcctaatgatttgttctacttgatattgtaatccatattgacctatatgctatgctcagttccttagagcatctccagtacttgatattgtaatccatattgacctaggggaaaaaaaggagaatttaacctgatgacactggtggactatgctatgctcagttccttggaacatctctagtagttttgtaaaaaaatctctctaaagacagatgtaaggagttgctacataataatagggagtaaaaatatctgtactctcatgtagtctttatttttagttaccaaatattataaattatgcctgc

SEQ ID NO: 83973 - DNA, 5108 bp, Zea Mays
atccttcggttttgtattcttcgcttcctttcgccttcctcttcgcctctctctcgtgttctggcgtcgccgtcgccgctggcgcgagatggtggagacgcggcgaagcgccgcggcgaagcgctcggcggcggtggtggaggaggagaagggctcgctggcatcgccagcgctggagcccgcggaggacgcgccggcgggtcttggagcgggtgacgatgtcgcgtcgtcgcagcccccgaagcgcgcgaaggttgggtgcacggagtcggataccgcgaagccgtcggtggcgccggctgccggcgctgttgcgggtccactgcccaacacggctgggctgcaggccaggaccggcgccatggacaagctggaggccttcttgaagtccaaggaggctcagtccaatccggccggtcataagcaggggactaatgataaagatttatcggcgaagatgaagagagtcatggatttgtcggaggatatatcggagaagataaagagaagcaaggataggttggctgtgttattgaataagccggctgcaggcaccagcaggcgtcaggagccctggtgcagactaatttcacaacattccatgcaccctaccctttctatttacggtgcgattttcacaattggtcatggagcgcatcatgatttcagactggatgaatcatccactgcctcatctgtttgtagactgaagcaagctaagcgaggtgcactccttgaaatctttgaatccaaagttgttcgtgtaaacgggaaatctttggacaaggctgccaaggttaccttaaatggaggagatgaaattatcttctgttcaccagtgaggcatgcttatatatttgagcaacttcatgaggagaaatcaagcacttcagtgttatcttccacttgcacttgcagtagtatccagctggggcaacactcacatttcaatgatattcaggatcatgtgtcatctaaagggcgcaaagcctcatcctttctctttggaagaggtctatcagcagacccacttaatatatgtaaaacgacggagggccggagccagtttatctctgaagataatatatcatctggtcggtgtcagctactaaaggaggatttgattaatgcaacggttgatgtgagtgacatctctgagtcatttgatagttgcccatattatctaagtgagcataccaaacatgctctaatgtcagcagcatttgtacatttacattgcaagaactacttcaagtttacaaaagatatatcttctcttagtcaacgagtgctgctatctggcccaacaggaactgatatgtatcaagaatatctggtgaaggcccttgcaaagtattttggtgctagattgctcactatagattcttccatgctgtttggtgtaagatcatgagctattatgtttattcttcttcgttctaattgtgacaatcataactacgatgtttccaaatctatggcttaacatcatgagttcgtgacatgactgtactctctttatcttatcattctgtacctgcttttcatcttattattctatctatactgatggtcttgtcatcttactctgtactatgttggaaaagaaaaaaccctgctttgactgtgcactttatgagttctctgtttatttgctggtacttggtactcatttatattttgttgttcaggggcaaacttccaaggaatcagaatcatacaaaaagggtgatagagtgaggtatattggctcaggcattatccttgatggacagagccctccagattttggttcacagggtgaaatatttcttccttttgaagaaaacagatcatcaaaggttggtgtaaggtttgataaaaaaattctgggaggaaacaatcttggaggcaattgtgaagttgatcatggtttgttctgttctgttgattctttatgccccgacattccaggatgggaggttacgttcaaacatccatttgatgtgatagttgagtttatctctgaagaaattcggcatggccctttaatcctttttctgaaggacacagagaaaatttgtgggaataatgattcctatcatggtctgaagagcaagctaaaacattttccagctggcgcttttataattggatctcaaatccagcctgacaatcgcaaagagaaggcaaatgttagttctccttttctttcgaagttccggtacagccaagctatacttggcctcacattacaggacattgatgggggaaatgataataataaagaaacatcaaaggcaataatgaagcatttgatcaaacttttcccgaataaagtgacacttgaggcaccacaagctgaaatggagctttcacggtggaaccagatgttaaaccgagatattgaagtccttaaaggaaatgcaaacatttcaaaaatacgctcttttctaacaaggcttggattggaatgcactgaccctgaagcgatattggtcacggatcgcattcttacaaatgagtgtattgataaaataattggttttgctttgagccatcaacttaagaactgtacaaatccagacccccctttgggtagtgtgcagtttgctctatccagcggaagtcttaagcatggcgttgacatgttgaaaagtatccagtctggctcgaagagcagcaccaaaaggaaatcacttaaggatattgctactgaaaacgaatttgaaaagagccttcttgctgatgtcacccctccacatgaaattggtgttacctttgaggacattggagctttagaaagtgtcaaagatactctgaaggagttggtgatgcttcctttgcaaagacccgaacttttcaaccgaggacaacttatgaagccatgtaaaggaattttactttttggcccacctggtacggggaagacaaatgctggctaaggctgtggcaactgaggctggtgctaatttcataaacatatcgatgtcaagcatctcttcaaagtggcttggtgaaggagaaaaatttgtgaaagctgtgttttcactggcaagtaaaattgctccaagtgtaatttttgtggacgaggttgatggcatgttgggaaggcgggagaaccctggagaacatgaagccatgcggaagatgaaaaatgagtttatggtgaactgggatggtctgagaacaagggagaaagaacgtgtattagtacttgctgcaactaacaggccatttgatcttgatgaggctgttgttaggcggcttccaaggaggttgatggtgaatttgccagatgcatcaaataggagaaaaattcttagtgtaatactagccaaggaagatttggcagacgacgttgatctagaaactatagctaacctgacagaagggtactcaggcagtgatctcaagaatctgtgtgttactgctgcacaccgtcctattagggagattcttgaaaaggaaaagaaggagagagcttcagcagaagcagaaaatagatcattgcctccgtcacacactagcaatgatgtccgtgcattaagaacaagtgatttcatacatgcgcatgaacaggtgtgtgcaagtgttccctcggattccagtaacatgagcgagcttgtgcaatggaatgatctctatggagaaggcggatcaaggaaaaagacaacgctaagctacttcatgtagcttaggttataaatatattgggagaagtgccctggcacaaagcagcaatagttggaggcggtgcagttggaaaaaaaaagctatgctcatctgccagacatccatatcaaagagaattgatggttcaggtggagcggaatagaatggaatggaatagtatacatacacatggttgctgcctctgctctgggccatgcatcatgcatctggacaggacggctatcctggcttgcagttgccctatgcagttttgagtgcaatggtcaccatctgtgaagcacggataccacagagatcctggccccaaccactcttttcacaaatggagctgaggacctttggagttctaccaaaagtgatcttaaatctttgttctttgactttccgttttgtgaacggaaggccccactctgctagtatggattgttgatcctccgtttctctggtactgactgaactgctcatacaaaactcgttcaacaggcagaaatgctgcctggtggccttctagagtgcttctttgacgccgcagagagcacatcaaaaaaaatgtgtttgtttcgaacgatttgtgctgcattccattcacggcgatatcaggtgccgttgtttgtgtttggttccgcaatcaagggagtgaaagccattagcacatccaatcaaacaaatagcgatatctctttcactgtaccagttagcgctggtctcggatgctattaacattgctgttgtctgtctcggaaccaaacaccgcctaactcgtcggctgttaaatatttctgaactgaattactgcacttggttggggtttcatgcttatcaagttggcttatatagccaacaatactttgtgcagttctgcatcctctgcctgcttatgcgcgatctcattggctgagcggtacgaagataaaacggtagctaatccgaagcgatggcttctctttttctttctacggtattttgtctctatgaattacagttacagcagtcagaacagctgatttaaaaccgcagcgaaaaggctgattgccttgcccatttttgggtgggtggaggttaatacagatttctgtaatttttttactttaatattgtttgacatattgtgcaaggcaaatgatttcctaatgatttgttctacttgatattgtaatccatattgacctatatgctatgctcagttccttagagcatctccagtacttgatattgtaatccatattgacctaggggaaaaaaaggagaatttaacctgatgacactggtggactatgctatgctcagttccttggaacatctctagtagttttgtaaaaaaatctctctaaagacagatgtaaggagttgctacataataatagggagtaaaaatatctgtactctcatgtagtctttatttttagttaccaaatattataaattatgcctgc

SEQ ID NO: 83974 - DNA, 4351 bp, Zea Mays
atccttcggttttgtattcttcgcttcctttcgccttcctcttcgcctctctctcgtgttctggcgtcgccgtcgccgctggcgcgagatggtggagacgcggcgaagcgccgcggcgaagcgctcggcggcggtggtggaggaggagaagggctcgctggcatcgccagcgctggagcccgcggaggacgcgccggcgggtcttggagcgggtgacgatgtcgcgtcgtcgcagcccccgaagcgcgcgaaggttgggtgcacggagtcggataccgcgaagccgtcggtggcgccggctgccggcgctgttgcgggtccactgcccaacacggctgggctgcaggccaggaccggcgccatggacaagctggaggccttcttgaagtccaaggaggctcagtccaatccggccggtcataagcaggggactaatgataaagatttatcggcgaagatgaagagagtcatggatttgtcggaggatatatcggagaagataaagagaagcaaggataggttggctgtgttattgaataagccggctgcaggcaccagcaggcgtcaggagccctggtgcagactaatttcacaacattccatgcaccctaccctttctatttacggtgcgattttcacaattggtcatggagcgcatcatgatttcagactggatgaatcatccactgcctcatctgtttgtagactgaagcaagctaagcgaggtgcactccttgaaatctttgaatccaaagttgttcgtgtaaacgggaaatctttggacaaggctgccaaggttaccttaaatggaggagatgaaattatcttctgttcaccagtgaggcatgcttatatatttgagcaacttcatgaggagaaatcaagcacttcagtgttatcttccacttgcacttgcagtagtatccagctggggcaacactcacatttcaatgatattcaggatcatgtgtcatctaaagggcgcaaagcctcatcctttctctttggaagaggtctatcagcagacccacttaatatatgtaaaacgacggagggccggagccagtttatctctgaagataatatatcatctggtcggtgtcagctactaaaggaggatttgattaatgcaacggttgatgtgagtgacatctctgagtcatttgatagttgcccatattatctaagtgagcataccaaacatgctctaatgtcagcagcatttgtacatttacattgcaagaactacttcaagtttacaaaagatatatcttctcttagtcaacgagtgctgctatctggcccaacaggaactgatatgtatcaagaatatctggtgaaggcccttgcaaagtattttggtgctagattgctcactatagattcttccatgctgtttggtgggcaaacttccaaggaatcagaatcatacaaaaagggtgatagagtgaggtatattggctcaggcattatccttgatggacagagccctccagattttggttcacagggtgaaatatttcttccttttgaagaaaacagatcatcaaaggttggtgtaaggtttgataaaaaaattctgggaggaaacaatcttggaggcaattgtgaagttgatcatggtttgttctgttctgttgattctttatgccccgacattccaggatgggaggttacgttcaaacatccatttgatgtgatagttgagtttatctctgaagaaattcggcatggccctttaatcctttttctgaaggacacagagaaaatttgtgggaataatgattcctatcatggtctgaagagcaagctaaaacattttccagctggcgcttttataattggatctcaaatccagcctgacaatcgcaaagagaaggcaaatgttagttctccttttctttcgaagttccggtacagccaagctatacttggcctcacattacaggacattgatgggggaaatgataataataaagaaacatcaaaggcaataatgaagcatttgatcaaacttttcccgaataaagtgacacttgaggcaccacaagctgaaatggagctttcacggtggaaccagatgttaaaccgagatattgaagtccttaaaggaaatgcaaacatttcaaaaatacgctcttttctaacaaggcttggattggaatgcactgaccctgaagcgatattggtcacggatcgcattcttacaaatgagtgtattgataaaataattggttttgctttgagccatcaacttaagaactgtacaaatccagacccccctttgggtagtgtgcagtttgctctatccagcggaagtcttaagcatggcgttgacatgttgaaaagtatccagtctggctcgaagagcagcaccaaaaggaaatcacttaaggatattgctactgaaaacgaatttgaaaagagccttcttgctgatgtcacccctccacatgaaattggtgttacctttgaggacattggagctttagaaagtgtcaaagatactctgaaggagttggtgatgcttcctttgcaaagacccgaacttttcaaccgaggacaacttatgaagccatgtaaaggaattttactttttggcccacctggtacggggaagacaaatgctggctaaggctgtggcaactgaggctggtgctaatttcataaacatatcgatgtcaagcatctcttcaaaggagagagcttcagcagaagcagaaaatagatcattgcctccgtcacacactagcaatgatgtccgtgcattaagaacaagtgatttcatacatgcgcatgaacaggtgtgtgcaagtgttccctcggattccagtaacatgagcgagcttgtgcaatggaatgatctctatggagaaggcggatcaaggaaaaagacaacgctaagctacttcatgtagcttaggttataaatatattgggagaagtgccctggcacaaagcagcaatagttggaggcggtgcagttggaaaaaaaaagctatgctcatctgccagacatccatatcaaagagaattgatggttcaggtggagcggaatagaatggaatggaatagtatacatacacatggttgctgcctctgctctgggccatgcatcatgcatctggacaggacggctatcctggcttgcagttgccctatgcagttttgagtgcaatggtcaccatctgtgaagcacggataccacagagatcctggccccaaccactcttttcacaaatggagctgaggacctttggagttctaccaaaagtgatcttaaatctttgttctttgactttccgttttgtgaacggaaggccccactctgctagtatggattgttgatcctccgtttctctggtactgactgaactgctcatacaaaactcgttcaacaggcagaaatgctgcctggtggccttctagagtgcttctttgacgccgcagagagcacatcaaaaaaaatgtgtttgtttcgaacgatttgtgctgcattccattcacggcgatatcaggtgccgttgtttgtgtttggttccgcaatcaagggagtgaaagccattagcacatccaatcaaacaaatagcgatatctctttcactgtaccagttagcgctggtctcggatgctattaacattgctgttgtctgtctcggaaccaaacaccgcctaactcgtcggctgttaaatatttctgaactgaattactgcacttggttggggtttcatgcttatcaagttggcttatatagccaacaatactttgtgcagttctgcatcctctgcctgcttatgcgcgatctcattggctgagcggtacgaagataaaacggtagctaatccgaagcgatggcttctctttttctttctacggtattttgtctctatgaattacagttacagcagtcagaacagctgatttaaaaccgcagcgaaaaggctgattgccttgcccatttttgggtgggtggaggttaatacagatttctgtaatttttttactttaatattgtttgacatattgtgcaaggcaaatgatttcctaatgatttgttctacttgatattgtaatccatattgacctatatgctatgctcagttccttagagcatctccagtacttgatattgtaatccatattgacctaggggaaaaaaaggagaatttaacctgatgacactggtggactatgctatgctcagttccttggaacatctctagtagttttgtaaaaaaatctctctaaagacagatgtaaggagttgctacataataatagggagtaaaaatatctgtactctcatgtagtctttatttttagttaccaaatattataaattatgcctgc

SEQ ID NO: 83975 - DNA, 4796 bp, Zea Mays
atccttcggttttgtattcttcgcttcctttcgccttcctcttcgcctctctctcgtgttctggcgtcgccgtcgccgctggcgcgagatggtggagacgcggcgaagcgccgcggcgaagcgctcggcggcggtggtggaggaggagaagggctcgctggcatcgccagcgctggagcccgcggaggacgcgccggcgggtcttggagcgggtgacgatgtcgcgtcgtcgcagcccccgaagcgcgcgaaggttgggtgcacggagtcggataccgcgaagccgtcggtggcgccggctgccggcgctgttgcgggtccactgcccaacacggctgggctgcaggccaggaccggcgccatggacaagctggaggccttcttgaagtccaaggaggctcagtccaatccggccggtcataagcaggggactaatgataaagatttatcggcgaagatgaagagagtcatggatttgtcggaggatatatcggagaagataaagagaagcaaggataggttggctgtgttattgaataagccggctgcaggcaccagcaggcgtcaggagccctggtgcagactaatttcacaacattccatgcaccctaccctttctatttacggtgcgattttcacaattggtcatggagcgcatcatgatttcagactggatgaatcatccactgcctcatctgtttgtagactgaagcaagctaagcgaggtgcactccttgaaatctttgaatccaaagttgttcgtgtaaacgggaaatctttggacaaggctgccaaggttaccttaaatggaggagatgaaattatcttctgttcaccagtgaggcatgcttatatatttgagcaacttcatgaggagaaatcaagcacttcagtgttatcttccacttgcacttgcagtagtatccagctggggcaacactcacatttcaatgatattcaggatcatgtgtcatctaaagggcgcaaagcctcatcctttctctttggaagaggtcggtgttcattgttgtcttgtggtctatcagcagacccacttaatatatgtaaaacgacggagggccggagccagtttatctctgaagataatatatcatctggtcggtgtcagctactaaaggaggatttgattaatgcaacggttgattgagcataccaaacatgctctaatgtcagcagcatttgtacatttacattgcaagaactacttcaagtttacaaaagatatatcttctcttagtcaacgagtgctgctatctggcccaacaggaactgatatgtatcaagaatatctggtgaaggcccttgcaaagtattttggtgctagattgctcactatagattcttccatgctgtttggtgggcaaacttccaaggaatcagaatcatacaaaaagggtgatagagtgaggtatattggctcaggcattatccttgatggacagagccctccagattttggttcacagggtgaaatatttcttccttttgaagaaaacagatcatcaaaggttggtgtaaggtttgataaaaaaattctgggaggaaacaatcttggaggcaattgtgaagttgatcatggtttgttctgttctgttgattctttatgccccgacattccaggatgggaggttacgttcaaacatccatttgatgtgatagttgagtttatctctgaagaaattcggcatggccctttaatcctttttctgaaggacacagagaaaatttgtgggaataatgattcctatcatggtctgaagagcaagctaaaacattttccagctggcgcttttataattggatctcaaatccagcctgacaatcgcaaagagaaggcaaatgttagttctccttttctttcgaagttccggtacagccaagctatacttggcctcacattacaggacattgatgggggaaatgataataataaagaaacatcaaaggcaataatgaagcatttgatcaaacttttcccgaataaagtgacacttgaggcaccacaagctgaaatggagctttcacggtggaaccagatgttaaaccgagatattgaagtccttaaaggaaatgcaaacatttcaaaaatacgctcttttctaacaaggcttggattggaatgcactgaccctgaagcgatattggtcacggatcgcattcttacaaatgagtgtattgataaaataattggttttgctttgagccatcaacttaagaactgtacaaatccagacccccctttgggtagtgtgcagtttgctctatccagcggaagtcttaagcatggcgttgacatgttgaaaagtatccagtctggctcgaagagcagcaccaaaaggaaatcacttaaggatattgctactgaaaacgaatttgaaaagagccttcttgctgatgtcacccctccacatgaaattggtgttacctttgaggacattggagctttagaaagtgtcaaagatactctgaaggagttggtgatgcttcctttgcaaagacccgaacttttcaaccgaggacaacttatgaagccatgtaaaggaattttactttttggcccacctggtacggggaagacaaatgctggctaaggctgtggcaactgaggctggtgctaatttcataaacatatcgatgtcaagcatctcttcaaagtggcttggtgaaggagaaaaatttgtgaaagctgtgttttcactggcaagtaaaattgctccaagtgtaatttttgtggacgaggttgatggcatgttgggaaggcgggagaaccctggagaacatgaagccatgcggaagatgaaaaatgagtttatggtgaactgggatggtctgagaacaagggagaaagaacgtgtattagtacttgctgcaactaacaggccatttgatcttgatgaggctgttgttaggcggcttccaaggaggttgatggtgaatttgccagatgcatcaaataggagaaaaattcttagtgtaatactagccaaggaagatttggcagacgacgttgatctagaaactatagctaacctgacagaagggtactcaggcagtgatctcaagaatctgtgtgttactgctgcacaccgtcctattagggagattcttgaaaaggaaaagaaggagagagcttcagcagaagcagaaaatagatcattgcctccgtcacacactagcaatgatgtccgtgcattaagaacaagtgatttcatacatgcgcatgaacaggtgtgtgcaagtgttccctcggattccagtaacatgagcgagcttgtgcaatggaatgatctctatggagaaggcggatcaaggaaaaagacaacgctaagctacttcatgtagcttaggttataaatatattgggagaagtgccctggcacaaagcagcaatagttggaggcggtgcagttggaaaaaaaaagctatgctcatctgccagacatccatatcaaagagaattgatggttcaggtggagcggaatagaatggaatggaatagtatacatacacatggttgctgcctctgctctgggccatgcatcatgcatctggacaggacggctatcctggcttgcagttgccctatgcagttttgagtgcaatggtcaccatctgtgaagcacggataccacagagatcctggccccaaccactcttttcacaaatggagctgaggacctttggagttctaccaaaagtgatcttaaatctttgttctttgactttccgttttgtgaacggaaggccccactctgctagtatggattgttgatcctccgtttctctggtactgactgaactgctcatacaaaactcgttcaacaggcagaaatgctgcctggtggccttctagagtgcttctttgacgccgcagagagcacatcaaaaaaaatgtgtttgtttcgaacgatttgtgctgcattccattcacggcgatatcaggtgccgttgtttgtgtttggttccgcaatcaagggagtgaaagccattagcacatccaatcaaacaaatagcgatatctctttcactgtaccagttagcgctggtctcggatgctattaacattgctgttgtctgtctcggaaccaaacaccgcctaactcgtcggctgttaaatatttctgaactgaattactgcacttggttggggtttcatgcttatcaagttggcttatatagccaacaatactttgtgcagttctgcatcctctgcctgcttatgcgcgatctcattggctgagcggtacgaagataaaacggtagctaatccgaagcgatggcttctctttttctttctacggtattttgtctctatgaattacagttacagcagtcagaacagctgatttaaaaccgcagcgaaaaggctgattgccttgcccatttttgggtgggtggaggttaatacagatttctgtaatttttttactttaatattgtttgacatattgtgcaaggcaaatgatttcctaatgatttgttctacttgatattgtaatccatattgacctatatgctatgctcagttccttagagcatctccagtacttgatattgtaatccatattgacctaggggaaaaaaaggagaatttaacctgatgacactggtggactatgctatgctcagttccttggaacatctctagtagttttgtaaaaaaatctctctaaagacagatgtaaggagttgctacataataatagggagtaaaaatatctgtactctcatgtagtctttatttttagttaccaaatattataaattatgcctgc

SEQ ID NO: 83976 - DNA, 4646 bp, Zea Mays
atccttcggttttgtattcttcgcttcctttcgccttcctcttcgcctctctctcgtgttctggcgtcgccgtcgccgctggcgcgagatggtggagacgcggcgaagcgccgcggcgaagcgctcggcggcggtggtggaggaggagaagggctcgctggcatcgccagcgctggagcccgcggaggacgcgccggcgggtcttggagcgggtgacgatgtcgcgtcgtcgcagcccccgaagcgcgcgaaggttgggtgcacggagtcggataccgcgaagccgtcggtggcgccggctgccggcgctgttgcgggtccactgcccaacacggctgggctgcaggccaggaccggcgccatggacaagctggaggccttcttgaagtccaaggaggctcagtccaatccggccggtcataagcaggggactaatgataaagatttatcggcgaagatgaagagagtcatggatttgtcggaggatatatcggagaagataaagagaagcaaggataggttggctgtgttattgaataagccggctgcaggcaccagcaggcgtcaggagccctggtgcagactaatttcacaacattccatgcaccctaccctttctatttacggtgcgattttcacaattggtcatggagcgcatcatgatttcagactggatgaatcatccactgcctcatctgtttgtagactgaagcaagctaagtagtatccagctggggcaacactcacatttcaatgatattcaggatcatgtgtcatctaaagggcgcaaagcctcatcctttctctttggaagaggtcggtgttcattgttgtcttgtggtctatcagcagacccacttaatatatgtaaaacgacggagggccggagccagtttatctctgaagataatatatcatctggtcggtgtcagctactaaaggaggatttgattaatgcaacggttgatgtgagtgacatctctgagtcatttgatagttgcccatattatctaagtgagcataccaaacatgctctaatgtcagcagcatttgtacatttacattgcaagaactacttcaagtttacaaaagatatatcttctcttagtcaacgagtgctgctatctggcccaacaggaactgatatgtatcaagaatatctggtgaaggcccttgcaaagtattttggtgctagattgctcactatagattcttccatgctgtttggtgggcaaacttccaaggaatcagaatcatacaaaaagggtgatagagtgaggtatattggctcaggcattatccttgatggacagagccctccagattttggttcacagggtgaaatatttcttccttttgaagaaaacagatcatcaaaggttggtgtaaggtttgataaaaaaattctgggaggaaacaatcttggaggcaattgtgaagttgatcatggtttgttctgttctgttgattctttatgccccgacattccaggatgggaggttacgttcaaacatccatttgatgtgatagttgagtttatctctgaagaaattcggcatggccctttaatcctttttctgaaggacacagagaaaatttgtgggaataatgattcctatcatggtctgaagagcaagctaaaacattttccagctggcgcttttataattggatctcaaatccagcctgacaatcgcaaagagaaggcaaatgttagttctccttttctttcgaagttccggtacagccaagctatacttggcctcacattacaggacattgatgggggaaatgataataataaagaaacatcaaaggcaataatgaagcatttgatcaaacttttcccgaataaagtgacacttgaggcaccacaagctgaaatggagctttcacggtggaaccagatgttaaaccgagatattgaagtccttaaaggaaatgcaaacatttcaaaaatacgctcttttctaacaaggcttggattggaatgcactgaccctgaagcgatattggtcacggatcgcattcttacaaatgagtgtattgataaaataattggttttgctttgagccatcaacttaagaactgtacaaatccagacccccctttgggtagtgtgcagtttgctctatccagcggaagtcttaagcatggcgttgacatgttgaaaagtatccagtctggctcgaagagcagcaccaaaaggaaatcacttaaggatattgctactgaaaacgaatttgaaaagagccttcttgctgatgtcacccctccacatgaaattggtgttacctttgaggacattggagctttagaaagtgtcaaagatactctgaaggagttggtgatgcttcctttgcaaagacccgaacttttcaaccgaggacaacttatgaagccatgtaaaggaattttactttttggcccacctggtacggggaagacaaatgctggctaaggctgtggcaactgaggctggtgctaatttcataaacatatcgatgtcaagcatctcttcaaagtggcttggtgaaggagaaaaatttgtgaaagctgtgttttcactggcaagtaaaattgctccaagtgtaatttttgtggacgaggttgatggcatgttgggaaggcgggagaaccctggagaacatgaagccatgcggaagatgaaaaatgagtttatggtgaactgggatggtctgagaacaagggagaaagaacgtgtattagtacttgctgcaactaacaggccatttgatcttgatgaggctgttgttaggcggcttccaaggaggttgatggtgaatttgccagatgcatcaaataggagaaaaattcttagtgtaatactagccaaggaagatttggcagacgacgttgatctagaaactatagctaacctgacagaagggtactcaggcagtgatctcaagaatctgtgtgttactgctgcacaccgtcctattagggagattcttgaaaaggaaaagaaggagagagcttcagcagaagcagaaaatagatcattgcctccgtcacacactagcaatgatgtccgtgcattaagaacaagtgatttcatacatgcgcatgaacaggtgtgtgcaagtgttccctcggattccagtaacatgagcgagcttgtgcaatggaatgatctctatggagaaggcggatcaaggaaaaagacaacgctaagctacttcatgtagcttaggttataaatatattgggagaagtgccctggcacaaagcagcaatagttggaggcggtgcagttggaaaaaaaaagctatgctcatctgccagacatccatatcaaagagaattgatggttcaggtggagcggaatagaatggaatggaatagtatacatacacatggttgctgcctctgctctgggccatgcatcatgcatctggacaggacggctatcctggcttgcagttgccctatgcagttttgagtgcaatggtcaccatctgtgaagcacggataccacagagatcctggccccaaccactcttttcacaaatggagctgaggacctttggagttctaccaaaagtgatcttaaatctttgttctttgactttccgttttgtgaacggaaggccccactctgctagtatggattgttgatcctccgtttctctggtactgactgaactgctcatacaaaactcgttcaacaggcagaaatgctgcctggtggccttctagagtgcttctttgacgccgcagagagcacatcaaaaaaaatgtgtttgtttcgaacgatttgtgctgcattccattcacggcgatatcaggtgccgttgtttgtgtttggttccgcaatcaagggagtgaaagccattagcacatccaatcaaacaaatagcgatatctctttcactgtaccagttagcgctggtctcggatgctattaacattgctgttgtctgtctcggaaccaaacaccgcctaactcgtcggctgttaaatatttctgaactgaattactgcacttggttggggtttcatgcttatcaagttggcttatatagccaacaatactttgtgcagttctgcatcctctgcctgcttatgcgcgatctcattggctgagcggtacgaagataaaacggtagctaatccgaagcgatggcttctctttttctttctacggtattttgtctctatgaattacagttacagcagtcagaacagctgatttaaaaccgcagcgaaaaggctgattgccttgcccatttttgggtgggtggaggttaatacagatttctgtaatttttttactttaatattgtttgacatattgtgcaaggcaaatgatttcctaatgatttgttctacttgatattgtaatccatattgacctatatgctatgctcagttccttagagcatctccagtacttgatattgtaatccatattgacctaggggaaaaaaaggagaatttaacctgatgacactggtggactatgctatgctcagttccttggaacatctctagtagttttgtaaaaaaatctctctaaagacagatgtaaggagttgctacataataatagggagtaaaaatatctgtactctcatgtagtctttatttttagttaccaaatattataaattatgcctgc

SEQ ID NO: 83977 - DNA, 4499 bp, Zea Mays
atccttcggttttgtattcttcgcttcctttcgccttcctcttcgcctctctctcgtgttctggcgtcgccgtcgccgctggcgcgagatggtggagacgcggcgaagcgccgcggcgaagcgctcggcggcggtggtggaggaggagaagggctcgctggcatcgccagcgctggagcccgcggaggacgcgccggcgggtcttggagcgggtgacgatgtcgcgtcgtcgcagcccccgaagcgcgcgaaggttgggtgcacggagtcggataccgcgaagccgtcggtggcgccggctgccggcgctgttgcgggtccactgcccaacacggctgggctgcaggccaggaccggcgccatggacaagctggaggccttcttgaagtccaaggaggctcagtccaatccggccggtcataagcaggggactaatgataaagatttatcggcgaagatgaagagagtcatggatttgtcggaggatatatcggagaagataaagagaagcaaggataggttggctgtgttattgaataagccggctgcaggcaccagcaggcgtcaggagccctggtgcagactaatttcacaacattccatgcaccctaccctttctatttacggtgcgattttcacaattggtcatggagcgcatcatgatttcagactggatgaatcatccactgcctcatctgtttgtagactgaagcaagctaagcgaggtgcactccttgaaatctttgaatccaaagttgttcgtgtaaacgggaaatctttggacaaggctgccaaggttaccttaaatggaggagatgaaattatcttctgttcaccagtgagtagtatccagctggggcaacactcacatttcaatgatattcaggatcatgtgtcatctaaagggcgcaaagcctcatcctttctctttggaagaggtcggtgttcattgttgtcttgtggtctatcagcagacccacttaatatatgtaaaacgacggagggccggagccagtttatctctgaagataatatatcatctggtcggtgtcagctactaaaggaggatttgattaatgcaacggttgatgtgagtgacatctctgagtcatttgatagttgcccatattatctaagtgagcataccaaacatgctctaatgtcagcagcatttgtacatttacattgcaagaactacttcaagtttacaaaagatatatcttctcttagtcaacgagtgctgctatctggcccaacaggaactgatatgtatcaagaatatctggtgaaggcccttgcaaagtattttggtgctagattgctcactatagattcttccatgctgtttggtgggcaaacttccaaggaatcagaatcatacaaaaagggtgatagagtgaggtatattggctcaggcattatccttgatggacagagccctccagattttggttcacagggtgaaatatttcttccttttgaagaaaacagatcatcaaaggttggtgtaaggtttgataaaaaaattctgggaggaaacaatcttggaggcaattgtgaagttgatcatggtttgttctgttctgttgattctttatgccccgacattccaggatgggaggttacgttcaaacatccatttgatgtgatagttgagtttatctctgaagaaattcggcatggccctttaatcctttttctgaaggacacagagaaaatttgtgggaataatgattcctatcatggtctgaagagcaagctaaaacattttccagctggcgcttttataattggatctcaaatccagcctgacaatcgcaaagagaaggcaaatgttagttctccttttctttcgaagttccggtacagccaagctatacttggcctcacattacaggacattgatgggggaaatgataataataaagaaacatcaaaggcaataatgaagcatttgatcaaacttttcccgaataaagtgacacttgaggcaccacaagctgaaatggagctttcacggtggaaccagatgttaaaccgagatattgaagtccttaaaggaaatgcaaacatttcaaaaatacgctcttttctaacaaggcttggattggaatgcactgaccctgaagcgatattggtcacggatcgcattcttacaaatgagtgtattgataaaataattggttttgctttgagccatcaacttaagaactgtacaaatccagacccccctttgggtagtgtgcagtttgctctatccagcggaagtcttaagcatggcgttgacatgttgaaaagtatccagtctggctcgaagagcagcaccaaaaggaaatcacttaaggatattgctactgaaaacgaatttgaaaagagccttcttgctgatgtcacccctccacatgaaattggtgttacctttgaggacattggagctttagaaagtgtcaaagatactctgaaggagttggtgatgcttcctttgcaaagacccgaacttttcaaccgaggacaacttatgaagccatgtaaaggaattttactttttggcccacctggtacggggaagacaaatgctggctaaggctgtggcaactgaggctggtgctaatttcataaacatatcgatgtcaagcatctcttcaaaggttgatggtgaatttgccagatgcatcaaataggagaaaaattcttagtgtaatactagccaaggaagatttggcagacgacgttgatctagaaactatagctaacctgacagaagggtactcaggcagtgatctcaagaatctgtgtgttactgctgcacaccgtcctattagggagattcttgaaaaggaaaagaaggagagagcttcagcagaagcagaaaatagatcattgcctccgtcacacactagcaatgatgtccgtgcattaagaacaagtgatttcatacatgcgcatgaacaggtgtgtgcaagtgttccctcggattccagtaacatgagcgagcttgtgcaatggaatgatctctatggagaaggcggatcaaggaaaaagacaacgctaagctacttcatgtagcttaggttataaatatattgggagaagtgccctggcacaaagcagcaatagttggaggcggtgcagttggaaaaaaaaagctatgctcatctgccagacatccatatcaaagagaattgatggttcaggtggagcggaatagaatggaatggaatagtatacatacacatggttgctgcctctgctctgggccatgcatcatgcatctggacaggacggctatcctggcttgcagttgccctatgcagttttgagtgcaatggtcaccatctgtgaagcacggataccacagagatcctggccccaaccactcttttcacaaatggagctgaggacctttggagttctaccaaaagtgatcttaaatctttgttctttgactttccgttttgtgaacggaaggccccactctgctagtatggattgttgatcctccgtttctctggtactgactgaactgctcatacaaaactcgttcaacaggcagaaatgctgcctggtggccttctagagtgcttctttgacgccgcagagagcacatcaaaaaaaatgtgtttgtttcgaacgatttgtgctgcattccattcacggcgatatcaggtgccgttgtttgtgtttggttccgcaatcaagggagtgaaagccattagcacatccaatcaaacaaatagcgatatctctttcactgtaccagttagcgctggtctcggatgctattaacattgctgttgtctgtctcggaaccaaacaccgcctaactcgtcggctgttaaatatttctgaactgaattactgcacttggttggggtttcatgcttatcaagttggcttatatagccaacaatactttgtgcagttctgcatcctctgcctgcttatgcgcgatctcattggctgagcggtacgaagataaaacggtagctaatccgaagcgatggcttctctttttctttctacggtattttgtctctatgaattacagttacagcagtcagaacagctgatttaaaaccgcagcgaaaaggctgattgccttgcccatttttgggtgggtggaggttaatacagatttctgtaatttttttactttaatattgtttgacatattgtgcaaggcaaatgatttcctaatgatttgttctacttgatattgtaatccatattgacctatatgctatgctcagttccttagagcatctccagtacttgatattgtaatccatattgacctaggggaaaaaaaggagaatttaacctgatgacactggtggactatgctatgctcagttccttggaacatctctagtagttttgtaaaaaaatctctctaaagacagatgtaaggagttgctacataataatagggagtaaaaatatctgtactctcatgtagtctttatttttagttaccaaatattataaattatgcctgc

SEQ ID NO: 83978 - DNA, 4735 bp, Zea Mays
atccttcggttttgtattcttcgcttcctttcgccttcctcttcgcctctctctcgtgttctggcgtcgccgtcgccgctggcgcgagatggtggagacgcggcgaagcgccgcggcgaagcgctcggcggcggtggtggaggaggagaagggctcgctggcatcgccagcgctggagcccgcggaggacgcgccggcgggtcttggagcgggtgacgatgtcgcgtcgtcgcagcccccgaagcgcgcgaaggttgggtgcacggagtcggataccgcgaagccgtcggtggcgccggctgccggcgctgttgcgggtccactgcccaacacggctgggctgcaggccaggaccggcgccatggacaagctggaggccttcttgaagtccaaggaggctcagtccaatccggccggtcataagcaggggactaatgataaagatttatcggcgaagatgaagagagtcatggatttgtcggaggatatatcggagaagataaagagaagcaaggataggttggctgtgttattgaataagccggctgcaggcaccagcaggcgtcaggagccctggtgcagactaatttcacaacattccatgcaccctaccctttctatttacggtgcgattttcacaattggtcatggagcgcatcatgatttcagactggatgaatcatccactgcctcatctgtttgtagactgaagcaagctaagcgaggtgcactccttgaaatctttgaatccaaagttgttcgtgtaaacgggaaatctttggacaaggctgccaaggttaccttaaatggaggagatgaaattatcttctgttcaccagtgaggcatgcttatatatttgagcaacttcatgaggagaaatcaagcacttcagtgttatcttccacttgcacttgcagtagtatccagctggggcaacactcacatttcaatgatattcaggatcatgtgtcatctaaagggcgcaaagcctcatcctttctctttggaagaggtctatcagcagacccacttaatatatgtaaaacgacggagggccggagccagtttatctctgaagataatatatcatctggtcggtgtcagctactaaaggaggatttgattaatgcaacggttgatgtgagtgacatctctgagtcatttgatagttgcccatattatctaagtgagcataccaaacatgctctaatgtcagcagcatttgtacatttacattgcaagaactacttcaagtttacaaaagatatatcttctcttagtcaacgagtgctgctatctggcccaacaggaactgatatgtatcaagaatatctggtgaaggcccttgcaaagtattttggtgctagattgctcactatagattcttccatgctgtttggtgggcaaacttccaaggaatcagaatcatacaaaaagggtgatagagtgaggtatattggctcaggcattatccttgatggacagagccctccagattttggttcacagggtgaaatatttcttccttttgaagaaaacagatcatcaaaggttggtgtaaggtttgataaaaaaattctgggaggaaacaatcttggaggcaattgtgaagttgatcatggtttgttctgttctgttgattctttatgccccgacattccaggatgggaggttacgttcaaacatccatttgatgtgatagttgagtttatctctgaagaaattcggcatggccctttaatcctttttctgaaggacacagagaaaatttgtgggaataatgattcctatcatggtctgaagagcaagctaaaacattttccagctggcgcttttataattggatctcaaatccagcctgacaatcgcaaagagaaggcaaatgttagttctccttttctttcgaagttccggtacagccaagctatacttggcctcacattacaggacattgatgggggaaatgataataataaagaaacatcaaaggcaataatgaagcatttgatcaaacttttcccgaataaagtgacacttgaggcaccacaagctgaaatggagctttcacggtggaaccagatgttaaaccgagatattgaagtccttaaaggaaatgcaaacatttcaaaaatacgctcttttctaacaaggcttggattggaatgcactgaccctgaagcgatattggtcacggatcgcattcttacaaatgagtgtattgataaaataattggttttgctttgagccatcaacttaagaactgtacaaatccagacccccctttgggtagtgtgcagtttgctctatccagcggaagtcttaagcatggcgttgacatgttgaaaagtatccagtctggctcgaagagcagcaccaaaaggaaatcacttaaggatattgctactgaaaacgaatttgaaaagagccttcttgctgatgtcacccctccacatgaaattggtgttacctttgaggacattggagctttagaaagtgtcaaagatactctgaaggagttggtgatgcttcctttgcaaagacccgaacttttcaaccgaggacaacttatgaagccatgtaaaggaattttactttttggcccacctggtacggggaagacaaatgctggctaaggctgtggcaactgaggctggtgctaatttcataaacatatcgatgtcaagcatctcttcaaaggttgatggcatgttgggaaggcgggagaaccctggagaacatgaagccatgcggaagatgaaaaatgagtttatggtgaactgggatggtctgagaacaagggagaaagaacgtgtattagtacttgctgcaactaacaggccatttgatcttgatgaggctgttgttaggcggcttccaaggaggttgatggtgaatttgccagatgcatcaaataggagaaaaattcttagtgtaatactagccaaggaagatttggcagacgacgttgatctagaaactatagctaacctgacagaagggtactcaggcagtgatctcaagaatctgtgtgttactgctgcacaccgtcctattagggagattcttgaaaaggaaaagaaggagagagcttcagcagaagcagaaaatagatcattgcctccgtcacacactagcaatgatgtccgtgcattaagaacaagtgatttcatacatgcgcatgaacaggtgtgtgcaagtgttccctcggattccagtaacatgagcgagcttgtgcaatggaatgatctctatggagaaggcggatcaaggaaaaagacaacgctaagctacttcatgtagcttaggttataaatatattgggagaagtgccctggcacaaagcagcaatagttggaggcggtgcagttggaaaaaaaaagctatgctcatctgccagacatccatatcaaagagaattgatggttcaggtggagcggaatagaatggaatggaatagtatacatacacatggttgctgcctctgctctgggccatgcatcatgcatctggacaggacggctatcctggcttgcagttgccctatgcagttttgagtgcaatggtcaccatctgtgaagcacggataccacagagatcctggccccaaccactcttttcacaaatggagctgaggacctttggagttctaccaaaagtgatcttaaatctttgttctttgactttccgttttgtgaacggaaggccccactctgctagtatggattgttgatcctccgtttctctggtactgactgaactgctcatacaaaactcgttcaacaggcagaaatgctgcctggtggccttctagagtgcttctttgacgccgcagagagcacatcaaaaaaaatgtgtttgtttcgaacgatttgtgctgcattccattcacggcgatatcaggtgccgttgtttgtgtttggttccgcaatcaagggagtgaaagccattagcacatccaatcaaacaaatagcgatatctctttcactgtaccagttagcgctggtctcggatgctattaacattgctgttgtctgtctcggaaccaaacaccgcctaactcgtcggctgttaaatatttctgaactgaattactgcacttggttggggtttcatgcttatcaagttggcttatatagccaacaatactttgtgcagttctgcatcctctgcctgcttatgcgcgatctcattggctgagcggtacgaagataaaacggtagctaatccgaagcgatggcttctctttttctttctacggtattttgtctctatgaattacagttacagcagtcagaacagctgatttaaaaccgcagcgaaaaggctgattgccttgcccatttttgggtgggtggaggttaatacagatttctgtaatttttttactttaatattgtttgacatattgtgcaaggcaaatgatttcctaatgatttgttctacttgatattgtaatccatattgacctatatgctatgctcagttccttagagcatctccagtacttgatattgtaatccatattgacctaggggaaaaaaaggagaatttaacctgatgacactggtggactatgctatgctcagttccttggaacatctctagtagttttgtaaaaaaatctctctaaagacagatgtaaggagttgctacataataatagggagtaaaaatatctgtactctcatgtagtctttatttttagttaccaaatattataaattatgcctgc

SEQ ID NO: 83979 - DNA, 4418 bp, Zea Mays
atccttcggttttgtattcttcgcttcctttcgccttcctcttcgcctctctctcgtgttctggcgtcgccgtcgccgctggcgcgagatggtggagacgcggcgaagcgccgcggcgaagcgctcggcggcggtggtggaggaggagaagggctcgctggcatcgccagcgctggagcccgcggaggacgcgccggcgggtcttggagcgggtgacgatgtcgcgtcgtcgcagcccccgaagcgcgcgaaggttgggtgcacggagtcggataccgcgaagccgtcggtggcgccggctgccggcgctgttgcgggtccactgcccaacacggctgggctgcaggccaggaccggcgccatggacaagctggaggccttcttgaagtccaaggaggctcagtccaatccggccggtcataagcaggggactaatgataaagatttatcggcgaagatgaagagagtcatggatttgtcggaggatatatcggagaagataaagagaagcaaggataggttggctgtgttattgaataagccggctgcaggcaccagcaggcgtcaggagccctggtgcagactaatttcacaacattccatgcaccctaccctttctatttacggtgcgattttcacaattggtcatggagcgcatcatgatttcagactggatgaatcatccactgcctcatctgtttgtagactgaagcaagctaagatatttgagcaacttcatgaggagaaatcaagcacttcagtgttatcttccacttgcacttgcagtagtatccagctggggcaacactcacatttcaatgatattcaggatcatgtgtcatctaaagggcgcaaagcctcatcctttctctttggaagaggtctatcagcagacccacttaatatatgtaaaacgacggagggccggagccagtttatctctgaagataatatatcatctggtcggtgtcagctactaaaggaggatttgattaatgcaacggttgatgtgagtgacatctctgagtcatttgatagttgcccatattatctaagtgagcataccaaacatgctctaatgtcagcagcatttgtacatttacattgcaagaactacttcaagtttacaaaagatatatcttctcttagtcaacgagtgctgctatctggcccaacaggaactgatatgtatcaagaatatctggtgaaggcccttgcaaagtattttggtgctagattgctcactatagattcttccatgctgtttggtgggcaaacttccaaggaatcagaatcatacaaaaagggtgatagagtgaggtatattggctcaggcattatccttgatggacagagccctccagattttggttcacagggtgaaatatttcttccttttgaagaaaacagatcatcaaaggttggtgtaaggtttgataaaaaaattctgggaggaaacaatcttggaggcaattgtgaagttgatcatggtttgttctgttctgttgattctttatgccccgacattccaggatgggaggttacgttcaaacatccatttgatgtgatagttgagtttatctctgaagaaattcggcatggccctttaatcctttttctgaaggacacagagaaaatttgtgggaataatgattcctatcatggtctgaagagcaagctaaaacattttccagctggcgcttttataattggatctcaaatccagcctgacaatcgcaaagagaaggcaaatgttagttctccttttctttcgaagttccggtacagccaagctatacttggcctcacattacaggacattgatgggggaaatgataataataaagaaacatcaaaggcaataatgaagcatttgatcaaacttttcccgaataaagtgacacttgaggcaccacaagctgaaatggagctttcacggtggaaccagatgttaaaccgagatattgaagtccttaaaggaaatgcaaacatttcaaaaatacgctcttttctaacaaggcttggattggaatgcactgaccctgaagcgatattggtcacggatcgcattcttacaaatgagtgtattgataaaataattggttttgctttgagccatcaacttaagaactgtacaaatccagacccccctttgggtagtgtgcagtttgctctatccagcggaagtcttaagcatggcgttgacatgttgaaaagtatccagtctggctcgaagagcagcaccaaaaggaaatcacttaaggatattgctactgaaaacgaatttgaaaagagccttcttgctgatgtcacccctccacatgaaattggtgttacctttgaggacattggagctttagaaagtgtcaaagatactctgaaggagttggtgatgcttcctttgcaaagacccgaacttttcaaccgaggacaacttatgaagccatgtaaaggaattttactttttggcccacctggtacggggaagacaaatgctggctaaggctgtggcaactgaggctggtgctaatttcataaacatatcgatgtcaagcatctcttcaaaggttgatggtgaatttgccagatgcatcaaataggagaaaaattcttagtgtaatactagccaaggaagatttggcagacgacgttgatctagaaactatagctaacctgacagaagggtactcaggcagtgatctcaagaatctgtgtgttactgctgcacaccgtcctattagggagattcttgaaaaggaaaagaaggagagagcttcagcagaagcagaaaatagatcattgcctccgtcacacactagcaatgatgtccgtgcattaagaacaagtgatttcatacatgcgcatgaacaggtgtgtgcaagtgttccctcggattccagtaacatgagcgagcttgtgcaatggaatgatctctatggagaaggcggatcaaggaaaaagacaacgctaagctacttcatgtagcttaggttataaatatattgggagaagtgccctggcacaaagcagcaatagttggaggcggtgcagttggaaaaaaaaagctatgctcatctgccagacatccatatcaaagagaattgatggttcaggtggagcggaatagaatggaatggaatagtatacatacacatggttgctgcctctgctctgggccatgcatcatgcatctggacaggacggctatcctggcttgcagttgccctatgcagttttgagtgcaatggtcaccatctgtgaagcacggataccacagagatcctggccccaaccactcttttcacaaatggagctgaggacctttggagttctaccaaaagtgatcttaaatctttgttctttgactttccgttttgtgaacggaaggccccactctgctagtatggattgttgatcctccgtttctctggtactgactgaactgctcatacaaaactcgttcaacaggcagaaatgctgcctggtggccttctagagtgcttctttgacgccgcagagagcacatcaaaaaaaatgtgtttgtttcgaacgatttgtgctgcattccattcacggcgatatcaggtgccgttgtttgtgtttggttccgcaatcaagggagtgaaagccattagcacatccaatcaaacaaatagcgatatctctttcactgtaccagttagcgctggtctcggatgctattaacattgctgttgtctgtctcggaaccaaacaccgcctaactcgtcggctgttaaatatttctgaactgaattactgcacttggttggggtttcatgcttatcaagttggcttatatagccaacaatactttgtgcagttctgcatcctctgcctgcttatgcgcgatctcattggctgagcggtacgaagataaaacggtagctaatccgaagcgatggcttctctttttctttctacggtattttgtctctatgaattacagttacagcagtcagaacagctgatttaaaaccgcagcgaaaaggctgattgccttgcccatttttgggtgggtggaggttaatacagatttctgtaatttttttactttaatattgtttgacatattgtgcaaggcaaatgatttcctaatgatttgttctacttgatattgtaatccatattgacctatatgctatgctcagttccttagagcatctccagtacttgatattgtaatccatattgacctaggggaaaaaaaggagaatttaacctgatgacactggtggactatgctatgctcagttccttggaacatctctagtagttttgtaaaaaaatctctctaaagacagatgtaaggagttgctacataataatagggagtaaaaatatctgtactctcatgtagtctttatttttagttaccaaatattataaattatgcctgc

SEQ ID NO: 83980 - DNA, 4687 bp, Zea Mays
atccttcggttttgtattcttcgcttcctttcgccttcctcttcgcctctctctcgtgttctggcgtcgccgtcgccgctggcgcgagatggtggagacgcggcgaagcgccgcggcgaagcgctcggcggcggtggtggaggaggagaagggctcgctggcatcgccagcgctggagcccgcggaggacgcgccggcgggtcttggagcgggtgacgatgtcgcgtcgtcgcagcccccgaagcgcgcgaaggttgggtgcacggagtcggataccgcgaagccgtcggtggcgccggctgccggcgctgttgcgggtccactgcccaacacggctgggctgcaggccaggaccggcgccatggacaagctggaggccttcttgaagtccaaggaggctcagtccaatccggccggtcataagcaggggactaatgataaagatttatcggcgaagatgaagagagtcatggatttgtcggaggatatatcggagaagataaagagaagcaaggataggttggctgtgttattgaataagccggctgcaggcaccagcaggcgtcaggagccctggtgcagactaatttcacaacattccatgcaccctaccctttctatttacggtgcgattttcacaattggtcatggagcgcatcatgatttcagactggatgaatcatccactgcctcatctgtttgtagactgaagcaagctaagatatttgagcaacttcatgaggagaaatcaagcacttcagtgttatcttccacttgcacttgcagtagtatccagctggggcaacactcacatttcaatgatattcaggatcatgtgtcatctaaagggcgcaaagcctcatcctttctctttggaagaggtctatcagcagacccacttaatatatgtaaaacgacggagggccggagccagtttatctctgaagataatatatcatctggtcggtgtcagctactaaaggaggatttgattaatgcaacggttgatgtgagtgacatctctgagtcatttgatagttgcccatattatctaagtgagcataccaaacatgctctaatgtcagcagcatttgtacatttacattgcaagaactacttcaagtttacaaaagatatatcttctcttagtcaacgagtgctgctatctggcccaacaggaactgatatgtatcaagaatatctggtgaaggcccttgcaaagtattttggtgctagattgctcactatagattcttccatgctgtttggtgggcaaacttccaaggaatcagaatcatacaaaaagggtgatagagtgaggtatattggctcaggcattatccttgatggacagagccctccagattttggttcacagggtgaaatatttcttccttttgaagaaaacagatcatcaaaggttggtgtaaggtttgataaaaaaattctgggaggaaacaatcttggaggcaattgtgaagttgatcatggtttgttctgttctgttgattctttatgccccgacattccaggatgggaggttacgttcaaacatccatttgatgtgatagttgagtttatctctgaagaaattcggcatggccctttaatcctttttctgaaggacacagagaaaatttgtgggaataatgattcctatcatggtctgaagagcaagctaaaacattttccagctggcgcttttataattggatctcaaatccagcctgacaatcgcaaagagaaggcaaatgttagttctccttttctttcgaagttccggtacagccaagctatacttggcctcacattacaggacattgatgggggaaatgataataataaagaaacatcaaaggcaataatgaagcatttgatcaaacttttcccgaataaagtgacacttgaggcaccacaagctgaaatggagctttcacggtggaaccagatgttaaaccgagatattgaagtccttaaaggaaatgcaaacatttcaaaaatacgctcttttctaacaaggcttggattggaatgcactgaccctgaagcgatattggtcacggatcgcattcttacaaatgagtgtattgataaaataattggttttgctttgagccatcaacttaagaactgtacaaatccagacccccctttgggtagtgtgcagtttgctctatccagcggaagtcttaagcatggcgttgacatgttgaaaagtatccagtctggctcgaagagcagcaccaaaaggaaatcacttaaggatattgctactgaaaacgaatttgaaaagagccttcttgctgatgtcacccctccacatgaaattggtgttacctttgaggacattggagctttagaaagtgtcaaagatactctgaaggagttggtgatgcttcctttgcaaagacccgaacttttcaaccgaggacaacttatgaagccatgtaaaggaattttactttttggcccacctggtacggggaagacaaatgctggctaaggctgtggcaactgaggctggtgctaatttcataaacatatcgatgtcaagcatctcttcaaagtggcttggtgaaggagaaaaatttgtgaaagctgtgttttcactggcaagtaaaattgctccaagtgtaatttttgtggacgaggttgatggcatgttgggaaggcgggagaaccctggagaacatgaagccatgcggaagatgaaaaatgagtttatggtgaactgggatggtctgagaacaagggagaaagaacgtgtattagtacttgctgcaactaacaggccatttgatcttgatgaggctgttgttaggcggcttccaaggaggttgatggtgaatttgccagatgcatcaaataggagaaaaattcttagtgtaatactagccaaggaagatttggcagacgacgttgatctagaaactatagctaacctgacagaagggtactcaggcagtgatctcaagaatctgtgtgttactgctgcacaccgtcctattagggagattcttgaaaaggaaaagaaggagagagcttcagcagaagcagaaaatagatcattgcctccgtcacacactagcaatgatgtccgtgcattaagaacaagtgatttcatacatgcgcatgaacaggtgtgtgcaagtgttccctcggattccagtaacatgagcgagcttgtgcaatggaatgatctctatggagaaggcggatcaaggaaaaagacaacgctaagctacttcatgtagcttaggttataaatatattgggagaagtgccctggcacaaagcagcaatagttggaggcggtgcagttggaaaaaaaaagctatgctcatctgccagacatccatatcaaagagaattgatggttcaggtggagcggaatagaatggaatggaatagtatacatacacatggttgctgcctctgctctgggccatgcatcatgcatctggacaggacggctatcctggcttgcagttgccctatgcagttttgagtgcaatggtcaccatctgtgaagcacggataccacagagatcctggccccaaccactcttttcacaaatggagctgaggacctttggagttctaccaaaagtgatcttaaatctttgttctttgactttccgttttgtgaacggaaggccccactctgctagtatggattgttgatcctccgtttctctggtactgactgaactgctcatacaaaactcgttcaacaggcagaaatgctgcctggtggccttctagagtgcttctttgacgccgcagagagcacatcaaaaaaaatgtgtttgtttcgaacgatttgtgctgcattccattcacggcgatatcaggtgccgttgtttgtgtttggttccgcaatcaagggagtgaaagccattagcacatccaatcaaacaaatagcgatatctctttcactgtaccagttagcgctggtctcggatgctattaacattgctgttgtctgtctcggaaccaaacaccgcctaactcgtcggctgttaaatatttctgaactgaattactgcacttggttggggtttcatgcttatcaagttggcttatatagccaacaatactttgtgcagttctgcatcctctgcctgcttatgcgcgatctcattggctgagcggtacgaagataaaacggtagctaatccgaagcgatggcttctctttttctttctacggtattttgtctctatgaattacagttacagcagtcagaacagctgatttaaaaccgcagcgaaaaggctgattgccttgcccatttttgggtgggtggaggttaatacagatttctgtaatttttttactttaatattgtttgacatattgtgcaaggcaaatgatttcctaatgatttgttctacttgatattgtaatccatattgacctatatgctatgctcagttccttagagcatctccagtacttgatattgtaatccatattgacctaggggaaaaaaaggagaatttaacctgatgacactggtggactatgctatgctcagttccttggaacatctctagtagttttgtaaaaaaatctctctaaagacagatgtaaggagttgctacataataatagggagtaaaaatatctgtactctcatgtagtctttatttttagttaccaaatattataaattatgcctgc

SEQ ID NO: 83981 - DNA, 4799 bp, Zea Mays
atccttcggttttgtattcttcgcttcctttcgccttcctcttcgcctctctctcgtgttctggcgtcgccgtcgccgctggcgcgagatggtggagacgcggcgaagcgccgcggcgaagcgctcggcggcggtggtggaggaggagaagggctcgctggcatcgccagcgctggagcccgcggaggacgcgccggcgggtcttggagcgggtgacgatgtcgcgtcgtcgcagcccccgaagcgcgcgaaggttgggtgcacggagtcggataccgcgaagccgtcggtggcgccggctgccggcgctgttgcgggtccactgcccaacacggctgggctgcaggccaggaccggcgccatggacaagctggaggccttcttgaagtccaaggaggctcagtccaatccggccggtcataagcaggggactaatgataaagatttatcggcgaagatgaagagagtcatggatttgtcggaggatatatcggagaagataaagagaagcaaggataggttggctgtgttattgaataagccggctgcaggcaccagcaggcgtcaggagccctggtgcagactaatttcacaacattccatgcaccctaccctttctatttacggtgcgattttcacaattggtcatggagcgcatcatgatttcagactggatgaatcatccactgcctcatctgtttgtagactgaagcaagctaagcgaggtgcactccttgaaatctttgaatccaaagttgttcgtgtaaacgggaaatctttggacaaggctgccaaggttaccttaaatggaggagatgaaattatcttctgttcaccagtgaggcatgcttatatatttgagcaacttcatgaggagaaatcaagcacttcagtgttatcttccacttgcacttgcagtagtatccagctggggcaacactcacatttcaatgatattcaggatcatgtgtcatctaaagggcgcaaagcctcatcctttctctttggaagaggtcggtgttcattgttgtcttgtggtctatcagcagacccacttaatatatgtaaaacgacggagggccggagccagtttatctctgaagataatatatcatctggtcggtgtcagctactaaaggaggatttgattaatgcaacggttgatgtgagtgacatctctgagtcatttgatagttgcccatattatctaagtgagcataccaaacatgctctaatgtcagcagcatttgtacatttacattgcaagaactacttcaagtttacaaaagatatatcttctcttagtcaacgagtgctgctatctggcccaacaggaactgatatgtatcaagaatatctggtgaaggcccttgcaaagtattttggtgctagattgctcactatagattcttccatgctgtttggtgggcaaacttccaaggaatcagaatcatacaaaaagggtgatagagtgaggtatattggctcaggcattatccttgatggacagagccctccagattttggttcacagggtgaaatatttcttccttttgaagaaaacagatcatcaaaggttggtgtaaggtttgataaaaaaattctgggaggaaacaatcttggaggcaattgtgaagttgatcatggtttgttctgttctgttgattctttatgccccgacattccaggatgggaggttacgttcaaacatccatttgatgtgatagttgagtttatctctgaagaaattcggcatggccctttaatcctttttctgaaggacacagagaaaatttgtgggaataatgattcctatcatggtctgaagagcaagctaaaacattttccagctggcgcttttataattggatctcaaatccagcctgacaatcgcaaagagaaggcaaatgttagttctccttttctttcgaagttccggtacagccaagctatacttggcctcacattacaggacattgatgggggaaatgataataataaagaaacatcaaaggcaataatgaagcatttgatcaaacttttcccgaataaagtgacacttgaggcaccacaagctgaaatggagctttcacggtggaaccagatgttaaaccgagatattgaagtccttaaaggaaatgcaaacatttcaaaaatacgctcttttctaacaaggcttggattggaatgcactgaccctgaagcgatattggtcacggatcgcattcttacaaatgagtgtattgataaaataattggttttgctttgagccatcaacttaagaactgtacaaatccagacccccctttgggtagtgtgcagtttgctctatccagcggaagtcttaagcatggcgttgacatgttgaaaagtatccagtctggctcgaagagcagcaccaaaaggaaatcacttaaggatattgctactgaaaacgaatttgaaaagagccttcttgctgatgtcacccctccacatgaaattggtgttacctttgaggacattggagctttagaaagtgtcaaagatactctgaaggagttggtgatgcttcctttgcaaagacccgaacttttcaaccgaggacaacttatgaagccatgtaaaggaattttactttttggcccacctggtacggggaagacaaatgctggctaaggctgtggcaactgaggctggtgctaatttcataaacatatcgatgtcaagcatctcttcaaaggttgatggcatgttgggaaggcgggagaaccctggagaacatgaagccatgcggaagatgaaaaatgagtttatggtgaactgggatggtctgagaacaagggagaaagaacgtgtattagtacttgctgcaactaacaggccatttgatcttgatgaggctgttgttaggcggcttccaaggaggttgatggtgaatttgccagatgcatcaaataggagaaaaattcttagtgtaatactagccaaggaagatttggcagacgacgttgatctagaaactatagctaacctgacagaagggtactcaggcagtgatctcaagaatctgtgtgttactgctgcacaccgtcctattagggagattcttgaaaaggaaaagaaggaattgcaattgagtttcaagtggatttgctcacatgcaggagagagcttcagcagaagcagaaaatagatcattgcctccgtcacacactagcaatgatgtccgtgcattaagaacaagtgatttcatacatgcgcatgaacaggtgtgtgcaagtgttccctcggattccagtaacatgagcgagcttgtgcaatggaatgatctctatggagaaggcggatcaaggaaaaagacaacgctaagctacttcatgtagcttaggttataaatatattgggagaagtgccctggcacaaagcagcaatagttggaggcggtgcagttggaaaaaaaaagctatgctcatctgccagacatccatatcaaagagaattgatggttcaggtggagcggaatagaatggaatggaatagtatacatacacatggttgctgcctctgctctgggccatgcatcatgcatctggacaggacggctatcctggcttgcagttgccctatgcagttttgagtgcaatggtcaccatctgtgaagcacggataccacagagatcctggccccaaccactcttttcacaaatggagctgaggacctttggagttctaccaaaagtgatcttaaatctttgttctttgactttccgttttgtgaacggaaggccccactctgctagtatggattgttgatcctccgtttctctggtactgactgaactgctcatacaaaactcgttcaacaggcagaaatgctgcctggtggccttctagagtgcttctttgacgccgcagagagcacatcaaaaaaaatgtgtttgtttcgaacgatttgtgctgcattccattcacggcgatatcaggtgccgttgtttgtgtttggttccgcaatcaagggagtgaaagccattagcacatccaatcaaacaaatagcgatatctctttcactgtaccagttagcgctggtctcggatgctattaacattgctgttgtctgtctcggaaccaaacaccgcctaactcgtcggctgttaaatatttctgaactgaattactgcacttggttggggtttcatgcttatcaagttggcttatatagccaacaatactttgtgcagttctgcatcctctgcctgcttatgcgcgatctcattggctgagcggtacgaagataaaacggtagctaatccgaagcgatggcttctctttttctttctacggtattttgtctctatgaattacagttacagcagtcagaacagctgatttaaaaccgcagcgaaaaggctgattgccttgcccatttttgggtgggtggaggttaatacagatttctgtaatttttttactttaatattgtttgacatattgtgcaaggcaaatgatttcctaatgatttgttctacttgatattgtaatccatattgacctatatgctatgctcagttccttagagcatctccagtacttgatattgtaatccatattgacctaggggaaaaaaaggagaatttaacctgatgacactggtggactatgctatgctcagttccttggaacatctctagtagttttgtaaaaaaatctctctaaagacagatgtaaggagttgctacataataatagggagtaaaaatatctgtactctcatgtagtctttatttttagttaccaaatattataaattatgcctgc

SEQ ID NO: 83982 - DNA, 4711 bp, Zea Mays
atccttcggttttgtattcttcgcttcctttcgccttcctcttcgcctctctctcgtgttctggcgtcgccgtcgccgctggcgcgagatggtggagacgcggcgaagcgccgcggcgaagcgctcggcggcggtggtggaggaggagaagggctcgctggcatcgccagcgctggagcccgcggaggacgcgccggcgggtcttggagcgggtgacgatgtcgcgtcgtcgcagcccccgaagcgcgcgaaggttgggtgcacggagtcggataccgcgaagccgtcggtggcgccggctgccggcgctgttgcgggtccactgcccaacacggctgggctgcaggccaggaccggcgccatggacaagctggaggccttcttgaagtccaaggaggctcagtccaatccggccggtcataagcaggggactaatgataaagatttatcggcgaagatgaagagagtcatggatttgtcggaggatatatcggagaagataaagagaagcaaggataggttggctgtgttattgaataagccggctgcaggcaccagcaggcgtcaggagccctggtgcagactaatttcacaacattccatgcaccctaccctttctatttacggtgcgattttcacaattggtcatggagcgcatcatgatttcagactggatgaatcatccactgcctcatctgtttgtagactgaagcaagctaagatatttgagcaacttcatgaggagaaatcaagcacttcagtgttatcttccacttgcacttgcagtagtatccagctggggcaacactcacatttcaatgatattcaggatcatgtgtcatctaaagggcgcaaagcctcatcctttctctttggaagaggtcggtgttcattgttgtcttgtggtctatcagcagacccacttaatatatgtaaaacgacggagggccggagccagtttatctctgaagataatatatcatctggtcggtgtcagctactaaaggaggatttgattaatgcaacggttgatgtgagtgacatctctgagtcatttgatagttgcccatattatctaagtgagcataccaaacatgctctaatgtcagcagcatttgtacatttacattgcaagaactacttcaagtttacaaaagatatatcttctcttagtcaacgagtgctgctatctggcccaacaggaactgatatgtatcaagaatatctggtgaaggcccttgcaaagtattttggtgctagattgctcactatagattcttccatgctgtttggtgggcaaacttccaaggaatcagaatcatacaaaaagggtgatagagtgaggtatattggctcaggcattatccttgatggacagagccctccagattttggttcacagggtgaaatatttcttccttttgaagaaaacagatcatcaaaggttggtgtaaggtttgataaaaaaattctgggaggaaacaatcttggaggcaattgtgaagttgatcatggtttgttctgttctgttgattctttatgccccgacattccaggatgggaggttacgttcaaacatccatttgatgtgatagttgagtttatctctgaagaaattcggcatggccctttaatcctttttctgaaggacacagagaaaatttgtgggaataatgattcctatcatggtctgaagagcaagctaaaacattttccagctggcgcttttataattggatctcaaatccagcctgacaatcgcaaagagaaggcaaatgttagttctccttttctttcgaagttccggtacagccaagctatacttggcctcacattacaggacattgatgggggaaatgataataataaagaaacatcaaaggcaataatgaagcatttgatcaaacttttcccgaataaagtgacacttgaggcaccacaagctgaaatggagctttcacggtggaaccagatgttaaaccgagatattgaagtccttaaaggaaatgcaaacatttcaaaaatacgctcttttctaacaaggcttggattggaatgcactgaccctgaagcgatattggtcacggatcgcattcttacaaatgagtgtattgataaaataattggttttgctttgagccatcaacttaagaactgtacaaatccagacccccctttgggtagtgtgcagtttgctctatccagcggaagtcttaagcatggcgttgacatgttgaaaagtatccagtctggctcgaagagcagcaccaaaaggaaatcacttaaggatattgctactgaaaacgaatttgaaaagagccttcttgctgatgtcacccctccacatgaaattggtgttacctttgaggacattggagctttagaaagtgtcaaagatactctgaaggagttggtgatgcttcctttgcaaagacccgaacttttcaaccgaggacaacttatgaagccatgtaaaggaattttactttttggcccacctggtacggggaagacaaatgctggctaaggctgtggcaactgaggctggtgctaatttcataaacatatcgatgtcaagcatctcttcaaagtggcttggtgaaggagaaaaatttgtgaaagctgtgttttcactggcaagtaaaattgctccaagtgtaatttttgtggacgaggttgatggcatgttgggaaggcgggagaaccctggagaacatgaagccatgcggaagatgaaaaatgagtttatggtgaactgggatggtctgagaacaagggagaaagaacgtgtattagtacttgctgcaactaacaggccatttgatcttgatgaggctgttgttaggcggcttccaaggaggttgatggtgaatttgccagatgcatcaaataggagaaaaattcttagtgtaatactagccaaggaagatttggcagacgacgttgatctagaaactatagctaacctgacagaagggtactcaggcagtgatctcaagaatctgtgtgttactgctgcacaccgtcctattagggagattcttgaaaaggaaaagaaggagagagcttcagcagaagcagaaaatagatcattgcctccgtcacacactagcaatgatgtccgtgcattaagaacaagtgatttcatacatgcgcatgaacaggtgtgtgcaagtgttccctcggattccagtaacatgagcgagcttgtgcaatggaatgatctctatggagaaggcggatcaaggaaaaagacaacgctaagctacttcatgtagcttaggttataaatatattgggagaagtgccctggcacaaagcagcaatagttggaggcggtgcagttggaaaaaaaaagctatgctcatctgccagacatccatatcaaagagaattgatggttcaggtggagcggaatagaatggaatggaatagtatacatacacatggttgctgcctctgctctgggccatgcatcatgcatctggacaggacggctatcctggcttgcagttgccctatgcagttttgagtgcaatggtcaccatctgtgaagcacggataccacagagatcctggccccaaccactcttttcacaaatggagctgaggacctttggagttctaccaaaagtgatcttaaatctttgttctttgactttccgttttgtgaacggaaggccccactctgctagtatggattgttgatcctccgtttctctggtactgactgaactgctcatacaaaactcgttcaacaggcagaaatgctgcctggtggccttctagagtgcttctttgacgccgcagagagcacatcaaaaaaaatgtgtttgtttcgaacgatttgtgctgcattccattcacggcgatatcaggtgccgttgtttgtgtttggttccgcaatcaagggagtgaaagccattagcacatccaatcaaacaaatagcgatatctctttcactgtaccagttagcgctggtctcggatgctattaacattgctgttgtctgtctcggaaccaaacaccgcctaactcgtcggctgttaaatatttctgaactgaattactgcacttggttggggtttcatgcttatcaagttggcttatatagccaacaatactttgtgcagttctgcatcctctgcctgcttatgcgcgatctcattggctgagcggtacgaagataaaacggtagctaatccgaagcgatggcttctctttttctttctacggtattttgtctctatgaattacagttacagcagtcagaacagctgatttaaaaccgcagcgaaaaggctgattgccttgcccatttttgggtgggtggaggttaatacagatttctgtaatttttttactttaatattgtttgacatattgtgcaaggcaaatgatttcctaatgatttgttctacttgatattgtaatccatattgacctatatgctatgctcagttccttagagcatctccagtacttgatattgtaatccatattgacctaggggaaaaaaaggagaatttaacctgatgacactggtggactatgctatgctcagttccttggaacatctctagtagttttgtaaaaaaatctctctaaagacagatgtaaggagttgctacataataatagggagtaaaaatatctgtactctcatgtagtctttatttttagttaccaaatattataaattatgcctgc

SEQ ID NO: 83983 - DNA, 4806 bp, Zea Mays
gaatccttcggttttgtattcttcgcttcctttcgccttcctcttcgcctctctctcgtgttctggcgtcgccgtcgccgctggcgcgagatggtggagacgcggcgaagcgccgcggcgaagcgctcggcggcggtggtggaggaggagaagggctcgctggcatcgccagcgctggagcccgcggaggacgcgccggcgggtcttggagcgggtgacgatgtcgcgtcgtcgcagcccccgaagcgcgcgaaggttgggtgcacggagtcggataccgcgaagccgtcggtggcgccggctgccggcgctgttgcgggtccactgcccaacacggctgggctgcaggccaggaccggcgccatggacaagctggaggccttcttgaagtccaaggaggctcagtccaatccggccggtcataagcaggggactaatgataaagatttatcggcgaagatgaagagagtcatggatttgtcggaggatatatcggagaagataaagagaagcaaggataggttggctgtgttattgaataagccggctgcaggcaccagcaggcgtcaggagccctggtgcagactaatttcacaacattccatgcaccctaccctttctatttacggtgcgattttcacaattggtcatggagcgcatcatgatttcagactggatgaatcatccactgcctcatctgtttgtagactgaagcaagctaagcgaggtgcactccttgaaatctttgaatccaaagttgttcgtgtaaacgggaaatctttggacaaggctgccaaggttaccttaaatggaggagatgaaattatcttctgttcaccagtgaggcatgcttatatatttgagcaacttcatgaggagaaatcaagcacttcagtgttatcttccacttgcacttgcagtagtatccagctggggcaacactcacatttcaatgatattcaggatcatgtgtcatctaaagggcgcaaagcctcatcctttctctttggaagaggtctatcagcagacccacttaatatatgtaaaacgacggagggccggagccagtttatctctgaagataatatatcatctggtcggtgtcagctactaaaggaggatttgattaatgcaacggttgatgtgagtgacatctctgagtcatttgatagttgcccatattatctaagtgagcataccaaacatgctctaatgtcagcagcatttgtacatttacattgcaagaactacttcaagtttacaaaagatatatcttctcttagtcaacgagtgctgctatctggcccaacaggaactgatatgtatcaagaatatctggtgaaggcccttgcaaagtattttggtgctagattgctcactatagattcttccatgctgtttggtgggcaaacttccaaggaatcagaatcatacaaaaagggtgatagagtgaggtatattggctcaggcattatccttgatggacagagccctccagattttggttcacagggtgaaatatttcttccttttgaagaaaacagatcatcaaaggttggtgtaaggtttgataaaaaaattctgggaggaaacaatcttggaggcaattgtgaagttgatcatgttgattctttatgccccgacattccaggatgggaggttacgttcaaacatccatttgatgtgatagttgagtttatctctgaagaaattcggcatggccctttaatcctttttctgaaggacacagagaaaatttgtgggaataatgattcctatcatggtctgaagagcaagctaaaacattttccagctggcgcttttataattggatctcaaatccagcctgacaatcgcaaagagaaggcaaatgttagttctccttttctttcgaagttccggtacagccaagctatacttggcctcacattacaggacattgatgggggaaatgataataataaagaaacatcaaaggcaataatgaagcatttgatcaaacttttcccgaataaagtgacacttgaggcaccacaagctgaaatggagctttcacggtggaaccagatgttaaaccgagatattgaagtccttaaaggaaatgcaaacatttcaaaaatacgctcttttctaacaaggcttggattggaatgcactgaccctgaagcgatattggtcacggatcgcattcttacaaatgagtgtattgataaaataattggttttgctttgagccatcaacttaagaactgtacaaatccagacccccctttgggtagtgtgcagtttgctctatccagcggaagtcttaagcatggcgttgacatgttgaaaagtatccagtctggctcgaagagcagcaccaaaaggaaatcacttaaggatattgctactgaaaacgaatttgaaaagagccttcttgctgatgtcacccctccacatgaaattggtgttacctttgaggacattggagctttagaaagtgtcaaagatactctgaaggagttggtgatgcttcctttgcaaagacccgaacttttcaaccgaggacaacttatgaagccatgtaaaggaattttactttttggcccacctggtacggggaagacaaatgctggctaaggctgtggcaactgaggctggtgctaatttcataaacatatcgatgtcaagcatctcttcaaagtggcttggtgaaggagaaaaatttgtgaaagctgtgttttcactggcaagtaaaattgctccaagtgtaatttttgtggacgaggttgatggcatgttgggaaggcgggagaaccctggagaacatgaagccatgcggaagatgaaaaatgagtttatggtgaactgggatggtctgagaacaagggagaaagaacgtgtattagtacttgctgcaactaacaggccatttgatcttgatgaggctgttgttaggcggcttccaaggaggttgatggtgaatttgccagatgcatcaaataggagaaaaattcttagtgtaatactagccaaggaagatttggcagacgacgttgatctagaaactatagctaacctgacagaagggtactcaggcagtgatctcaagaatctgtgtgttactgctgcacaccgtcctattagggagattcttgaaaaggaaaagaaggagagagcttcagcagaagcagaaaatagatcattgcctccgtcacacactagcaatgatgtccgtgcattaagaacaagtgatttcatacatgcgcatgaacaggtgtgtgcaagtgttccctcggattccagtaacatgagcgagcttgtgcaatggaatgatctctatggagaaggcggatcaaggaaaaagacaacgctaagctacttcatgtagcttaggttataaatatattgggagaagtgccctggcacaaagcagcaatagttggaggcggtgcagttggaaaaaaaaagctatgctcatctgccagacatccatatcaaagagaattgatggttcaggtggagcggaatagaatggaatggaatagtatacatacacatggttgctgcctctgctctgggccatgcatcatgcatctggacaggacggctatcctggcttgcagttgccctatgcagttttgagtgcaatggtcaccatctgtgaagcacggataccacagagatcctggccccaaccactcttttcacaaatggagctgaggacctttggagttctaccaaaagtgatcttaaatctttgttctttgactttccgttttgtgaacggaaggccccactctgctagtatggattgttgatcctccgtttctctggtactgactgaactgctcatacaaaactcgttcaacaggcagaaatgctgcctggtggccttctagagtgcttctttgacgccgcagagagcacatcaaaaaaaatgtgtttgtttcgaacgatttgtgctgcattccattcacggcgatatcaggtgccgttgtttgtgtttggttccgcaatcaagggagtgaaagccattagcacatccaatcaaacaaatagcgatatctctttcactgtaccagttagcgctggtctcggatgctattaacattgctgttgtctgtctcggaaccaaacaccgcctaactcgtcggctgttaaatatttctgaactgaattactgcacttggttggggtttcatgcttatcaagttggcttatatagccaacaatactttgtgcagttctgcatcctctgcctgcttatgcgcgatctcattggctgagcggtacgaagataaaacggtagctaatccgaagcgatggcttctctttttctttctacggtattttgtctctatgaattacagttacagcagtcagaacagctgatttaaaaccgcagcgaaaaggctgattgccttgcccatttttgggtgggtggaggttaatacagatttctgtaatttttttactttaatattgtttgacatattgtgcaaggcaaatgatttcctaatgatttgttctacttgatattgtaatccatattgacctatatgctatgctcagttccttagagcatctccagtacttgatattgtaatccatattgacctaggggaaaaaaaggagaatttaacctgatgacactggtggactatgctatgctcagttccttggaacatctctagtagttttgtaaaaaaatctctctaaagacagatgtaaggagttgctacataataatagggagtaaaaatatctgtactctcatgtagtctttatttttagttaccaaatattataaattatgcctgc

SEQ ID NO: 83984 - DNA, 4482 bp, Zea Mays
gaatccttcggttttgtattcttcgcttcctttcgccttcctcttcgcctctctctcgtgttctggcgtcgccgtcgccgctggcgcgagatggtggagacgcggcgaagcgccgcggcgaagcgctcggcggcggtggtggaggaggagaagggctcgctggcatcgccagcgctggagcccgcggaggacgcgccggcgggtcttggagcgggtgacgatgtcgcgtcgtcgcagcccccgaagcgcgcgaaggttgggtgcacggagtcggataccgcgaagccgtcggtggcgccggctgccggcgctgttgcgggtccactgcccaacacggctgggctgcaggccaggaccggcgccatggacaagctggaggccttcttgaagtccaaggaggctcagtccaatccggccggtcataagcaggggactaatgataaagatttatcggcgaagatgaagagagtcatggatttgtcggaggatatatcggagaagataaagagaagcaaggataggttggctgtgttattgaataagccggctgcaggcaccagcaggcgtcaggagccctggtgcagactaatttcacaacattccatgcaccctaccctttctatttacggtgcgattttcacaattggtcatggagcgcatcatgatttcagactggatgaatcatccactgcctcatctgtttgtagactgaagcaagctaagcgaggtgcactccttgaaatctttgaatccaaagttgttcgtgtaaacgggaaatctttggacaaggctgccaaggttaccttaaatggaggagatgaaattatcttctgttcaccagtgaggcatgcttatatatttgagcaacttcatgaggagaaatcaagcacttcagtgttatcttccacttgcacttgcagtagtatccagctggggcaacactcacatttcaatgatattcaggatcatgtgtcatctaaagggcgcaaagcctcatcctttctctttggaagaggtctatcagcagacccacttaatatatgtaaaacgacggagggccggagccagtttatctctgaagataatatatcatctggtcggtgtcagctactaaaggaggatttgattaatgcaacggttgatgtgagtgacatctctgagtcatttgatagttgcccatattatctaagtgagcataccaaacatgctctaatgtcagcagcatttgtacatttacattgcaagaactacttcaagtttacaaaagatatatcttctcttagtcaacgagtgctgctatctggcccaacaggaactgatatgtatcaagaatatctggtgaaggcccttgcaaagtattttggtgctagattgctcactatagattcttccatgctgtttggtgggcaaacttccaaggaatcagaatcatacaaaaagggtgatagagtgaggtatattggctcaggcattatccttgatggacagagccctccagattttggttcacagggtgaaatatttcttccttttgaagaaaacagatcatcaaaggttggtgtaaggtttgataaaaaaattctgggaggaaacaatcttggaggcaattgtgaagttgatcatgttgattctttatgccccgacattccaggatgggaggttacgttcaaacatccatttgatgtgatagttgagtttatctctgaagaaattcggcatggccctttaatcctttttctgaaggacacagagaaaatttgtgggaataatgattcctatcatggtctgaagagcaagctaaaacattttccagctggcgcttttataattggatctcaaatccagcctgacaatcgcaaagagaaggcaaatgttagttctccttttctttcgaagttccggtacagccaagctatacttggcctcacattacaggacattgatgggggaaatgataataataaagaaacatcaaaggcaataatgaagcatttgatcaaacttttcccgaataaagtgacacttgaggcaccacaagctgaaatggagctttcacggtggaaccagatgttaaaccgagatattgaagtccttaaaggaaatgcaaacatttcaaaaatacgctcttttctaacaaggcttggattggaatgcactgaccctgaagcgatattggtcacggatcgcattcttacaaatgagtgtattgataaaataattggttttgctttgagccatcaacttaagaactgtacaaatccagacccccctttgggtagtgtgcagtttgctctatccagcggaagtcttaagcatggcgttgacatgttgaaaagtatccagtctggctcgaagagcagcaccaaaaggaaatcacttaaggatattgctactgaaaacgaatttgaaaagagccttcttgctgatgtcacccctccacatgaaattggtgttacctttgaggacattggagctttagaaagtgtcaaagatactctgaaggagttggtgatgcttcctttgcaaagacccgaacttttcaaccgaggacaacttatgaagccatgtaaaggaattttactttttggcccacctggtacggggaagacaaatgctggctaaggctgtggcaactgaggctggtgctaatttcataaacatatcgatgtcaagcatctcttcaaagtggcttggtgaaggagaaaaatttgtgaaagctgtgttttcactggcaagtaaaattgctccaagtgtaatttttgtggacgagaatctgtgtgttactgctgcacaccgtcctattagggagattcttgaaaaggaaaagaaggagagagcttcagcagaagcagaaaatagatcattgcctccgtcacacactagcaatgatgtccgtgcattaagaacaagtgatttcatacatgcgcatgaacaggtgtgtgcaagtgttccctcggattccagtaacatgagcgagcttgtgcaatggaatgatctctatggagaaggcggatcaaggaaaaagacaacgctaagctacttcatgtagcttaggttataaatatattgggagaagtgccctggcacaaagcagcaatagttggaggcggtgcagttggaaaaaaaaagctatgctcatctgccagacatccatatcaaagagaattgatggttcaggtggagcggaatagaatggaatggaatagtatacatacacatggttgctgcctctgctctgggccatgcatcatgcatctggacaggacggctatcctggcttgcagttgccctatgcagttttgagtgcaatggtcaccatctgtgaagcacggataccacagagatcctggccccaaccactcttttcacaaatggagctgaggacctttggagttctaccaaaagtgatcttaaatctttgttctttgactttccgttttgtgaacggaaggccccactctgctagtatggattgttgatcctccgtttctctggtactgactgaactgctcatacaaaactcgttcaacaggcagaaatgctgcctggtggccttctagagtgcttctttgacgccgcagagagcacatcaaaaaaaatgtgtttgtttcgaacgatttgtgctgcattccattcacggcgatatcaggtgccgttgtttgtgtttggttccgcaatcaagggagtgaaagccattagcacatccaatcaaacaaatagcgatatctctttcactgtaccagttagcgctggtctcggatgctattaacattgctgttgtctgtctcggaaccaaacaccgcctaactcgtcggctgttaaatatttctgaactgaattactgcacttggttggggtttcatgcttatcaagttggcttatatagccaacaatactttgtgcagttctgcatcctctgcctgcttatgcgcgatctcattggctgagcggtacgaagataaaacggtagctaatccgaagcgatggcttctctttttctttctacggtattttgtctctatgaattacagttacagcagtcagaacagctgatttaaaaccgcagcgaaaaggctgattgccttgcccatttttgggtgggtggaggttaatacagatttctgtaatttttttactttaatattgtttgacatattgtgcaaggcaaatgatttcctaatgatttgttctacttgatattgtaatccatattgacctatatgctatgctcagttccttagagcatctccagtacttgatattgtaatccatattgacctaggggaaaaaaaggagaatttaacctgatgacactggtggactatgctatgctcagttccttggaacatctctagtagttttgtaaaaaaatctctctaaagacagatgtaaggagttgctacataataatagggagtaaaaatatctgtactctcatgtagtctttatttttagttaccaaatattataaattatgcctgc

SEQ ID NO: 83985 - DNA, 4756 bp, Zea Mays
gtgcgattggcggtcgccttattccgtctcccctgctaatgcattactaatccaacgaatccttcggttttgtattcttcgcttcctttcgccttcctcttcgcctctctctcgtgttctggcgtcgccgtcgccgctggcgcgagatggtggagacgcggcgaagcgccgcggcgaagcgctcggcggcggtggtggaggaggagaagggctcgctggcatcgccagcgctggagcccgcggaggacgcgccggcgggtcttggagcgggtgacgatgtcgcgtcgtcgcagcccccgaagcgcgcgaaggttgggtgcacggagtcggataccgcgaagccgtcggtggcgccggctgccggcgctgttgcgggtccactgcccaacacggctgggctgcaggccaggaccggcgccatggacaagctggaggccttcttgaagtccaaggaggctcagtccaatccggccggtcataagcaggggactaatgataaagatttatcggcgaagatgaagagagtcatggatttgtcggaggatatatcggagaagataaagagaagcaaggataggttggctgtgttattgaataagccggctgcaggcaccagcaggcgtcaggagccctggtgcagactaatttcacaacattccatgcaccctaccctttctatttacggtgcgattttcacaattggtcatggagcgcatcatgatttcagactggatgaatcatccactgcctcatctgtttgtagactgaagcaagctaagcgaggtgcactccttgaaatctttgaatccaaagttgttcgtgtaaacgggaaatctttggacaaggctgccaaggttaccttaaatggaggagatgaaattatcttctgttcaccagtgaggcatgcttatatatttgagcaacttcatgaggagaaatcaagcacttcagtgttatcttccacttgcacttgcagtagtatccagctggggcaacactcacatttcaatgatattcaggatcatgtgtcatctaaagggcgcaaagcctcatcctttctctttggaagaggtcggtgttcattgttgtcttgtggtctatcagcagacccacttaatatatgtaaaacgacggagggccggagccagtttatctctgaagataatatatcatctggtcggtgtcagctactaaaggaggatttgattaatgcaacggttgatgtgagtgacatctctgagtcatttgatagttgcccatattatctaagtgagcataccaaacatgctctaatgtcagcagcatttgtacatttacattgcaagaactacttcaagtttacaaaagatatatcttctcttagtcaacgagtgctgctatctggcccaacaggaactgatatgtatcaagaatatctggtgaaggcccttgcaaagtattttggtgctagattgctcactatagattcttccatgctgtttggtgggcaaacttccaaggaatcagaatcatacaaaaagggtgatagagtgaggtatattggctcaggcattatccttgatggacagagccctccagattttggttcacagggtgaaatatttcttccttttgaagaaaacagatcatcaaaggttggtgtaaggtttgataaaaaaattctgggaggaaacaatcttggaggcaattgtgaagttgatcatggtttgttctgttctgttgattctttatgccccgacattccaggatgggaggttacgttcaaacatccatttgatgtgatagttgagtttatctctgaagaaattcggcatggccctttaatcctttttctgaaggacacagagaaaatttgtgggaataatgattcctatcatggtctgaagagcaagctaaaacattttccagctggcgcttttataattggatctcaaatccagcctgacaatcgcaaagagaaggcaaatgttagttctccttttctttcgaagttccggtacagccaagctatacttggcctcacattacaggacattgatgggggaaatgataataataaagaaacatcaaaggcaataatgaagcatttgatcaaacttttcccgaataaagtgacacttgaggcaccacaagctgaaatggagctttcacggtggaaccagatgttaaaccgagatattgaagtccttaaaggaaatgcaaacatttcaaaaatacgctcttttctaacaaggcttggattggaatgcactgaccctgaagcgatattggtcacggatcgcattcttacaaatgagtgtattgataaaataattggttttgctttgagccatcaacttaagaactgtacaaatccagacccccctttgggtagtgtgcagtttgctctatccagcggaagtcttaagcatggcgttgacatgttgaaaagtatccagtctggctcgaagagcagcaccaaaaggaaatcacttaaggatattgctactgaaaacgaatttgaaaagagccttcttgctgatgtcacccctccacatgaaattggtgttacctttgaggacattggagctttagaaagtgtcaaagatactctgaaggagttggtgatgcttcctttgcaaagacccgaacttttcaaccgaggacaacttatgaagccatgtaaaggaattttactttttggcccacctggtacggggaagacaaatgctggctaaggctgtggcaactgaggctggtgctaatttcataaacatatcgatgtcaagcatctcttcaaagtggcttggtgaaggagaaaaatttgtgaaagctgtgttttcactggcaagtaaaattgctccaagtgtaatttttgtggacgaggttgatggtgaatttgccagatgcatcaaataggagaaaaattcttagtgtaatactagccaaggaagatttggcagacgacgttgatctagaaactatagctaacctgacagaagggtactcaggcagtgatctcaagaatctgtgtgttactgctgcacaccgtcctattagggagattcttgaaaaggaaaagaaggaattgcaattgagtttcaagtggatttgctcacatgcaggagagagcttcagcagaagcagaaaatagatcattgcctccgtcacacactagcaatgatgtccgtgcattaagaacaagtgatttcatacatgcgcatgaacaggtgtgtgcaagtgttccctcggattccagtaacatgagcgagcttgtgcaatggaatgatctctatggagaaggcggatcaaggaaaaagacaacgctaagctacttcatgtagcttaggttataaatatattgggagaagtgccctggcacaaagcagcaatagttggaggcggtgcagttggaaaaaaaaagctatgctcatctgccagacatccatatcaaagagaattgatggttcaggtggagcggaatagaatggaatggaatagtatacatacacatggttgctgcctctgctctgggccatgcatcatgcatctggacaggacggctatcctggcttgcagttgccctatgcagttttgagtgcaatggtcaccatctgtgaagcacggataccacagagatcctggccccaaccactcttttcacaaatggagctgaggacctttggagttctaccaaaagtgatcttaaatctttgttctttgactttccgttttgtgaacggaaggccccactctgctagtatggattgttgatcctccgtttctctggtactgactgaactgctcatacaaaactcgttcaacaggcagaaatgctgcctggtggccttctagagtgcttctttgacgccgcagagagcacatcaaaaaaaatgtgtttgtttcgaacgatttgtgctgcattccattcacggcgatatcaggtgccgttgtttgtgtttggttccgcaatcaagggagtgaaagccattagcacatccaatcaaacaaatagcgatatctctttcactgtaccagttagcgctggtctcggatgctattaacattgctgttgtctgtctcggaaccaaacaccgcctaactcgtcggctgttaaatatttctgaactgaattactgcacttggttggggtttcatgcttatcaagttggcttatatagccaacaatactttgtgcagttctgcatcctctgcctgcttatgcgcgatctcattggctgagcggtacgaagataaaacggtagctaatccgaagcgatggcttctctttttctttctacggtattttgtctctatgaattacagttacagcagtcagaacagctgatttaaaaccgcagcgaaaaggctgattgccttgcccatttttgggtgggtggaggttaatacagatttctgtaatttttttactttaatattgtttgacatattgtgcaaggcaaatgatttcctaatgatttgttctacttgatattgtaatccatattgacctatatgctatgctcagttccttagagcatctccagtacttgatattgtaatccatattgacctaggggaaaaaaaggagaatttaacctgatgacactggtggactatgctatgctcagttccttggaacatctctagtagttttgtaaaaaaatctctctaaagacagatgtaaggagttgctacataataatagggagtaaaaatatctgtactctcatgtagtctttatttttagttaccaaatattataaattatgcctgc

SEQ ID NO: 83986 - DNA, 4553 bp, Zea Mays
gtgcgattggcggtcgccttattccgtctcccctgctaatgcattactaatccaacgaatccttcggttttgtattcttcgcttcctttcgccttcctcttcgcctctctctcgtgttctggcgtcgccgtcgccgctggcgcgagatggtggagacgcggcgaagcgccgcggcgaagcgctcggcggcggtggtggaggaggagaagggctcgctggcatcgccagcgctggagcccgcggaggacgcgccggcgggtcttggagcgggtgacgatgtcgcgtcgtcgcagcccccgaagcgcgcgaaggttgggtgcacggagtcggataccgcgaagccgtcggtggcgccggctgccggcgctgttgcgggtccactgcccaacacggctgggctgcaggccaggaccggcgccatggacaagctggaggccttcttgaagtccaaggaggctcagtccaatccggccggtcataagcaggggactaatgataaagatttatcggcgaagatgaagagagtcatggatttgtcggaggatatatcggagaagataaagagaagcaaggataggttggctgtgttattgaataagccggctgcaggcaccagcaggcgtcaggagccctggtgcagactaatttcacaacattccatgcaccctaccctttctatttacggtgcgattttcacaattggtcatggagcgcatcatgatttcagactggatgaatcatccactgcctcatctgtttgtagactgaagcaagctaagcgaggtgcactccttgaaatctttgaatccaaagttgttcgtgtaaacgggaaatctttggacaaggctgccaaggttaccttaaatggaggagatgaaattatcttctgttcaccagtgaggcatgcttatatatttgagcaacttcatgaggagaaatcaagcacttcagtgttatcttccacttgcacttgcagtagtatccagctggggcaacactcacatttcaatgatattcaggatcatgtgtcatctaaagggcgcaaagcctcatcctttctctttggaagaggtctatcagcagacccacttaatatatgtaaaacgacggagggccggagccagtttatctctgaagataatatatcatctggtcggtgtcagctactaaaggaggatttgattaatgcaacggttgatgtgagtgacatctctgagtcatttgatagttgcccatattatctaagtgagcataccaaacatgctctaatgtcagcagcatttgtacatttacattgcaagaactacttcaagtttacaaaagatatatcttctcttagtcaacgagtgctgctatctggcccaacaggaactgatatgtatcaagaatatctggtgaaggcccttgcaaagtattttggtgctagattgctcactatagattcttccatgctgtttggtgggcaaacttccaaggaatcagaatcatacaaaaagggtgatagagtgaggtatattggctcaggcattatccttgatggacagagccctccagattttggttcacagggtgaaatatttcttccttttgaagaaaacagatcatcaaaggttggtgtaaggtttgataaaaaaattctgggaggaaacaatcttggaggcaattgtgaagttgatcatggtttgttctgttctgttgattctttatgccccgacattccaggatgggaggttacgttcaaacatccatttgatgtgatagttgagtttatctctgaagaaattcggcatggccctttaatcctttttctgaaggacacagagaaaatttgtgggaataatgattcctatcatggtctgaagagcaagctaaaacattttccagctggcgcttttataattggatctcaaatccagcctgacaatcgcaaagagaaggcaaatgttagttctccttttctttcgaagttccggtacagccaagctatacttggcctcacattacaggacattgatgggggaaatgataataataaagaaacatcaaaggcaataatgaagcatttgatcaaacttttcccgaataaagtgacacttgaggcaccacaagctgaaatggagctttcacggtggaaccagatgttaaaccgagatattgaagtccttaaaggaaatgcaaacatttcaaaaatacgctcttttctaacaaggcttggattggaatgcactgaccctgaagcgatattggtcacggatcgcattcttacaaatgagtgtattgataaaataattggttttgctttgagccatcaacttaagaactgtacaaatccagacccccctttgggtagtgtgcagtttgctctatccagcggaagtcttaagcatggcgttgacatgttgaaaagtatccagtctggctcgaagagcagcaccaaaaggaaatcacttaaggatattgctactgaaaacgaatttgaaaagagccttcttgctgatgtcacccctccacatgaaattggtgttacctttgaggacattggagctttagaaagtgtcaaagatactctgaaggagttggtgatgcttcctttgcaaagacccgaacttttcaaccgaggacaacttatgaagccatgtaaaggaattttactttttggcccacctggtacggggaagacaaatgctggctaaggctgtggcaactgaggctggtgctaatttcataaacatatcgatgtcaagcatctcttcaaagtggcttggtgaaggagaaaaatttgtgaaagctgtgttttcactggcaagtaaaattgctccaagtgtaatttttgtggacgagaatctgtgtgttactgctgcacaccgtcctattagggagattcttgaaaaggaaaagaaggagagagcttcagcagaagcagaaaatagatcattgcctccgtcacacactagcaatgatgtccgtgcattaagaacaagtgatttcatacatgcgcatgaacaggtgtgtgcaagtgttccctcggattccagtaacatgagcgagcttgtgcaatggaatgatctctatggagaaggcggatcaaggaaaaagacaacgctaagctacttcatgtagcttaggttataaatatattgggagaagtgccctggcacaaagcagcaatagttggaggcggtgcagttggaaaaaaaaagctatgctcatctgccagacatccatatcaaagagaattgatggttcaggtggagcggaatagaatggaatggaatagtatacatacacatggttgctgcctctgctctgggccatgcatcatgcatctggacaggacggctatcctggcttgcagttgccctatgcagttttgagtgcaatggtcaccatctgtgaagcacggataccacagagatcctggccccaaccactcttttcacaaatggagctgaggacctttggagttctaccaaaagtgatcttaaatctttgttctttgactttccgttttgtgaacggaaggccccactctgctagtatggattgttgatcctccgtttctctggtactgactgaactgctcatacaaaactcgttcaacaggcagaaatgctgcctggtggccttctagagtgcttctttgacgccgcagagagcacatcaaaaaaaatgtgtttgtttcgaacgatttgtgctgcattccattcacggcgatatcaggtgccgttgtttgtgtttggttccgcaatcaagggagtgaaagccattagcacatccaatcaaacaaatagcgatatctctttcactgtaccagttagcgctggtctcggatgctattaacattgctgttgtctgtctcggaaccaaacaccgcctaactcgtcggctgttaaatatttctgaactgaattactgcacttggttggggtttcatgcttatcaagttggcttatatagccaacaatactttgtgcagttctgcatcctctgcctgcttatgcgcgatctcattggctgagcggtacgaagataaaacggtagctaatccgaagcgatggcttctctttttctttctacggtattttgtctctatgaattacagttacagcagtcagaacagctgatttaaaaccgcagcgaaaaggctgattgccttgcccatttttgggtgggtggaggttaatacagatttctgtaatttttttactttaatattgtttgacatattgtgcaaggcaaatgatttcctaatgatttgttctacttgatattgtaatccatattgacctatatgctatgctcagttccttagagcatctccagtacttgatattgtaatccatattgacctaggggaaaaaaaggagaatttaacctgatgacactggtggactatgctatgctcagttccttggaacatctctagtagttttgtaaaaaaatctctctaaagacagatgtaaggagttgctacataataatagggagtaaaaatatctgtactctcatgtagtctttatttttagttaccaaatattataaattatgcctgc

SEQ ID NO: 83987 - DNA, 4968 bp, Zea Mays
cacagtctaacctgtcgcgccgctgccgtgcgattggcggtcgccttattccgtctcccctgctaatgcattactaatccaacgaatccttcggttttgtattcttcgcttcctttcgccttcctcttcgcctctctctcgtgttctggcgtcgccgtcgccgctggcgcgagatggtggagacgcggcgaagcgccgcggcgaagcgctcggcggcggtggtggaggaggagaagggctcgctggcatcgccagcgctggagcccgcggaggacgcgccggcgggtcttggagcgggtgacgatgtcgcgtcgtcgcagcccccgaagcgcgcgaaggttgggtgcacggagtcggataccgcgaagccgtcggtggcgccggctgccggcgctgttgcgggtccactgcccaacacggctgggctgcaggccaggaccggcgccatggacaagctggaggccttcttgaagtccaaggaggctcagtccaatccggccggtcataagcaggggactaatgataaagatttatcggcgaagatgaagagagtcatggatttgtcggaggatatatcggagaagataaagagaagcaaggataggttggctgtgttattgaataagccggctgcaggcaccagcaggcgtcaggagccctggtgcagactaatttcacaacattccatgcaccctaccctttctatttacggtgcgattttcacaattggtcatggagcgcatcatgatttcagactggatgaatcatccactgcctcatctgtttgtagactgaagcaagctaagcgaggtgcactccttgaaatctttgaatccaaagttgttcgtgtaaacgggaaatctttggacaaggctgccaaggttaccttaaatggaggagatgaaattatcttctgttcaccagtgaggcatgcttatatatttgagcaacttcatgaggagaaatcaagcacttcagtgttatcttccacttgcacttgcagtagtatccagctggggcaacactcacatttcaatgatattcaggatcatgtgtcatctaaagggcgcaaagcctcatcctttctctttggaagaggtcggtgttcattgttgtcttgtggtctatcagcagacccacttaatatatgtaaaacgacggagggccggagccagtttatctctgaagataatatatcatctggtcggtgtcagctactaaaggaggatttgattaatgcaacggttgatgtgagtgacatctctgagtcatttgatagttgcccatattatctaagtgagcataccaaacatgctctaatgtcagcagcatttgtacatttacattgcaagaactacttcaagtttacaaaagatatatcttctcttagtcaacgagtgctgctatctggcccaacaggaactgatatgtatcaagaatatctggtgaaggcccttgcaaagtattttggtgctagattgctcactatagattcttccatgctgtttggtgggcaaacttccaaggaatcagaatcatacaaaaagggtgatagagtgaggtatattggctcaggcattatccttgatggacagagccctccagattttggttcacagggtgaaatatttcttccttttgaagaaaacagatcatcaaaggttggtgtaaggtttgataaaaaaattctgggaggaaacaatcttggaggcaattgtgaagttgatcatggtttgttctgttctgttgattctttatgccccgacattccaggatgggaggttacgttcaaacatccatttgatgtgatagttgagtttatctctgaagaaattcggcatggccctttaatcctttttctgaaggacacagagaaaatttgtgggaataatgattcctatcatggtctgaagagcaagctaaaacattttccagctggcgcttttataattggatctcaaatccagcctgacaatcgcaaagagaaggcaaatgttagttctccttttctttcgaagttccggtacagccaagctatacttggcctcacattacaggacattgatgggggaaatgataataataaagaaacatcaaaggcaataatgaagcatttgatcaaacttttcccgaataaagtgacacttgaggcaccacaagctgaaatggagctttcacggtggaaccagatgttaaaccgagatattgaagtccttaaaggaaatgcaaacatttcaaaaatacgctcttttctaacaaggcttggattggaatgcactgaccctgaagcgatattggtcacggatcgcattcttacaaatgagtgtattgataaaataattggttttgctttgagccatcaacttaagaactgtacaaatccagacccccctttgggtagtgtgcagtttgctctatccagcggaagtcttaagcatggcgttgacatgttgaaaagtatccagtctggctcgaagagcagcaccaaaaggaaatcacttaaggatattgctactgaaaacgaatttgaaaagagccttcttgctgatgtcacccctccacatgaaattggtgttacctttgaggacattggagctttagaaagtgtcaaagatactctgaaggagttggtgatgcttcctttgcaaagacccgaacttttcaaccgaggacaacttatgaagccatgtaaaggaattttactttttggcccacctggtacggggaagacaaatgctggctaaggctgtggcaactgaggctggtgctaatttcataaacatatcgatgtcaagcatctcttcaaagtggcttggtgaaggagaaaaatttgtgaaagctgtgttttcactggcaagtaaaattgctccaagtgtaatttttgtggacgaggttgatggcatgttgggaaggcgggagaaccctggagaacatgaagccatgcggaagatgaaaaatgagtttatggtgaactgggatggtctgagaacaagggagaaagaacgtgtattagtacttgctgcaactaacaggccatttgatcttgatgaggctgttgttaggcggcttccaaggaggttgatggtgaatttgccagatgcatcaaataggagaaaaattcttagtgtaatactagccaaggaagatttggcagacgacgttgatctagaaactatagctaacctgacagaagggtactcaggcagtgatctcaagaatctgtgtgttactgctgcacaccgtcctattagggagattcttgaaaaggaaaagaaggaattgcaattgagtttcaagtggatttgctcacatgcaggagagagcttcagcagaagcagaaaatagatcattgcctccgtcacacactagcaatgatgtccgtgcattaagaacaagtgatttcatacatgcgcatgaacaggtgtgtgcaagtgttccctcggattccagtaacatgagcgagcttgtgcaatggaatgatctctatggagaaggcggatcaaggaaaaagacaacgctaagctacttcatgtagcttaggttataaatatattgggagaagtgccctggcacaaagcagcaatagttggaggcggtgcagttggaaaaaaaaagctatgctcatctgccagacatccatatcaaagagaattgatggttcaggtggagcggaatagaatggaatggaatagtatacatacacatggttgctgcctctgctctgggccatgcatcatgcatctggacaggacggctatcctggcttgcagttgccctatgcagttttgagtgcaatggtcaccatctgtgaagcacggataccacagagatcctggccccaaccactcttttcacaaatggagctgaggacctttggagttctaccaaaagtgatcttaaatctttgttctttgactttccgttttgtgaacggaaggccccactctgctagtatggattgttgatcctccgtttctctggtactgactgaactgctcatacaaaactcgttcaacaggcagaaatgctgcctggtggccttctagagtgcttctttgacgccgcagagagcacatcaaaaaaaatgtgtttgtttcgaacgatttgtgctgcattccattcacggcgatatcaggtgccgttgtttgtgtttggttccgcaatcaagggagtgaaagccattagcacatccaatcaaacaaatagcgatatctctttcactgtaccagttagcgctggtctcggatgctattaacattgctgttgtctgtctcggaaccaaacaccgcctaactcgtcggctgttaaatatttctgaactgaattactgcacttggttggggtttcatgcttatcaagttggcttatatagccaacaatactttgtgcagttctgcatcctctgcctgcttatgcgcgatctcattggctgagcggtacgaagataaaacggtagctaatccgaagcgatggcttctctttttctttctacggtattttgtctctatgaattacagttacagcagtcagaacagctgatttaaaaccgcagcgaaaaggctgattgccttgcccatttttgggtgggtggaggttaatacagatttctgtaatttttttactttaatattgtttgacatattgtgcaaggcaaatgatttcctaatgatttgttctacttgatattgtaatccatattgacctatatgctatgctcagttccttagagcatctccagtacttgatattgtaatccatattgacctaggggaaaaaaaggagaatttaacctgatgacactggtggactatgctatgctcagttccttggaacatctctagtagttttgtaaaaaaatctctctaaagacagatgtaaggagttgctacataataatagggagtaaaaatatctgtactctcatgtagtctttatttttagttaccaaatattataaattatgcctgc

SEQ ID NO: 83988 - DNA, 4748 bp, Zea Mays
gacaacacagtctaacctgtcgcgccgctgccgtgcgattggcggtcgccttattccgtctcccctgctaatgcattactaatccaacgaatccttcggttttgtattcttcgcttcctttcgccttcctcttcgcctctctctcgtgttctggcgtcgccgtcgccgctggcgcgagatggtggagacgcggcgaagcgccgcggcgaagcgctcggcggcggtggtggaggaggagaagggctcgctggcatcgccagcgctggagcccgcggaggacgcgccggcgggtcttggagcgggtgacgatgtcgcgtcgtcgcagcccccgaagcgcgcgaaggttgggtgcacggagtcggataccgcgaagccgtcggtggcgccggctgccggcgctgttgcgggtccactgcccaacacggctgggctgcaggccaggaccggcgccatggacaagctggaggccttcttgaagtccaaggaggctcagtccaatccggccggtcataagcaggggactaatgataaagatttatcggcgaagatgaagagagtcatggatttgtcggaggatatatcggagaagataaagagaagcaaggataggttggctgtgttattgaataagccggctgcaggcaccagcaggcgtcaggagccctggtgcagactaatttcacaacattccatgcaccctaccctttctatttacggtgcgattttcacaattggtcatggagcgcatcatgatttcagactggatgaatcatccactgcctcatctgtttgtagactgaagcaagctaagcgaggtgcactccttgaaatctttgaatccaaagttgttcgtgtaaacgggaaatctttggacaaggctgccaaggttaccttaaatggaggagatgaaattatcttctgttcaccagtgaggcatgcttatatatttgagcaacttcatgaggagaaatcaagcacttcagtgttatcttccacttgcacttgcagtagtatccagctggggcaacactcacatttcaatgatattcaggatcatgtgtcatctaaagggcgcaaagcctcatcctttctctttggaagaggtcggtgttcattgttgtcttgtggtctatcagcagacccacttaatatatgtaaaacgacggagggccggagccagtttatctctgaagataatatatcatctggtcggtgtcagctactaaaggaggatttgattaatgcaacggttgatgtgagtgacatctctgagtcatttgatagttgcccatattatctaagtgagcataccaaacatgctctaatgtcagcagcatttgtacatttacattgcaagaactacttcaagtttacaaaagatatatcttctcttagtcaacgagtgctgctatctggcccaacaggaactgatatgtatcaagaatatctggtgaaggcccttgcaaagtattttggtgctagattgctcactatagattcttccatgctgtttggtgggcaaacttccaaggaatcagaatcatacaaaaagggtgatagagtgaggtatattggctcaggcattatccttgatggacagagccctccagattttggttcacagggtgaaatatttcttccttttgaagaaaacagatcatcaaaggttggtgtaaggtttgataaaaaaattctgggaggaaacaatcttggaggcaattgtgaagttgatcatggtttgttctgttctgttgattctttatgccccgacattccaggatgggaggttacgttcaaacatccatttgatgtgatagttgagtttatctctgaagaaattcggcatggccctttaatcctttttctgaaggacacagagaaaatttgtgggaataatgattcctatcatggtctgaagagcaagctaaaacattttccagctggcgcttttataattggatctcaaatccagcctgacaatcgcaaagagaaggcaaatgttagttctccttttctttcgaagttccggtacagccaagctatacttggcctcacattacaggacattgatgggggaaatgataataataaagaaacatcaaaggcaataatgaagcatttgatcaaacttttcccgaataaagtgacacttgaggcaccacaagctgaaatggagctttcacggtggaaccagatgttaaaccgagatattgaagtccttaaaggaaatgcaaacatttcaaaaatacgctcttttctaacaaggcttggattggaatgcactgaccctgaagcgatattggtcacggatcgcattcttacaaatgagtgtattgataaaataattggttttgctttgagccatcaacttaagaactgtacaaatccagacccccctttgggtagtgtgcagtttgctctatccagcggaagtcttaagcatggcgttgacatgttgaaaagtatccagtctggctcgaagagcagcaccaaaaggaaatcacttaaggatattgctactgaaaacgaatttgaaaagagccttcttgctgatgtcacccctccacatgaaattggtgttacctttgaggacattggagctttagaaagtgtcaaagatactctgaaggagttggtgatgcttcctttgcaaagacccgaacttttcaaccgaggacaacttatgaagccatgtaaaggaattttactttttggcccacctggtacggggaagacaaatgctggctaaggctgtggcaactgaggctggtgctaatttcataaacatatcgatgtcaagcatctcttcaaagtggcttggtgaaggagaaaaatttgtgaaagctgtgttttcactggcaagtaaaattgctccaagtgtaatttttgtggacgaggttgatggtgaatttgccagatgcatcaaataggagaaaaattcttagtgtaatactagccaaggaagatttggcagacgacgttgatctagaaactatagctaacctgacagaagggtactcaggcagtgatctcaagaatctgtgtgttactgctgcacaccgtcctattagggagattcttgaaaaggaaaagaaggagagagcttcagcagaagcagaaaatagatcattgcctccgtcacacactagcaatgatgtccgtgcattaagaacaagtgatttcatacatgcgcatgaacaggtgtgtgcaagtgttccctcggattccagtaacatgagcgagcttgtgcaatggaatgatctctatggagaaggcggatcaaggaaaaagacaacgctaagctacttcatgtagcttaggttataaatatattgggagaagtgccctggcacaaagcagcaatagttggaggcggtgcagttggaaaaaaaaagctatgctcatctgccagacatccatatcaaagagaattgatggttcaggtggagcggaatagaatggaatggaatagtatacatacacatggttgctgcctctgctctgggccatgcatcatgcatctggacaggacggctatcctggcttgcagttgccctatgcagttttgagtgcaatggtcaccatctgtgaagcacggataccacagagatcctggccccaaccactcttttcacaaatggagctgaggacctttggagttctaccaaaagtgatcttaaatctttgttctttgactttccgttttgtgaacggaaggccccactctgctagtatggattgttgatcctccgtttctctggtactgactgaactgctcatacaaaactcgttcaacaggcagaaatgctgcctggtggccttctagagtgcttctttgacgccgcagagagcacatcaaaaaaaatgtgtttgtttcgaacgatttgtgctgcattccattcacggcgatatcaggtgccgttgtttgtgtttggttccgcaatcaagggagtgaaagccattagcacatccaatcaaacaaatagcgatatctctttcactgtaccagttagcgctggtctcggatgctattaacattgctgttgtctgtctcggaaccaaacaccgcctaactcgtcggctgttaaatatttctgaactgaattactgcacttggttggggtttcatgcttatcaagttggcttatatagccaacaatactttgtgcagttctgcatcctctgcctgcttatgcgcgatctcattggctgagcggtacgaagataaaacggtagctaatccgaagcgatggcttctctttttctttctacggtattttgtctctatgaattacagttacagcagtcagaacagctgatttaaaaccgcagcgaaaaggctgattgccttgcccatttttgggtgggtggaggttaatacagatttctgtaatttttttactttaatattgtttgacatattgtgcaaggcaaatgatttcctaatgatttgttctacttgatattgtaatccatattgacctatatgctatgctcagttccttagagcatctccagtacttgatattgtaatccatattgacctaggggaaaaaaaggagaatttaacctgatgacactggtggactatgctatgctcagttccttggaacatctctagtagttttgtaaaaaaatctctctaaagacagatgtaaggagttgctacataataatagggagtaaaaatatctgtactctcatgtagtctttatttttagttaccaaatattataaattatgcctgc

SEQ ID NO: 83989 - DNA, 5092 bp, Zea Mays
gaacatattttagtatagtttacgactggacaacacagtctaacctgtcgcgccgctgccgtgcgattggcggtcgccttattccgtctcccctgctaatgcattactaatccaacgaatccttcggttttgtattcttcgcttcctttcgccttcctcttcgcctctctctcgtgttctggcgtcgccgtcgccgctggcgcgagatggtggagacgcggcgaagcgccgcggcgaagcgctcggcggcggtggtggaggaggagaagggctcgctggcatcgccagcgctggagcccgcggaggacgcgccggcgggtcttggagcgggtgacgatgtcgcgtcgtcgcagcccccgaagcgcgcgaaggttgggtgcacggagtcggataccgcgaagccgtcggtggcgccggctgccggcgctgttgcgggtccactgcccaacacggctgggctgcaggccaggaccggcgccatggacaagctggaggccttcttgaagtccaaggaggctcagtccaatccggccggtcataagcaggggactaatgataaagatttatcggcgaagatgaagagagtcatggatttgtcggaggatatatcggagaagataaagagaagcaaggataggttggctgtgttattgaataagccggctgcaggcaccagcaggcgtcaggagccctggtgcagactaatttcacaacattccatggctgtatttgatgcgacgtttggctgcatttgttgggacgtttggctgcatttgttgggaaacttcaatgttccatacttccattgttatcgcttttatgcatatgctactgtataaaagtaggatttaagcaccctaccctttctatttacggtgcgattttcacaattggtcatggagcgcatcatgatttcagactggatgaatcatccactgcctcatctgtttgtagactgaagcaagctaagcgaggtgcactccttgaaatctttgaatccaaagttgttcgtgtaaacgggaaatctttggacaaggctgccaaggttaccttaaatggaggagatgaaattatcttctgttcaccagtgaggcatgcttatatatttgagcaacttcatgaggagaaatcaagcacttcagtgttatcttccacttgcacttgcagtagtatccagctggggcaacactcacatttcaatgatattcaggatcatgtgtcatctaaagggcgcaaagcctcatcctttctctttggaagaggtcggtgttcattgttgtcttgtggtctatcagcagacccacttaatatatgtaaaacgacggagggccggagccagtttatctctgaagataatatatcatctggtcggtgtcagctactaaaggaggatttgattaatgcaacggttgatgtgagtgacatctctgagtcatttgatagttgcccatattatctaagtgagcataccaaacatgctctaatgtcagcagcatttgtacatttacattgcaagaactacttcaagtttacaaaagatatatcttctcttagtcaacgagtgctgctatctggcccaacaggaactgatatgtatcaagaatatctggtgaaggcccttgcaaagtattttggtgctagattgctcactatagattcttccatgctgtttggtgggcaaacttccaaggaatcagaatcatacaaaaagggtgatagagtgaggtatattggctcaggcattatccttgatggacagagccctccagattttggttcacagggtgaaatatttcttccttttgaagaaaacagatcatcaaaggttggtgtaaggtttgataaaaaaattctgggaggaaacaatcttggaggcaattgtgaagttgatcatggtttgttctgttctgttgattctttatgccccgacattccaggatgggaggttacgttcaaacatccatttgatgtgatagttgagtttatctctgaagaaattcggcatggccctttaatcctttttctgaaggacacagagaaaatttgtgggaataatgattcctatcatggtctgaagagcaagctaaaacattttccagctggcgcttttataattggatctcaaatccagcctgacaatcgcaaagagaaggcaaatgttagttctccttttctttcgaagttccggtacagccaagctatacttggcctcacattacaggacattgatgggggaaatgataataataaagaaacatcaaaggcaataatgaagcatttgatcaaacttttcccgaataaagtgacacttgaggcaccacaagctgaaatggagctttcacggtggaaccagatgttaaaccgagatattgaagtccttaaaggaaatgcaaacatttcaaaaatacgctcttttctaacaaggcttggattggaatgcactgaccctgaagcgatattggtcacggatcgcattcttacaaatgagtgtattgataaaataattggttttgctttgagccatcaacttaagaactgtacaaatccagacccccctttgggtagtgtgcagtttgctctatccagcggaagtcttaagcatggcgttgacatgttgaaaagtatccagtctggctcgaagagcagcaccaaaaggaaatcacttaaggatattgctactgaaaacgaatttgaaaagagccttcttgctgatgtcacccctccacatgaaattggtgttacctttgaggacattggagctttagaaagtgtcaaagatactctgaaggagttggtgatgcttcctttgcaaagacccgaacttttcaaccgaggacaacttatgaagccatgtaaaggaattttactttttggcccacctggtacggggaagacaaatgctggctaaggctgtggcaactgaggctggtgctaatttcataaacatatcgatgtcaagcatctcttcaaagtggcttggtgaaggagaaaaatttgtgaaagctgtgttttcactggcaagtaaaattgctccaagtgtaatttttgtggacgaggttgatggcatgttgggaaggcgggagaaccctggagaacatgaagccatgcggaagatgaaaaatgagtttatggtgaactgggatggtctgagaacaagggagaaagaacgtgtattagtacttgctgcaactaacaggccatttgatcttgatgaggctgttgttaggcggcttccaaggaggttgatggtgaatttgccagatgcatcaaataggagaaaaattcttagtgtaatactagccaaggaagatttggcagacgacgttgatctagaaactatagctaacctgacagaagggtactcaggcagtgatctcaagaatctgtgtgttactgctgcacaccgtcctattagggagattcttgaaaaggaaaagaaggagagagcttcagcagaagcagaaaatagatcattgcctccgtcacacactagcaatgatgtccgtgcattaagaacaagtgatttcatacatgcgcatgaacaggtgtgtgcaagtgttccctcggattccagtaacatgagcgagcttgtgcaatggaatgatctctatggagaaggcggatcaaggaaaaagacaacgctaagctacttcatgtagcttaggttataaatatattgggagaagtgccctggcacaaagcagcaatagttggaggcggtgcagttggaaaaaaaaagctatgctcatctgccagacatccatatcaaagagaattgatggttcaggtggagcggaatagaatggaatggaatagtatacatacacatggttgctgcctctgctctgggccatgcatcatgcatctggacaggacggctatcctggcttgcagttgccctatgcagttttgagtgcaatggtcaccatctgtgaagcacggataccacagagatcctggccccaaccactcttttcacaaatggagctgaggacctttggagttctaccaaaagtgatcttaaatctttgttctttgactttccgttttgtgaacggaaggccccactctgctagtatggattgttgatcctccgtttctctggtactgactgaactgctcatacaaaactcgttcaacaggcagaaatgctgcctggtggccttctagagtgcttctttgacgccgcagagagcacatcaaaaaaaatgtgtttgtttcgaacgatttgtgctgcattccattcacggcgatatcaggtgccgttgtttgtgtttggttccgcaatcaagggagtgaaagccattagcacatccaatcaaacaaatagcgatatctctttcactgtaccagttagcgctggtctcggatgctattaacattgctgttgtctgtctcggaaccaaacaccgcctaactcgtcggctgttaaatatttctgaactgaattactgcacttggttggggtttcatgcttatcaagttggcttatatagccaacaatactttgtgcagttctgcatcctctgcctgcttatgcgcgatctcattggctgagcggtacgaagataaaacggtagctaatccgaagcgatggcttctctttttctttctacggtattttgtctctatgaattacagttacagcagtcagaacagctgatttaaaaccgcagcgaaaaggctgattgccttgcccatttttgggtgggtggaggttaatacagatttctgtaatttttttactttaatattgtttgacatattgtgcaaggcaaatgatttcctaatgatttgttctacttgatattgtaatccatattgacctatatgctatgctcagttccttagagcatctccagtacttgatattgtaatccatattgacctaggggaaaaaaaggagaatttaacctgatgacactggtggactatgctatgctcagttccttggaacatctctagtagttttgtaaaaaaatctctctaaagacagatgtaaggagttgctacataataatagggagtaaaaatatctgtactctcatgtagtctttatttttagttaccaaatattataaattatgcctgc

SEQ ID NO: 83990 - DNA, 5124 bp, Zea Mays
acagaacatattttagtatagtttacgactggacaacacagtctaacctgtcgcgccgctgccgtgcgattggcggtcgccttattccgtctcccctgctaatgcattactaatccaacgaatccttcggttttgtattcttcgcttcctttcgccttcctcttcgcctctctctcgtgttctggcgtcgccgtcgccgctggcgcgagatggtggagacgcggcgaagcgccgcggcgaagcgctcggcggcggtggtggaggaggagaagggctcgctggcatcgccagcgctggagcccgcggaggacgcgccggcgggtcttggagcgggtgacgatgtcgcgtcgtcgcagcccccgaagcgcgcgaaggttgggtgcacggagtcggataccgcgaagccgtcggtggcgccggctgccggcgctgttgcgggtccactgcccaacacggctgggctgcaggccaggaccggcgccatggacaagctggaggccttcttgaagtccaaggaggctcagtccaatccggccggtcataagcaggggactaatgataaagatttatcggcgaagatgaagagagtcatggatttgtcggaggatatatcggagaagataaagagaagcaaggataggttggctgtgttattgaataagccggctgcaggcaccagcaggcgtcaggagccctggtgcagactaatttcacaacattccatgcaccctaccctttctatttacggtgcgattttcacaattggtcatggagcgcatcatgatttcagactggatgaatcatccactgcctcatctgtttgtagactgaagcaagctaagcgaggtgcactccttgaaatctttgaatccaaagttgttcgtgtaaacgggaaatctttggacaaggctgccaaggttaccttaaatggaggagatgaaattatcttctgttcaccagtgaggcatgcttatatatttgagcaacttcatgaggagaaatcaagcacttcagtgttatcttccacttgcacttgcagtagtatccagctggggcaacactcacatttcaatgatattcaggatcatgtgtcatctaaagggcgcaaagcctcatcctttctctttggaagaggtcggtgttcattgttgtcttgtggtctatcagcagacccacttaatatatgtaaaacgacggagggccggagccagtttatctctgaagataatatatcatctggtcggtgtcagctactaaaggaggatttgattaatgcaacggttgatgtgagtgacatctctgagtcatttgatagttgcccatattatctaagtgagcataccaaacatgctctaatgtcagcagcatttgtacatttacattgcaagaactacttcaagtttacaaaagatatatcttctcttagtcaacgagtgctgctatctggcccaacaggaactgatatgtatcaagaatatctggtgaaggcccttgcaaagtattttggtgctagattgctcactatagattcttccatgctgtttggtgggcaaacttccaaggaatcagaatcatacaaaaagggtgatagagtgaggtatattggctcaggcattatccttgatggacagagccctccagattttggttcacagggtgaaatatttcttccttttgaagaaaacagatcatcaaaggttggtgtaaggtttgataaaaaaattctgggaggaaacaatcttggaggcaattgtgaagttgatcatggtttgttctgttctgttgattctttatgccccgacattccaggatgggaggttacgttcaaacatccatttgatgtgatagttgagtttatctctgaagaaattcggcatggccctttaatcctttttctgaaggacacagagaaaatttgtgggaataatgattcctatcatggtctgaagagcaagctaaaacattttccagctggcgcttttataattggatctcaaatccagcctgacaatcgcaaagagaaggcaaatgttagttctccttttctttcgaagttccggtacagccaagctatacttggcctcacattacaggacattgatgggggaaatgataataataaagaaacatcaaaggcaataatgaagcatttgatcaaacttttcccgaataaagtgacacttgaggcaccacaagctgaaatggagctttcacggtggaaccagatgttaaaccgagatattgaagtccttaaaggaaatgcaaacatttcaaaaatacgctcttttctaacaaggcttggattggaatgcactgaccctgaagcgatattggtcacggatcgcattcttacaaatgagtgtattgataaaataattggttttgctttgagccatcaacttaagaactgtacaaatccagacccccctttgggtagtgtgcagtttgctctatccagcggaagtcttaagcatggcgttgacatgttgaaaagtatccagtctggctcgaagagcagcaccaaaaggaaatcacttaaggatattgctactgaaaacgaatttgaaaagagccttcttgctgatgtcacccctccacatgaaattggtgttacctttgaggacattggagctttagaaagtgtcaaagatactctgaaggagttggtgatgcttcctttgcaaagacccgaacttttcaaccgaggacaacttatgaagccatgtaaaggaattttactttttggcccacctggtacggggaagacaaatgctggctaaggctgtggcaactgaggctggtgctaatttcataaacatatcgatgtcaagcatctcttcaaagtggcttggtgaaggagaaaaatttgtgaaagctgtgttttcactggcaagtaaaattgctccaagtgtaatttttgtggacgaggatagataatcatgcttgtaaggatatgttgcacttgaactttccttcctgcccttgtcattaagtcagcctttcaacttgggagttgatctgcaatcttatcaacaaggggctggtgctgctgtctagtcaacttgtgaagagataaagggagccccaggttgatggcatgttgggaaggcgggagaaccctggagaacatgaagccatgcggaagatgaaaaatgagtttatggtgaactgggatggtctgagaacaagggagaaagaacgtgtattagtacttgctgcaactaacaggccatttgatcttgatgaggctgttgttaggcggcttccaaggaggttgatggtgaatttgccagatgcatcaaataggagaaaaattcttagtgtaatactagccaaggaagatttggcagacgacgttgatctagaaactatagctaacctgacagaagggtactcaggcagtgatctcaagaatctgtgtgttactgctgcacaccgtcctattagggagattcttgaaaaggaaaagaaggagagagcttcagcagaagcagaaaatagatcattgcctccgtcacacactagcaatgatgtccgtgcattaagaacaagtgatttcatacatgcgcatgaacaggtgtgtgcaagtgttccctcggattccagtaacatgagcgagcttgtgcaatggaatgatctctatggagaaggcggatcaaggaaaaagacaacgctaagctacttcatgtagcttaggttataaatatattgggagaagtgccctggcacaaagcagcaatagttggaggcggtgcagttggaaaaaaaaagctatgctcatctgccagacatccatatcaaagagaattgatggttcaggtggagcggaatagaatggaatggaatagtatacatacacatggttgctgcctctgctctgggccatgcatcatgcatctggacaggacggctatcctggcttgcagttgccctatgcagttttgagtgcaatggtcaccatctgtgaagcacggataccacagagatcctggccccaaccactcttttcacaaatggagctgaggacctttggagttctaccaaaagtgatcttaaatctttgttctttgactttccgttttgtgaacggaaggccccactctgctagtatggattgttgatcctccgtttctctggtactgactgaactgctcatacaaaactcgttcaacaggcagaaatgctgcctggtggccttctagagtgcttctttgacgccgcagagagcacatcaaaaaaaatgtgtttgtttcgaacgatttgtgctgcattccattcacggcgatatcaggtgccgttgtttgtgtttggttccgcaatcaagggagtgaaagccattagcacatccaatcaaacaaatagcgatatctctttcactgtaccagttagcgctggtctcggatgctattaacattgctgttgtctgtctcggaaccaaacaccgcctaactcgtcggctgttaaatatttctgaactgaattactgcacttggttggggtttcatgcttatcaagttggcttatatagccaacaatactttgtgcagttctgcatcctctgcctgcttatgcgcgatctcattggctgagcggtacgaagataaaacggtagctaatccgaagcgatggcttctctttttctttctacggtattttgtctctatgaattacagttacagcagtcagaacagctgatttaaaaccgcagcgaaaaggctgattgccttgcccatttttgggtgggtggaggttaatacagatttctgtaatttttttactttaatattgtttgacatattgtgcaaggcaaatgatttcctaatgatttgttctacttgatattgtaatccatattgacctatatgctatgctcagttccttagagcatctccagtacttgatattgtaatccatattgacctaggggaaaaaaaggagaatttaacctgatgacactggtggactatgctatgctcagttccttggaacatctctagtagttttgtaaaaaaatctctctaaagacagatgtaaggagttgctacataataatagggagtaaaaatatctgtactctcatgtagtctttatttttagttaccaaatattataaattatgcctgc

SEQ ID NO: 83991 - DNA, 5370 bp, Zea Mays
cggggataaggaagaagatgagctcaggcgccgctcgaagaacctgcgtacggcaaaaatatcggatggtagcgatgagtggatgagcacaagcaaaaatatctaccgccgtccgccgtgcaagggagagtttgatacgtggaaaagaaaaggctgagagagaaacggattttgttttcccacagaacatattttagtatagtttacgactggacaacacagtctaacctgtcgcgccgctgccgtgcgattggcggtcgccttattccgtctcccctgctaatgcattactaatccaacgaatccttcggttttgtattcttcgcttcctttcgccttcctcttcgcctctctctcgtgttctggcgtcgccgtcgccgctggcgcgagatggtggagacgcggcgaagcgccgcggcgaagcgctcggcggcggtggtggaggaggagaagggctcgctggcatcgccagcgctggagcccgcggaggacgcgccggcgggtcttggagcgggtgacgatgtcgcgtcgtcgcagcccccgaagcgcgcgaaggttgggtgcacggagtcggataccgcgaagccgtcggtggcgccggctgccggcgctgttgcgggtccactgcccaacacggctgggctgcaggccaggaccggcgccatggacaagctggaggccttcttgaagtccaaggaggctcagtccaatccggccggtcataagcaggggactaatgataaagatttatcggcgaagatgaagagagtcatggatttgtcggaggatatatcggagaagataaagagaagcaaggataggttggctgtgttattgaataagccggctgcaggcaccagcaggcgtcaggagccctggtgcagactaatttcacaacattccatggctgtatttgatgcgacgtttggctgcatttgttgggacgtttggctgcatttgttgggaaacttcaatgttccatacttccattgttatcgcttttatgcatatgctactgtataaaagtaggatttaagcaccctaccctttctatttacggtgcgattttcacaattggtcatggagcgcatcatgatttcagactggatgaatcatccactgcctcatctgtttgtagactgaagcaagctaaggctgccaaggttaccttaaatggaggagatgaaattatcttctgttcaccagtgaggcatgcttatatatttgagcaacttcatgaggagaaatcaagcacttcagtgttatcttccacttgcacttgcagtagtatccagctggggcaacactcacatttcaatgatattcaggatcatgtgtcatctaaagggcgcaaagcctcatcctttctctttggaagaggtcggtgttcattgttgtcttgtggtctatcagcagacccacttaatatatgtaaaacgacggagggccggagccagtttatctctgaagataatatatcatctggtcggtgtcagctactaaaggaggatttgattaatgcaacggttgatgtgagtgacatctctgagtcatttgatagttgcccatattatctaagtgagcataccaaacatgctctaatgtcagcagcatttgtacatttacattgcaagaactacttcaagtttacaaaagatatatcttctcttagtcaacgagtgctgctatctggcccaacaggaactgatatgtatcaagaatatctggtgaaggcccttgcaaagtattttggtgctagattgctcactatagattcttccatgctgtttggtgggcaaacttccaaggaatcagaatcatacaaaaagggtgatagagtgaggtatattggctcaggcattatccttgatggacagagccctccagattttggttcacagggtgaaatatttcttccttttgaagaaaacagatcatcaaaggttggtgtaaggtttgataaaaaaattctgggaggaaacaatcttggaggcaattgtgaagttgatcatggtttgttctgttctgttgattctttatgccccgacattccaggatgggaggttacgttcaaacatccatttgatgtgatagttgagtttatctctgaagaaattcggcatggccctttaatcctttttctgaaggacacagagaaaatttgtgggaataatgattcctatcatggtctgaagagcaagctaaaacattttccagctggcgcttttataattggatctcaaatccagcctgacaatcgcaaagagaaggcaaatgttagttctccttttctttcgaagttccggtacagccaagctatacttggcctcacattacaggacattgatgggggaaatgataataataaagaaacatcaaaggcaataatgaagcatttgatcaaacttttcccgaataaagtgacacttgaggcaccacaagctgaaatggagctttcacggtggaaccagatgttaaaccgagatattgaagtccttaaaggaaatgcaaacatttcaaaaatacgctcttttctaacaaggcttggattggaatgcactgaccctgaagcgatattggtcacggatcgcattcttacaaatgagtgtattgataaaataattggttttgctttgagccatcaacttaagaactgtacaaatccagacccccctttgggtagtgtgcagtttgctctatccagcggaagtcttaagcatggcgttgacatgttgaaaagtatccagtctggctcgaagagcagcaccaaaaggaaatcacttaaggatattgctactgaaaacgaatttgaaaagagccttcttgctgatgtcacccctccacatgaaattggtgttacctttgaggacattggagctttagaaagtgtcaaagatactctgaaggagttggtgatgcttcctttgcaaagacccgaacttttcaaccgaggacaacttatgaagccatgtaaaggaattttactttttggcccacctggtacggggaagacaaatgctggctaaggctgtggcaactgaggctggtgctaatttcataaacatatcgatgtcaagcatctcttcaaagtggcttggtgaaggagaaaaatttgtgaaagctgtgttttcactggcaagtaaaattgctccaagtgtaatttttgtggacgaggatagataatcatgcttgtaaggatatgttgcacttgaactttccttcctgcccttgtcattaagtcagcctttcaacttgggagttgatctgcaatcttatcaacaaggggctggtgctgctgtctagtcaacttgtgaagagataaagggagccccaggttgatggcatgttgggaaggcgggagaaccctggagaacatgaagccatgcggaagatgaaaaatgagtttatggtgaactgggatggtctgagaacaagggagaaagaacgtgtattagtacttgctgcaactaacaggccatttgatcttgatgaggctgttgttaggcggcttccaaggaggttgatggtgaatttgccagatgcatcaaataggagaaaaattcttagtgtaatactagccaaggaagatttggcagacgacgttgatctagaaactatagctaacctgacagaagggtactcaggcagtgatctcaagaatctgtgtgttactgctgcacaccgtcctattagggagattcttgaaaaggaaaagaaggagagagcttcagcagaagcagaaaatagatcattgcctccgtcacacactagcaatgatgtccgtgcattaagaacaagtgatttcatacatgcgcatgaacaggtgtgtgcaagtgttccctcggattccagtaacatgagcgagcttgtgcaatggaatgatctctatggagaaggcggatcaaggaaaaagacaacgctaagctacttcatgtagcttaggttataaatatattgggagaagtgccctggcacaaagcagcaatagttggaggcggtgcagttggaaaaaaaaagctatgctcatctgccagacatccatatcaaagagaattgatggttcaggtggagcggaatagaatggaatggaatagtatacatacacatggttgctgcctctgctctgggccatgcatcatgcatctggacaggacggctatcctggcttgcagttgccctatgcagttttgagtgcaatggtcaccatctgtgaagcacggataccacagagatcctggccccaaccactcttttcacaaatggagctgaggacctttggagttctaccaaaagtgatcttaaatctttgttctttgactttccgttttgtgaacggaaggccccactctgctagtatggattgttgatcctccgtttctctggtactgactgaactgctcatacaaaactcgttcaacaggcagaaatgctgcctggtggccttctagagtgcttctttgacgccgcagagagcacatcaaaaaaaatgtgtttgtttcgaacgatttgtgctgcattccattcacggcgatatcaggtgccgttgtttgtgtttggttccgcaatcaagggagtgaaagccattagcacatccaatcaaacaaatagcgatatctctttcactgtaccagttagcgctggtctcggatgctattaacattgctgttgtctgtctcggaaccaaacaccgcctaactcgtcggctgttaaatatttctgaactgaattactgcacttggttggggtttcatgcttatcaagttggcttatatagccaacaatactttgtgcagttctgcatcctctgcctgcttatgcgcgatctcattggctgagcggtacgaagataaaacggtagctaatccgaagcgatggcttctctttttctttctacggtattttgtctctatgaattacagttacagcagtcagaacagctgatttaaaaccgcagcgaaaaggctgattgccttgcccatttttgggtgggtggaggttaatacagatttctgtaatttttttactttaatattgtttgacatattgtgcaaggcaaatgatttcctaatgatttgttctacttgatattgtaatccatattgacctatatgctatgctcagttccttagagcatctccagtacttgatattgtaatccatattgacctaggggaaaaaaaggagaatttaacctgatgacactggtggactatgctatgctcagttccttggaacatctctagtagttttgtaaaaaaatctctctaaagacagatgtaaggagttgctacataataatagggagtaaaaatatctgtactctcatgtagtctttatttttagttaccaaatattataaattatgcctgc

SEQ ID NO: 83992 - DNA, 3261 bp, Zea Mays
gtgcgattggcggtcgccttattccgtctcccctgctaatgcattactaatccaacgaatccttcggttttgtattcttcgcttcctttcgccttcctcttcgcctctctctcgtgttctggcgtcgccgtcgccgctggcgcgagatggtggagacgcggcgaagcgccgcggcgaagcgctcggcggcggtggtggaggaggagaagggctcgctggcatcgccagcgctggagcccgcggaggacgcgccggcgggtcttggagcgggtgacgatgtcgcgtcgtcgcagcccccgaagcgcgcgaaggttgggtgcacggagtcggataccgcgaagccgtcggtggcgccggctgccggcgctgttgcgggtccactgcccaacacggctgggctgcaggccaggaccggcgccatggacaagctggaggccttcttgaagtccaaggaggctcagtccaatccggccggtcataagcaggggactaatgataaagatttatcggcgaagatgaagagagtcatggatttgtcggaggatatatcggagaagataaagagaagcaaggataggttggctgtgttattgaataagccggctgcaggcaccagcaggcgtcaggagccctggtgcagactaatttcacaacattccatgcaccctaccctttctatttacggtgcgattttcacaattggtcatggagcgcatcatgatttcagactggatgaatcatccactgcctcatctgtttgtagactgaagcaagctaagcgaggtgcactccttgaaatctttgaatccaaagttgttcgtgtaaacgggaaatctttggacaaggctgccaaggttaccttaaatggaggagatgaaattatcttctgttcaccagtgaggcatgcttatatatttgagcaacttcatgaggagaaatcaagcacttcagtgttatcttccacttgcacttgcagtagtatccagctggggcaacactcacatttcaatgatattcaggatcatgtgtcatctaaagggcgcaaagcctcatcctttctctttggaagaggtctatcagcagacccacttaatatatgtaaaacgacggagggccggagccagtttatctctgaagataatatatcatctggtcggtgtcagctactaaaggaggatttgattaatgcaacggttgatgtgagtgacatctctgagtcatttgatagttgcccatattatctaagtgagcataccaaacatgctctaatgtcagcagcatttgtacatttacattgcaagaactacttcaagtttacaaaagatatatcttctcttagtcaacgagtgctgctatctggcccaacaggaactgatatgtatcaagaatatctggtgaaggcccttgcaaagtattttggtgctagattgctcactatagattcttccatgctgtttggtgggcaaacttccaaggaatcagaatcatacaaaaagggtgatagagtgaggtatattggctcaggcattatccttgatggacagagccctccagattttggttcacagggtgaaatatttcttccttttgaagaaaacagatcatcaaaggttggtgtaaggtttgataaaaaaattctgggaggaaacaatcttggaggcaattgtgaagttgatcatggtttgttctgttctgttgattctttatgccccgacattccaggatgggaggttacgttcaaacatccatttgatgtgatagttgagtttatctctgaagaaattcggcatggccctttaatcctttttctgaaggacacagagaaaatttgtgggaataatgattcctatcatggtctgaagagcaagctaaaacattttccagctggcgcttttataattggatctcaaatccagcctgacaatcgcaaagagaaggcaaatgttagttctccttttctttcgaagttccggtacagccaagctatacttggcctcacattacaggacattgatgggggaaatgataataataaagaaacatcaaaggcaataatgaagcatttgatcaaacttttcccgaataaagtgacacttgaggcaccacaagctgaaatggagctttcacggtggaaccagatgttaaaccgagatattgaagtccttaaaggaaatgcaaacatttcaaaaatacgctcttttctaacaaggcttggattggaatgcactgaccctgaagcgatattggtcacggatcgcattcttacaaatgagtgtattgataaaataattggttttgctttgagccatcaacttaagaactgtacaaatccagacccccctttgggtagtgtgcagtttgctctatccagcggaagtcttaagcatggcgttgacatgttgaaaagtatccagtctggctcgaagagcagcaccaaaaggaaatcacttaaggatattgctactgaaaacgaatttgaaaagagccttcttgctgatgtcacccctccacatgaaattggtgttacctttgaggacattggagctttagaaagtgtcaaagatactctgaaggagttggtgatgcttcctttgcaaagacccgaacttttcaaccgaggacaacttatgaagccatgtaaaggaattttactttttggcccacctggtacggggaagacaaatgctggctaaggctgtggcaactgaggctggtgctaatttcataaacatatcgatgtcaagcatctcttcaaagtggcttggtgaaggagaaaaatttgtgaaagctgtgttttcactggcaagtaaaattgctccaagtgtaatttttgtggacgaggttgatggcatgttgggaaggcgggagaaccctggagaacatgaagccatgcggaagatgaaaaatgagtttatggtgaactgggatggtctgagaacaagggagaaagaacgtgtattagtacttgctgcaactaacaggccatttgatcttgatgaggctgttgttaggcggcttccaaggaggttgatggtgaatttgccagatgcatcaaataggagaaaaattcttagtgtaatactagccaaggaagatttggcagacgacgttgatctagaaactatagctaacctgacagaagggtactcaggcagtgatctcaagaatctgtgtgttactgctgcacaccgtcctattagggagattcttgaaaaggaaaagaaggaattgcaattgagtttcaagtggatttgctcacat

SEQ ID NO: 83993 - DNA, 1421 bp, Zea Mays
gatcatcaaaggttggtgtaaggtttgataaaaaaattctgggaggaaacaatcttggaggcaattgtgaagttgatcatggtttgttctgttctgttgattctttatgccccgacattccaggatgggaggttacgttcaaacatccatttgatgtgatagttgagtttatctctgaagaaattcggcatggccctttaatcctttttctgaaggacacagagaaaatttgtgggaataatgattcctatcatggtctgaagagcaagctaaaacattttccagctggcgcttttataattggatctcaaatccagcctgacaatcgcaaagagaaggcaaatgttagttctccttttctttcgaagttccggtacagccaagctatacttggcctcacattacaggacattgatgggggaaatgataataataaagaaacatcaaaggcaataatgaagcatttgatcaaacttttcccgaataaagtgacacttgaggcaccacaagctgaaatggagctttcacggtggaaccagatgttaaaccgagatattgaagtccttaaaggaaatgcaaacatttcaaaaatacgctcttttctaacaaggcttggattggaatgcactgaccctgaagcgatattggtcacggatcgcattcttacaaatgagtgtattgataaaataattggttttgctttgagccatcaacttaagaactgtacaaatccagacccccctttgggtagtgtgcagtttgctctatccagcggaagtcttaagcatggcgttgacatgttgaaaagtatccagtctggctcgaagagcagcaccaaaaggaaatcacttaaggatattgctactgaaaacgaatttgaaaagagccttcttgctgatgtcacccctccacatgaaattggtgttacctttgaggacattggagctttagaaagtgtcaaagatactctgaaggagttggtgatgcttcctttgcaaagacccgaacttttcaaccgaggacaacttatgaagccatgtaaaggaattttactttttggcccacctggtacggggaagacaaatgctggctaaggctgtggcaactgaggctggtgctaatttcataaacatatcgatgtcaagcatctcttcaaagtggcttggtgaaggagaaaaatttgtgaaagctgtgttttcactggcaagtaaaattgctccaagtgtaatttttgtggacgaggtaagttttttttctcgaaatgcacaggagaattgcgcctcattatattaagaagaaataagaaccaaggtctaaagaaagtcgcgatacagagaaaccacttacagctatgtttggatactttagtatttgacttgcacatttgacttgcacgtgtgcagccacctggatcccatgaa

SEQ ID NO: 83994 - DNA, 478 bp, Zea Mays
atttagctggcgaggagacaaggcagcgattgagtaccaggatgagtctattcaatgtcgctgaggcaacagttacaagatcctggaagaaaactcgtggcagctctacactacaataagggtgataaagatgtctcgcccaatggaagatatcatatttagacatgatcaaggtagcataggtacatgtaatatggatacataaacccattattattatgttattattatttagaagtgaaggaagacttggatgcaagtttgctgcattgatatcatctttcagataccccggcccccgtgccagtggccttcatgctcctttaaaggatgtgaaaaacacactttctgtgagatctattcttaaagctccagaaaaaggcacattcagacgcacagcaaagaaaacaggtctaggcccagaacttgaattttgattgatgtcttttttgaaatctaatgattccattgagagttc

SEQ ID NO: 83995 - DNA, 2416 bp, Zea Mays
tgcctgcgagcaatcgactccgattcgtcgtaggggctactccaatgcatgcagttaagttagtcgtggagttctaagggaaggatcggcatgctctacagagaagtgttgcagagcgttaaaagcagtttgggaagactacagaaatacccaaaaagatcgccccctagcttctgaatccttcaattctctagcctgtaaaagaacaagccagggttgtctggctcgattagggaacatgttctctcctggcttcgtttcagcatcaaagccattgccaagctggccaattttgagtgcaggaacatctgtaactgtggctcttgttttgtcattgtttctaacctttgagcatctgtgtgcataccatcaacctgaggagcaaaaattcatgattggtctgattctgatggttccagtatatgctgttcaatcattcttttcattactgaattcaaatgttgcattcatctgtgaactgatgcgtgactgttacgaggcatttgccatgtattgtttcgagagatatttgatagcatgcttaggtggagaagaaagtaccattaggtttatggagggtcggcttcaaatcagtgagagctcacctctgctagatattgattatgattatggcattgtgaaacatcctttcccattgagctgctttatgagaaattggtacctcggtcctgacttctaccatgctgtgaagattggtattgtgcaatatatgatcctcaagcctatctgtgctgttttggcaattttctttgaacttcttggaatctatggagaaggaaagtttgcgtggaaatacgggtatccatatttggctgttgtcctaaatttcagccagacgtgggcattatattgtcttatacagttttatactgctaccaaggagaagctgcaacctataaagcccctgtccaagtttcttactttcaaatctattgtatttttgacctggtggcagggtgttgctgttgcgtttcttttctcaactgggctttttaatggacatttggcacaaaggtttcaaacacgtatccaggattacattatatgccttgagatgggggttgcggcagtggtccatttaaaagtgtttccagctaaaccttaccgacgtggggaaagaaatgttcccaatgttgctgtcatgtctgattatgcatcactgggagctccagaccctgaagaaattggagggatcgacagcttaacaatcttgcaaactcctgtcactaaagacaggcagctgagtttttctcagagtgttcgtgatgttgtgttgggcagcggtgaaatcatggttgatgatgttaaatatacagtttcacatgtcgtggagcctatggagcggagttttacaaagataaataagacaattcatcaaatctcagaaaacgtcaagcagcttgagaagcaaaagaggaaggcaaaggacgacagtcatcttattcccctagaaccatggtcagaggaattttcagaagctcatgaccatgttgcgggcggtagtgccagtgacagcggattagctaagacaaggtacaacaggatcttaaataggccccggaggtcattcgagtccagattgcgcagatggttctagcagccagccggtgctagtgggttaattgattttgatcaaaagaggcggttaaccttttcgctccggttgtttgacaaaatgatagcaattctgacaaactagttctccctccgttcttttcttctttatttgctggtgacaaatattcgagaacggagtttggagtttggcacggggtggaggcagtagccagcagctcttcattattttgtgggtgacaaatattcatgaacggagtttggagtttggcacggggtggaggcagtagccagcagctgcttcctgttgtttatagcttgaccctgggctctttcccattttggaggctgtagctacacgagtttttgatgttagcgtccttgtttagaacttacctcttaggatcggcaaataccgatgtaacctgttgcttcctagagttagtataaagtaccatgctttgaactggggttctagtttagaattcatctttgaggacggcgaagtaaaaggtttctctggaactgtttcagctggaatgatatgtttatttgtattaatattgattaggcagcgttcgttttgtacggaatggggctggaactattctaggttgatcaatattaatacaaaataagcttatcaatttttagggcaaacgaacgaggacaatagtttctagcctcaatccgagataaatgagggtcctaatatggatgcaatccgtttcttcttctagaatgagtaggaagtaacatgcatggaacagagagatttgtaatctgggggtaaacatggttttaaagtgaaataaaagaa

SEQ ID NO: 83996 - DNA, 2338 bp, Zea Mays
ctaatttgttcataattttttcccgtttgcttgcctgcgagcaatcgactccgattcgtcgtaggggctactccaatgcatgcagttaagttagtcgtggagttctaagggaaggatcggcatgctctacagagaagtgttgcagagcgttaaaagcagtttgggaagactacagaaatacccaaaaagatcgccccctagcttctgaatccttcaattctctagcctgtaaaagaacaagccagggttgtctggctcgattagggaacatgttctctcctggcttcgtttcagcatcaaagccattgccaagctggccaattttgagtgcaggaacatctgtaactgtggctcttgttttgtcattgtttctaacctttgagcatctgtgtgcataccatcaacctgaggagcaaaaattcatgattggtctgattctgatggttccagtatatgctgttcaatcagtggagaagaaagtaccattaggtttatggagggtcggcttcaaatcagtgagagctcacctctgctagatattgattatgattatggcattgtgaaacatcctttcccattgagctgctttatgagaaattggtacctcggtcctgacttctaccatgctgtgaagattggtattgtgcaatatatgatcctcaagcctatctgtgctgttttggcaattttctttgaacttcttggaatctatggagaaggaaagtttgcgtggaaatacgggtatccatatttggctgttgtcctaaatttcagccagacgtgggcattatattgtcttatacagttttatactgctaccaaggagaagctgcaacctataaagcccctgtccaagtttcttactttcaaatctattgtatttttgacctggtggcagggtgttgctgttgcgtttcttttctcaactgggctttttaatggacatttggcacaaaggtttcaaacacgtatccaggattacattatatgccttgagatgggggttgcggcagtggtccatttaaaagtgtttccagctaaaccttaccgacgtggggaaagaaatgttcccaatgttgctgtcatgtctgattatgcatcactgggagctccagaccctgaagaaattggagggatcgacagcttaacaatcttgcaaactcctgtcactaaagacaggcagctgagtttttctcagagtgttcgtgatgttgtgttgggcagcggtgaaatcatggttgatgatgttaaatatacagtttcacatgtcgtggagcctatggagcggagttttacaaagataaataagacaattcatcaaatctcagaaaacgtcaagcagcttgagaagcaaaagaggaaggcaaaggacgacagtcatcttattcccctagaaccatggtcagaggaattttcagaagctcatgaccatgttgcgggcggtagtgccagtgacagcggattagctaagacaaggtacaacaggatcttaaataggccccggaggtcattcgagtccagattgcgcagatggttctagcagccagccggtgctagtgggttaattgattttgatcaaaagaggcggttaaccttttcgctccggttgtttgacaaaatgatagcaattctgacaaactagttctccctccgttcttttcttctttatttgctggtgacaaatattcgagaacggagtttggagtttggcacggggtggaggcagtagccagcagctcttcattattttgtgggtgacaaatattcatgaacggagtttggagtttggcacggggtggaggcagtagccagcagctgcttcctgttgtttatagcttgaccctgggctctttcccattttggaggctgtagctacacgagtttttgatgttagcgtccttgtttagaacttacctcttaggatcggcaaataccgatgtaacctgttgcttcctagagttagtataaagtaccatgctttgaactggggttctagtttagaattcatctttgaggacggcgaagtaaaaggtttctctggaactgtttcagctggaatgatatgtttatttgtattaatattgattaggcagcgttcgttttgtacggaatggggctggaactattctaggttgatcaatattaatacaaaataagcttatcaatttttagggcaaacgaacgaggacaatagtttctagcctcaatccgagataaatgagggtcctaatatggatgcaatccgtttcttcttctagaatgagtaggaagtaacatgcatggaacagagagatttgtaatctgggggtaaacatggttttaaagtgaaataaaagaa

SEQ ID NO: 83997 - DNA, 2586 bp, Zea Mays
actgcactgcaccgcaagccgtcgtcaccaagagggaggaatgcggtaagcggcaagcctattccgtcttctactgtcctgttccgccgaacacgtcgccaggtctccttccgccagagcacgccacctcgaatccccctccctgctcaagtgctcggcgactcggcacctccgccccacgtctttctccaccgaccacctgccccgacccctcctcgaccggcgtcgagtggggatccatcaggactggttggatcggcatgctctacagagaagtgttgcagagcgttaaaagcagtttgggaagactacagaaatacccaaaaagatcgccccctagcttctgaatccttcaattctctagcctgtaaaagaacaagccagggttgtctggctcgattagggaacatgttctctcctggcttcgtttcagcatcaaagccattgccaagctggccaattttgagtgcaggaacatctgtaactgtggctcttgttttgtcattgtttctaacctttgagcatctgtgtgcataccatcaacctgaggagcaaaaattcatgattggtctgattctgatggttccagtatatgctgttcaatcattcttttcattactgaattcaaatgttgcattcatctgtgaactgatgcgtgactgttacgaggcatttgccatgtattgtttcgagagatatttgatagcatgcttaggtggagaagaaagtaccattaggtttatggagggtcggcttcaaatcagtgagagctcacctctgctagatattgattatgattatggcattgtgaaacatcctttcccattgagctgctttatgagaaattggtacctcggtcctgacttctaccatgctgtgaagattggtattgtgcaatatatgatcctcaagcctatctgtgctgttttggcaattttctttgaacttcttggaatctatggagaaggaaagtttgcgtggaaatacgggtatccatatttggctgttgtcctaaatttcagccagacgtgggcattatattgtcttatacagttttatactgctaccaaggagaagctgcaacctataaagcccctgtccaagtttcttactttcaaatctattgtatttttgacctggtggcagggtgttgctgttgcgtttcttttctcaactgggctttttaatggacatttggcacaaaggtttcaaacacgtatccaggattacattatatgccttgagatgggggttgcggcagtggtccatttaaaagtgtttccagctaaaccttaccgacgtggggaaagaaatgttcccaatgttgctgtcatgtctgattatgcatcactgggagctccagaccctgaagaaattggagggatcgacagcttaacaatcttgcaaactcctgtcactaaagacaggcagctgagtttttctcagagtgttcgtgatgttgtgttgggcagcggtgaaatcatggttgatgatgttaaatatacagtttcacatgtcgtggagcctatggagcggagttttacaaagataaataagacaattcatcaaatctcagaaaacgtcaagcagcttgagaagcaaaagaggaaggcaaaggacgacagtcatcttattcccctagaaccatggtcagaggaattttcagaagctcatgaccatgttgcgggcggtagtgccagtgacagcggattagctaagacaaggtacaacaggatcttaaataggccccggaggtcattcgagtccagattgcgcagatggttctagcagccagccggtgctagtgggttaattgattttgatcaaaagaggcggttaaccttttcgctccggttgtttgacaaaatgatagcaattctgacaaactagttctccctccgttcttttcttctttatttgctggtgacaaatattcgagaacggagtttggagtttggcacggggtggaggcagtagccagcagctcttcattattttgtgggtgacaaatattcatgaacggagtttggagtttggcacggggtggaggcagtagccagcagctgcttcctgttgtttatagcttgaccctgggctctttcccattttggaggctgtagctacacgagtttttgatgttagcgtccttgtttagaacttacctcttaggatcggcaaataccgatgtaacctgttgcttcctagagttagtataaagtaccatgctttgaactggggttctagtttagaattcatctttgaggacggcgaagtaaaaggtttctctggaactgtttcagctggaatgatatgtttatttgtattaatattgattaggcagcgttcgttttgtacggaatggggctggaactattctaggttgatcaatattaatacaaaataagcttatcaatttttagggcaaacgaacgaggacaatagtttctagcctcaatccgagataaatgagggtcctaatatggatgcaatccgtttcttcttctagaatgagtaggaagtaacatgcatggaacagagagatttgtaatctgggggtaaacatggttttaaagtgaaataaaagaa

SEQ ID NO: 83998 - DNA, 2656 bp, Zea Mays
aaagtctgggcccacctgcagactgcagtgttatccccctccttccgctttcggttctcaaagccgtgcactgcactgcaccgcaagccgtcgtcaccaagagggaggaatgcggtaagcggcaagcctattccgtcttctactgtcctgttccgccgaacacgtcgccaggtctccttccgccagagcacgccacctcgaatccccctccctgctcaagtgctcggcgactcggcacctccgccccacgtctttctccaccgaccacctgccccgacccctcctcgaccggcgtcgagtggggatccatcaggactgggaaggatcggcatgctctacagagaagtgttgcagagcgttaaaagcagtttgggaagactacagaaatacccaaaaagatcgccccctagcttctgaatccttcaattctctagcctgtaaaagaacaagccagggttgtctggctcgattagggaacatgttctctcctggcttcgtttcagcatcaaagccattgccaagctggccaattttgagtgcaggaacatctgtaactgtggctcttgttttgtcattgtttctaacctttgagcatctgtgtgcataccatcaacctgaggagcaaaaattcatgattggtctgattctgatggttccagtatatgctgttcaatcattcttttcattactgaattcaaatgttgcattcatctgtgaactgatgcgtgactgttacgaggcatttgccatgtattgtttcgagagatatttgatagcatgcttaggtggagaagaaagtaccattaggtttatggagggtcggcttcaaatcagtgagagctcacctctgctagatattgattatgattatggcattgtgaaacatcctttcccattgagctgctttatgagaaattggtacctcggtcctgacttctaccatgctgtgaagattggtattgtgcaatatatgatcctcaagcctatctgtgctgttttggcaattttctttgaacttcttggaatctatggagaaggaaagtttgcgtggaaatacgggtatccatatttggctgttgtcctaaatttcagccagacgtgggcattatattgtcttatacagttttatactgctaccaaggagaagctgcaacctataaagcccctgtccaagtttcttactttcaaatctattgtatttttgacctggtggcagggtgttgctgttgcgtttcttttctcaactgggctttttaatggacatttggcacaaaggtttcaaacacgtatccaggattacattatatgccttgagatgggggttgcggcagtggtccatttaaaagtgtttccagctaaaccttaccgacgtggggaaagaaatgttcccaatgttgctgtcatgtctgattatgcatcactgggagctccagaccctgaagaaattggagggatcgacagcttaacaatcttgcaaactcctgtcactaaagacaggcagctgagtttttctcagagtgttcgtgatgttgtgttgggcagcggtgaaatcatggttgatgatgttaaatatacagtttcacatgtcgtggagcctatggagcggagttttacaaagataaataagacaattcatcaaatctcagaaaacgtcaagcagcttgagaagcaaaagaggaaggcaaaggacgacagtcatcttattcccctagaaccatggtcagaggaattttcagaagctcatgaccatgttgcgggcggtagtgccagtgacagcggattagctaagacaaggtacaacaggatcttaaataggccccggaggtcattcgagtccagattgcgcagatggttctagcagccagccggtgctagtgggttaattgattttgatcaaaagaggcggttaaccttttcgctccggttgtttgacaaaatgatagcaattctgacaaactagttctccctccgttcttttcttctttatttgctggtgacaaatattcgagaacggagtttggagtttggcacggggtggaggcagtagccagcagctcttcattattttgtgggtgacaaatattcatgaacggagtttggagtttggcacggggtggaggcagtagccagcagctgcttcctgttgtttatagcttgaccctgggctctttcccattttggaggctgtagctacacgagtttttgatgttagcgtccttgtttagaacttacctcttaggatcggcaaataccgatgtaacctgttgcttcctagagttagtataaagtaccatgctttgaactggggttctagtttagaattcatctttgaggacggcgaagtaaaaggtttctctggaactgtttcagctggaatgatatgtttatttgtattaatattgattaggcagcgttcgttttgtacggaatggggctggaactattctaggttgatcaatattaatacaaaataagcttatcaatttttagggcaaacgaacgaggacaatagtttctagcctcaatccgagataaatgagggtcctaatatggatgcaatccgtttcttcttctagaatgagtaggaagtaacatgcatggaacagagagatttgtaatctgggggtaaacatggttttaaagtgaaataaaagaa

SEQ ID NO: 83999 - DNA, 2286 bp, Zea Mays
cccggtcgtctttctttcgggcctctccgagtggtcaataaaccccgcctcccttctgtcatcccgtacgtctcgacctcgcagccgcaaacgcgaaaccctagcctcgagctctatctccggccacagctggtcaggttagcgacgaaggatgagcaggcgctggagccgcacgatctacgtcgggaacctccccggcgacatccgggagagggaggtggaggatctgttctacaagtatggtaaaattgttgacattgacctgaaggtccccccaagaccacctggttatgcttttgttgagtttgaagatcctcgtgatgctgaggaggcaattgctggacgggatggatacaactttgatggacaccgtctaagagtggaggctgctcatggtggtagaggtaatgcttcctcgcatgatcgttcaagtggctttggtggcggtggtggagcacgtcgtggtgtgtcgagacactcagagtatcgtgttcttgtcactggactgccttcttctgcatcatggcaggatttaaaggatcatatgcggaaggctggtgatgtttgtttctctgaagtgtatcgcgaaggcggtggcaccgtaggaattgtggactacacaaattatgatgatatgaaatatgctataaagaagctggatgatactgaattcaggaacgcctttgggcgagcctatataagggtgaaggaatataacggcaaacgtggtcgctcctactcacgtagccgaagcccaagtcgtagttacagcaaaagcaggagtccgagtaaatcacccaggactcgccgttcatcatctagatcccggtcaagatctgtttcttctcgttcaaggtccccatcaaaaggacgttctccatcaaggtaacatacactttcaaattctgagctttgaatccttatatatgtcaagttcttttctactgttttctccaaatcacaatatatatgcattagtagaatatctggacaaattatgaatatgcctacttctgtatcataatttcttgttgcctaccctgtcggcctttttcctttgcaaagattgctgttgttttgtagtctaaaacagtggctatcaatctttattaaagtgctgtcattgttccgtaaccttcatcggtctgaatattttgtatatagtaataagcttatcagttaagttcaagttaacatagttacactcccatgcatgtatacaatgatgatggcttgctgtacagtctgattgcttgggggttccttctcaagtgctcagagtctaatgaacgatatgaactgcttagtctgttctgttttgtttttgaagactcaattatcttgcccttttatctgggattgtgcggtgatctggggattgcgcattaagatattgaggatgggattttcacaatttgctacagttcagttgattttataaggtatggttattaattgagagtttgtatgaaaagctaaaatcgtcccattattttacctaatgccctgtaactgattgacatcagagtttggcataagcgcattgtttggaatactggacataggagcgttaaggattggtgatctggattatggtggtacagtggctaggaatgtacttggagttcaatgcttggggaatgagttttcttcgtacctcaggcacacttcagatggttgctgtagttcatatatgcactgtcgacattgttatacaacaatgttacatttgcacggaactgaacacttctattttcatgagcttttattgctttgattcgacgcggcatcatggcttttggaaccaagttgttaaagctgcattttggatattgaatcagttgtttctggaacgttttgcagatcaccagcaagatcgaaatctcctaatgtttctccagcaaatggtgaagcagcaagccccaagaagcagagcccaaacaggagcccatctggctcacgctctcctgatgcgaagcctgaataaaattgctatgctgttaaaggattgcagatggagtcaggagctcttcttttcttaacatttgtcctctgttctagtaccatcagtgtcttatcgcagtacgagattggatgatattaactatctgtatcagcttgtatcgatggactccaagtgttgtcactcttgttgtctagtgtgctgaaggacccatttacttttgctaaacttttccattggtgattgttggatgcatggtgtggatttgtgctgtgttggctaaatcatgttgttctagaccttatgcatttttttcatttcac

SEQ ID NO: 84000 - DNA, 1860 bp, Zea Mays
cccggtcgtctttctttcgggcctctccgagtggtcaataaaccccgcctcccttctgtcatcccgtacgtctcgacctcgcagccgcaaacgcgaaaccctagcctcgagctctatctccggccacagctggtcagcgacgaaggatgagcaggcgctggagccgcacgatctacgtcgggaacctccccggcgacatccgggagagggaggtggaggatctgttctacaagtatggtaaaattgttgacattgacctgaaggtccccccaagaccacctggttatgcttttgttgagtttgaagatcctcgtgatgctgaggaggcaattgctggacgggatggatacaactttgatggacaccgtctaagagtggaggctgctcatggtggtagaggtaatgcttcctcgcatgatcgttcaagtggctttggtggcggtggtggagcacgtcgtggtgtgtcgagacactcagagtatcgtgttcttgtcactggactgccttcttctgcatcatggcaggatttaaaggatcatatgcggaaggctggtgatgtttgtttctctgaagtgtatcgcgaaggcggtggcaccgtaggaattgtggactacacaaattatgatgatatgaaatatgctataaagaagctggatgatactgaattcaggaacgcctttgggcgagcctatataagggtgaaggaatataacggcaaacgtggtcgctcctactcacgtagccgaagcccaagtcgtagttacagcaaaagcaggagtccgagtaaatcacccaggactcgccgttcatcatctagatcccggtcaagatctgtttcttctcgttcaaggtccccatcaaaaggacgttctccatcaaggtaacatacactttcaaattctgagctttgaatccttatatatgtcaagttcttttctactgttttctccaaatcacaatatatatgcattagtagaatatctggacaaattatgaatatgcctacttctgtatcataatttcttgttgcctaccctgtcggcctttttcctttgcaaagattgctgttgttttgtagtctaaaacagtggctatcaatctttattaaagtgctgtcattgttccgtaaccttcatcggtctgaatattttgtatatagtaataagcttatcagttaagttcaagttaacatagttacactcccatgcatgtatacaatgatgatggcttgctgtacagtctgattgcttgggggttccttctcaagtgctcagagtctaatgaacgatatgaactgcttagtctgttctgttttgtttttgaagactcaattatcttgcccttttatctgggattgtgcggtgatctggggattgcgcattaagatattgaggatgggattttcacaatttgctacagttcagttgattttataagatcaccagcaagatcgaaatctcctaatgtttctccagcaaatggtgaagcagcaagccccaagaagcagagcccaaacaggagcccatctggctcacgctctcctgatgcgaagcctgaataaaattgctatgctgttaaaggattgcagatggagtcaggagctcttcttttcttaacatttgtcctctgttctagtaccatcagtgtcttatcgcagtacgagattggatgatattaactatctgtatcagcttgtatcgatggactccaagtgttgtcactcttgttgtctagtgtgctgaaggacccatttacttttgctaaacttttccattggtgattgttggatgcatggtgtggatttgtgctgtgttggctaaatcatgttgttctagaccttatgcatttttttcatttcac

SEQ ID NO: 84001 - DNA, 1829 bp, Zea Mays
cccggtcgtctttctttcgggcctctccgagtggtcaataaaccccgcctcccttctgtcatcccgtacgtctcgacctcgcagccgcaaacgcgaaaccctagcctcgagctctatctccggccacagctggtcaggtaggaccgtaggaatctcctttcctcatcgttcctcgggtggttcgtgccccgcgccccgctgctttctgggttagcgacgaaggatgagcaggcgctggagccgcacgatctacgtcgggaacctccccggcgacatccgggagagggaggtggaggatctgttctacaagtatggtaaaattgttgacattgacctgaaggtccccccaagaccacctggttatgcttttgttgagtttgaagatcctcgtgatgctgaggaggcaattgctggacgggatggatacaactttgatggacaccgtctaagagtggaggctgctcatggtggtagaggtaatgcttcctcgcatgatcgttcaagtggctttggtggcggtggtggagcacgtcgtggtgtgtcgagacactcagagtatcgtgttcttgtcactggactgccttcttctgcatcatggcaggatttaaaggatcatatgcggaaggctggtgatgtttgtttctctgaagtgtatcgcgaaggcggtggcaccgtaggaattgtggactacacaaattatgatgatatgaaatatgctataaagaagctggatgatactgaattcaggaacgcctttgggcgagcctatataagggtgaaggaatataacggcaaacgtggtcgctcctactcacgtagccgaagcccaagtcgtagttacagcaaaagcaggagtccgagtaaatcacccaggactcgccgttcatcatctagatcccggtcaagatctgtttcttctcgttcaaggtccccatcaaaaggacgttctccatcaagactcaattatcttgcccttttatctgggattgtgcggtgatctggggattgcgcattaagatattgaggatgggattttcacaatttgctacagttcagttgattttataagagtttggcataagcgcattgtttggaatactggacataggagcgttaaggattggtgatctggattatggtggtacagtggctaggaatgtacttggagttcaatgcttggggaatgagttttcttcgtacctcaggcacacttcagatggttgctgtagttcatatatgcactgtcgacattgttatacaacaatgttacatttgcacggaactgaacacttctattttcatgagcttttattgctttgattcgacgcggcatcatggcttttggaaccaagttgttaaagctgcattttggatattgaatcagttgtttctggaacgttttgcagatcaccagcaagatcgaaatctcctaatgtttctccagcaaatggtgaagcagcaagccccaagaagcagagcccaaacaggagcccatctggctcacgctctcctgatgcgaagcctgaataaaattgctatgctgttaaaggattgcagatggagtcaggagctcttcttttcttaacatttgtcctctgttctagtaccatcagtgtcttatcgcagtacgagattggatgatattaactatctgtatcagcttgtatcgatggactccaagtgttgtcactcttgttgtctagtgtgctgaaggacccatttacttttgctaaacttttccattggtgattgttggatgcatggtgtggatttgtgctgtgttggctaaatcatgttgttctagaccttatgcatttttttcatttcac

SEQ ID NO: 84002 - DNA, 1752 bp, Zea Mays
cccggtcgtctttctttcgggcctctccgagtggtcaataaaccccgcctcccttctgtcatcccgtacgtctcgacctcgcagccgcaaacgcgaaaccctagcctcgagctctatctccggccacagctggtcagcgacgaaggatgagcaggcgctggagccgcacgatctacgtcgggaacctccccggcgacatccgggagagggaggtggaggatctgttctacaagtatggtaaaattgttgacattgacctgaaggtccccccaagaccacctggttatgcttttgttgagtttgaagatcctcgtgatgctgaggaggcaattgctggacgggatggatacaactttgatggacaccgtctaagagtggaggctgctcatggtggtagaggtaatgcttcctcgcatgatcgttcaagtggctttggtggcggtggtggagcacgtcgtggtgtgtcgagacactcagagtatcgtgttcttgtcactggactgccttcttctgcatcatggcaggatttaaaggatcatatgcggaaggctggtgatgtttgtttctctgaagtgtatcgcgaaggcggtggcaccgtaggaattgtggactacacaaattatgatgatatgaaatatgctataaagaagctggatgatactgaattcaggaacgcctttgggcgagcctatataagggtgaaggaatataacggcaaacgtggtcgctcctactcacgtagccgaagcccaagtcgtagttacagcaaaagcaggagtccgagtaaatcacccaggactcgccgttcatcatctagatcccggtcaagatctgtttcttctcgttcaaggtccccatcaaaaggacgttctccatcaagactcaattatcttgcccttttatctgggattgtgcggtgatctggggattgcgcattaagatattgaggatgggattttcacaatttgctacagttcagttgattttataagagtttggcataagcgcattgtttggaatactggacataggagcgttaaggattggtgatctggattatggtggtacagtggctaggaatgtacttggagttcaatgcttggggaatgagttttcttcgtacctcaggcacacttcagatggttgctgtagttcatatatgcactgtcgacattgttatacaacaatgttacatttgcacggaactgaacacttctattttcatgagcttttattgctttgattcgacgcggcatcatggcttttggaaccaagttgttaaagctgcattttggatattgaatcagttgtttctggaacgttttgcagatcaccagcaagatcgaaatctcctaatgtttctccagcaaatggtgaagcagcaagccccaagaagcagagcccaaacaggagcccatctggctcacgctctcctgatgcgaagcctgaataaaattgctatgctgttaaaggattgcagatggagtcaggagctcttcttttcttaacatttgtcctctgttctagtaccatcagtgtcttatcgcagtacgagattggatgatattaactatctgtatcagcttgtatcgatggactccaagtgttgtcactcttgttgtctagtgtgctgaaggacccatttacttttgctaaacttttccattggtgattgttggatgcatggtgtggatttgtgctgtgttggctaaatcatgttgttctagaccttatgcatttttttcatttcac

SEQ ID NO: 84003 - DNA, 1375 bp, Zea Mays
cccggtcgtctttctttcgggcctctccgagtggtcaataaaccccgcctcccttctgtcatcccgtacgtctcgacctcgcagccgcaaacgcgaaaccctagcctcgagctctatctccggccacagctggtcaggtaggaccgtaggaatctcctttcctcatcgttcctcgggtggttcgtgccccgcgccccgctgctttctggcgacgaaggatgagcaggcgctggagccgcacgatctacgtcgggaacctccccggcgacatccgggagagggaggtggaggatctgttctacaagtatggtaaaattgttgacattgacctgaaggtccccccaagaccacctggttatgcttttgttgagtttgaagatcctcgtgatgctgaggaggcaattgctggacgggatggatacaactttgatggacaccgtctaagagtggaggctgctcatggtggtagaggtaatgcttcctcgcatgatcgttcaagtggctttggtggcggtggtggagcacgtcgtggtgtgtcgagacactcagagtatcgtgttcttgtcactggactgccttcttctgcatcatggcaggatttaaaggatcatatgcggaaggctggtgatgtttgtttctctgaagtgtatcgcgaaggcggtggcaccgtaggaattgtggactacacaaattatgatgatatgaaatatgctataaagaagctggatgatactgaattcaggaacgcctttgggcgagcctatataagggtgaaggaatataacggcaaacgtggtcgctcctactcacgtagccgaagcccaagtcgtagttacagcaaaagcaggagtccgagtaaatcacccaggactcgccgttcatcatctagatcccggtcaagatctgtttcttctcgttcaaggtccccatcaaaaggacgttctccatcaagatcaccagcaagatcgaaatctcctaatgtttctccagcaaatggtgaagcagcaagccccaagaagcagagcccaaacaggagcccatctggctcacgctctcctgatgcgaagcctgaataaaattgctatgctgttaaaggattgcagatggagtcaggagctcttcttttcttaacatttgtcctctgttctagtaccatcagtgtcttatcgcagtacgagattggatgatattaactatctgtatcagcttgtatcgatggactccaagtgttgtcactcttgttgtctagtgtgctgaaggacccatttacttttgctaaacttttccattggtgattgttggatgcatggtgtggatttgtgctgtgttggctaaatcatgttgttctagaccttatgcatttttttcatttcac

SEQ ID NO: 84004 - DNA, 306 bp, Zea Mays
actgagtcacaatggcaacttatgattttggactcgaaacctgctgttggctctactctcattggtggtgagacaggagctctggagaggttgaagaagtttgctgcagaatgctctatgcagccaaacaaagcagataaaagcaatacccaagatagcatatatggtgctaatttctcctgcaaaatttctccatggctcgctacaggttgcctttctccaaggttcatgtatgaggagttgaagaagcatgctactagagcaatttcttctgagtcacacccagaataatgatggcacatctga

SEQ ID NO: 84005 - DNA, 1240 bp, Zea Mays
cttgcttcccctccgaggctccgacccacccgcacctctccgacatctcactagttagtcactccccatccgctgttccgcgccaccaaatccctacctccacccattcatacgcccatcccaccaaccatggccaccgcctccgactctgacgccggcgcccagccgcgcgacgaccccagccttctcccgttcgcctccttctcgttcgcgctctccatccgcgcgccggcaacccccacactcgcctctgtcccctccaccatccacctccccactcaaatctctacactcgccgtctgcctccacccctccgccgcgcagccccttccccgccgtcccacccgcctcaattccgccacctactccgtcatctccccgctgccctcctcaacgccgggcctctcccgctccttcccctcgggcgcacccgccgcctccgggcgccgccgcacgctggtctggttccgcgccgacctccgcctccacgaccacgagccgttccacgccgcagcgggggcgtcctcctcccttctcccggtcttcgtcttcgacccgcgggacttcggcaagtccccctcggggttcgaccgaacgggcccataccgcgccaacttccttcttgactcagtcgctgacctgcgccgtgtacgctcacggggaggtatcacgggacgaagtccgcaccgaggagagggtgcaaaaggctgtggagaaggagggtatcaacgtgaagtacttctggggtagcacgctgtaccacgtggaagaccttcccttccgcctcgacgacatgccgtccaactatggcggcttcagggaggccgtaaagaggctggacgtcagaaaggtgctggaggcgcccgaggaggtcaagtgcgtgcccatgaagaatgtgctcgagcccggcgacatccccacgcttgctgagctcggtctcactgcgccaccagccatggcacaggactcgaaacctgctgttggctctactctcattggtggtgagacaggagctctggagaggttgaagaagtttgctgcagaatgctctatgcagccaaacaaagcagataaaagcaatacccaagatagcatatatggtgctaatttctcctgcaaaatttctccatggctcgctacaggttgcctttctccaaggttcatgtatgaggagttgaagaagcatgctactagagcaatttcttctgagtcacacccagaataatgatggcacatctga

SEQ ID NO: 84006 - DNA, 1244 bp, Zea Mays
gagattataacttatgaaaattatctagtaagtatgcattccagcgtcaccagcagtggctacagcatgcaaaaactcgcagtgctagacacaaaattatgaaattcttaagggagcaagctgctctttctgctgctgaaataactgctgacgcagttaataattttgttgctgatcttgaagacgaaagtgatagtgagctctcacttccaagcaccaagaatgaagatagtaaattcaactgggagaagatattaagttctgataaattattctttgtcaacaaaagtagtgatggctttttacctgttaataatgtccatacgaaggtcaatgggaagcaaaacaaaactgttaaggatttgggcatcaaaatcaatggtcattctacaattcgaggtgatagcttcagtgagttaatgcaccctggcaattctacctgcaaggaagttttccctggtttggatcactggaaatctggtaaaatttctggttggcataatacggaaggcaactctgtccaatggctttgcatagcctgtgttgaccgaaaagggatgatggcggaggttacatcggctcttacagcttgtggaattaccatatggtcttgtgtggcagaagtcaataaaaggaggggaatgggtgtgatgctgttccattttgagggaagctatgagaacgtggtcagtgcgtgttcaagtgttgacatgattcttggtgttcttggttggtctgtgggatgtagctggtgtccattgggtgttcttgagtgctaatcggtaccaagagacgtgtaccacaatagttcaccactgtcttctccaagatggagttaattttggaagcactaagacatcggtggctcaaaattttgttggtcagatcatggttggtgactggtgagcgagtggaaccctttacttctctgtcaaatcagaaagtgggggtgatcgaagtagaaccagatgtcattctgaaagtgagtgtacatagcagagcgagtagggtactgttagtgcagggattgatttgattgtacagaaggccttacaaaagattgttaagggcagttcgttcttctccccactttgtggttcgcatatactagtttgcttaaatgtgcagctagaattttgacctggacactgatcccaaattttgcctgtttaattttctcactccgcctgtaaatgttattgtacagcttcaattttgccagtgaaaatttgaacaaagttaac

SEQ ID NO: 84007 - DNA, 1240 bp, Zea Mays
gagattataacttatgataaattatctagtaagtatgcattccagcgtcaccagcagtggctacagcatgcaaaaactcgcagtgctagacacaaaattatgaaattcttaagggagcaagctgctctttctgctgctgaaataactgctgacgcagttaataattttgttgctgatcttgaagacgaaagtgatagtgagctctcacttccaagcaccaagaatgaagatagtaaattcaactgggagaagatattaagttctgataaattattctttgtcaacaaaagtagtgatggctttttacctgttaataatgtccatacgaaggtcaatgggaagcaaaacaaaactgttaaggatttgggcatcaaaatcaatggtcattctacaattcgaggtgatagcttcagtgagttaatgcaccctggcaattctacctgcaaggaagttttccctggtttggatcactggaaatctggtaaaatttctggttggcataatacggaaggcaactctgtccaatggctttgcatagcctgtgttgaccgaaaagggatgatggcggaggttacatcggctcttacagcttgtggaattaccatatggtcttgtgtggcagaagtcaataaaaggaggggaatgggtgtgatgctgttccattttgagggaagctatgagaacgtgtgcgtgttcaagtgttgacatgattcttggtgttcttggttggtctgtgggatgtagctggtgtccattgggtgttcttgagtgctaatcggtaccaagagacgtgtaccacaatagttcaccactgtcttctccaagatggagttaattttggaagcactaagacatcggtggctcaaaattttgttggtcagatcatggttggtgactggtgagcgagtggaaccctttacttctctgtcaaatcagaaagtgggggtgatcgaagtagaaccagatgtcattctgaaagtgagtgtacatagcagagcgagtagggtactgttagtgcagggattgatttgattgtacagaaggccttacaaaagattgttaagggcagttcgttcttctccccactttgtggttcgcatatactagtttgcttaaatgtgcagctagaattttgacctggacactgatcccaaattttgcctgtttaattttctcactccgcctgtaaatgttattgtacagcttcaattttgccagtgaaaatttgaacaaagttaac

SEQ ID NO: 84008 - DNA, 1135 bp, Zea Mays
gaaatgtagttttttttttgtctccttggacataatttggatttttggaacttgattgacaatcattgacgctatggcgatacaatttatgtacgtgtccctagtgtacacaatgaatctaagttctagtctgctttggtctaattaggaacttgactgtgaatccatcgctgctggtttattgcatgatactgttgaagatacagatgtggttacttttgaaagaatagaaaatgagtttgggccaactgtgcgccgtattgttgaaggggagacaaaggtatctaagttggggaaacttcagtgtaaaagtgagggtagctccaaacaagatcttaaagcagaagacctaaggcagatgtttcttgccatgactgaagaggttcgtgtgatcattgtcaaactggcagataggttgcataacatgcgcactctcacacatatgcctcagcacaagcagtatgccatcgccatggagacactacaggtctttgcccccctagcaaaactccttgggatgtaccgtataaagtctgagctggaatatctatccttcatgtacgttaaccccactggttttgctgaactaagaaaaagagttgaagacttgtacaaggcccatgaacaagaattggaagaggcaaatagaattttaaggcaaaagattgctgatgatcagtttctcgatcttgttagtgttgaaacaaaagtgcgctcagtttacaaagagctctacagcatttacaaaactacactcaaatccaagagttcaataaatgaggtgaatcaggttgctcagctgaggatcatcataaaaccaaaatcctgcaatggtgttgggccattgtgcactgcacaacagatctgctatcatgttcttggccttgttcatggcatatggacacccgttcctcaagctgtggaagattacattgcaactccaaaacctaatggctaccaaagtctacacacaacagtgataccatttcttaacgagagtatgtttcatttggaagttcagataagaacagaagatatggatttaatagcagaaagaggcattgctgcacattacagtggaagaggagttgtttctggacctgttcggcctggaatatcaagtggaagaaatgcc

SEQ ID NO: 84009 - DNA, 362 bp, Zea Mays
gattgcgccgccccgcgccatgcagaccccgccgcccaccgtgcccgtagagtgcgtgagctcgtgcaggtccgcctcgtggaaggggggtggaaggccctacgaatgcagcgtactcttgtgcgcgtggaacgcgccgcgcgcgctcacgggcgcgctcgccagcaccgcgcagtgctcctcgtgcggccacgccgaggccggaagcagctggaggaggcgcgggcggtcaagtcggagtaacaactcggtgcgttgccactgctctcttgctgtttctgttattcaagccataatatcgatatgcttttggtgtttcgcttacttaatccagctgagttgaagtagcagtagtatcattc

SEQ ID NO: 84010 - DNA, 1098 bp, Zea Mays
tgctcttttcaagcttgatgatctctctacggtttatttcccaattgaacaagacgttggaaaggaggcaacaaggctcagagctattacagatctttttagcaacattattgaagaaccatgctttgatcagctaagaaccaaggagcaacttggttatactgtggactctagcccaaggatgacttaccggatgctggcctattgttttcgagttatgtcctccaaatacagtcctatttatctgcaaagtcggattgataacttcattgatggtctatctgctctgctggacgagctcaatgaagagacttttgagcaccatagaagtggtttaatagctgataaactggaaaaggaaccttcacttagctaccaaactagtgattattggtctcagatcgctgataaaaggtacatgtttgatatgtcaaaactggaagctgaagagcttaagacagttcagaaggctgatgttatagcttggtacaacacatacataagatcatcgtccccaaagcgaagacgtctagcaattcatgtgtatggttgcaactcagatattgctgaggctgctaaactccaggagcaatcttggactataattgatgacgttgaatcattgaaggcttcgtctcaattttattcaagcctttgttgagggaagttgggcatgatctgtcagtgtgtgcaaagcgcgtaacttggacattgccgaggcccgctaaggtgcaagaatttcgtggatcataatagatgatttaggccccttctgcagatcaaccgccatgttatctatggccggcttgaaattgaacagcatcgttgcacctgaccaacatcatcaacgagtatagtgctagttgggtaagaaaaataggattttgtcagtgcattatgtgattttcataacaaacacacatggctttattgttactttgcgccaagaaatgttgatcttccaatatggcgtagtaattgatggatgagtttttgaggaaacataattttgtacttggagatgtaaaatgtttctggaatctttactgaacaattttggaagtcttgtcttattatatactttaccctccagtaacg

SEQ ID NO: 84011 - DNA, 3639 bp, Zea Mays
cggccctttgccaattgccagtgtcgcggtgtcgccgcgtatctcccttcagcttctctcccgtatctccctgccaacggcggcggcaacgcgagggtaagatggcggcggcggtgtctcgcgacgacgagctggtgatcaagtcaccaaacgacaagcggtcttatcgcctcctccgccttggcaacggcctccgtgccctccttgtccacgaccctgagatctacgccgacggttacccacctcagacctccaagccatgtgaagacgaggagatggaggaagtggatgaggaagacgaggatggcgacgacgacagcgaagagtacagtgacgaggaaggtgaggacgacgatgaggaggatggggaggatgacgaggaagaggatgagggcgagccgaagaggaggaaggagaaggttggcgccgagccaatcgttaagaaggctgctgctgcaatgtgtgttggaatgggcagttttgctgaccctgagaaggcacagggcttagcgcattttctagagcacatgctttttatggggagtaccgaatttccagatgaaaatgagtatgacagttacctgtccaaacatggcggtgcatctaatgctttcactgaaaccgagtacacatgctaccattttgaggttaaacgagagtatctgaagggagccttagacagttctttgtgtcaccccttgttaaggctgaagcaatggaccgtgagatattagcagtggactcagagtttaatcaagttttgcaaagtgatacctgccgcctttaccaactccagtctcatacctgttctcaagggcaccctttgaacagatttacctggggaaataagaaaagtttagttgacgcaatgggcagtggaatcaatctaagagaagagattttagagatgtacatgagaaattaccatggaggagcaatgagattggttataatcggaggagaaccacttgacattctagaaggctggacaatggagctgtttagcaaggttaaaactggccctcttttggatataggtccgaagactgacattccattttggaagccagggaaactctacaaattggaggctgttagagatctgcacagccttttcttgtcatggacacttccttgcttgcacaaggagtacatgaagaaacctgaagattatttggctcatctccttggtcatgagggcaagggaagtttactttatttcttgaaagctaaaggctgggcaagctcattgagtgctggtgttggtagtggaggatcacaacgatcctcgtatgcttatatctttgaaatgtctatatgccttactgattctggactgaaaaatgtatttgaggtcattggtgctgtataccaatatataaagttgcttaagcagtctgagccacaagaatggatattcaaggaacttcaggacattggatacatggagttcaggttcgcagaagagcaacctccagatgattatgtagttgatcttgcagaaaatatgctattttattctgaaaaacacattgtttgtggagagtatatttttgaggactgggattcagaattagtgaagcatgctttgagcttcttcaatccagataacatgagagttgatgtactcagtaaatcatttgataagcagtcccaagctattcaatgtgaaccatggtttggttcacattacattgaggaggacatcccatcatctttgatagaaagttggaaaaatcctgttcaagtagatgataatttgcatttgcctagaaagaatgaatttataccaggggacttcactctgcgaaatgccaactctcctggatcctcgagcgacgataaccctcgttgcatagtggatgagccattcataaaactctggtacaagatggacatgacatttaatgtccctcgtgccaacacttattttttgatttatgtcaaggatggctatagtagccttgaaaactctgtcctgatagatctctttgcaaaccttctcaaagatgaacttaatgaggtcctttatcaggcttatgtggctaaattggagacttcaacatctgttgttgctagcaaacttgagataaagctttatggttacaatgataagcttcccattcttctgtccaacatcttgtctactgttcgatccttttctccaaaaacagatagattcgaggtcatcaaagaagatttggaaagagcttacaagaacactaacatgaagcctatgagccattctacctacttaaggctacaagtcttgcgtgaaatattctgggacgttgataaaaaactagaactacttatgaaactgacatttactgatctagtagcatttgtaccgaaaatcctttcccagctgcacattgagggactttgtcatggcaacttgtcagaagacgagacaattaatatatcaaaaatatttctcaatactctctctgctcagacactgccagaggaagcaaggcatgaggaaagagttatttgcattcctaatggtgcaaatttggttagaagtgtccgcgtgaaaaatgatcttgaagaaaattctgtggttgaggtttatttcccaattgaacaagacgttggaaaggaggcaacaaggctcagagctattacagatctttttagcaacattattgaagaaccatgctttgatcagctaagaaccaaggagcaacttggttatactgtggactctagcccaaggatgacttaccggatgctggcctattgttttcgagttatgtcctccaaatacagtcctatttatctgcaaagtcggattgataacttcattgatggtctatctgctctgctggacgagctcaatgaagagacttttgagcaccatagaagtggtttaatagctgataaactggaaaaggaaccttcacttagctaccaaactagtgattattggtctcagatcgctgataaaaggtacatgtttgatatgtcaaaactggaagctgaagagcttaagacagttcagaaggctgatgttatagcttggtacaacacatacataagatcatcgtccccaaagcgaagacgtctagcaattcatgtgtatggttgcaactcagatattgctgaggctgctaaactccaggagcaatcttggactataattgatgacgttgaatcattgaaggcttcgtctcaattttattcaagcctttgttgagggaagttgggcatgatctgtcagtgtgtgcaaagcgcgtaacttggacattgccgaggcccgctaaggtgcaagaatttcgtggatcataatagatgatttaggccccttctgcagatcaaccgccatgttatctatggccggcttgaaattgaacagcatcgttgcacctgaccaacatcatcaacgagtatagtgctagttgggtaagaaaaataggattttgtcagtgcattatgtgattttcataacaaacacacatggctttattgttactttgcgccaagaaatgttgatcttccaatatggcgtagtaattgatggatgagtttttgaggaaacataattttgtacttggagatgtaaaatgtttctggaatctttactgaacaattttggaagtcttgtcttattatatactttaccctccagtaacg

SEQ ID NO: 84012 - DNA, 1060 bp, Zea Mays
cccttttataattctagctaacaggcaatcagctgctagatcgaaagaaagaaaggctcgttatataacagaacttgagcgtaaggtccaaactcttcagactgaagccaccaccctttcagctcaactcacactatttcagagggacacgactggactttctgcagaaaatgcagagcttaagataaggttgcatgccatggagcaacaggctcaactccgcgatgctctgaatgatgcactaaagcaggagctggagaggcttaagcttgttactggtgagatgaccaattccagtgagacatataacatgagatttcagcatattccatacaactcttccttctttccgctttcccagcaaaatgcatctccacaccctggtaccacccagttgccaccaccgttccacccaccccatcccaatgtgccaaaccaccagatgctgtcccacccaaacactctcccagacataatgcagcaagagtctcttggacggctgcagggtttggacattggaaaggggccactggttgtcaagtcagagagcagctcgatctctgctagtgaaagcagcagcaccttctaacgaggcctaccaatgagaatctgccgtttcaatacgtcccattgttcataatagcctgacatccttgtgctgcttcctgctctgtaagcttatttgttatttaattcattcaattagttgaaattgttccttgtcgcactggcagatcgatccatgttgtagaatgatccaggaacccttctagtctgtttatgttttgggaccatttcatgtttatgtgttcggtattagggcatttggattttggagtgaaattctctgatgatacttttgttgtgttcagccatgttgactgcatgaatcctcttttgaacatactcactctgtaccaaattcgttttaggccaatggtggattcatgaaagacttgttgaatgtattttatgtgtctatattcatcctcactcatttgaatatagacaaaaactactcctttcgttccaaattaaaatttgttttacccttttaatg

SEQ ID NO: 84013 - DNA, 2720 bp, Zea Mays
gtttggcagggctctacttggacggggtgaggagaggcgaggagagcagagcaggcagccgacgacttccccacgcggaggcgttgcttcccggtcgtccaacgcctggcatcccttccttctcctcacccagcagcagccggtcggcctcggctagatctcgccggccgcctccaattggttgtccactgtggccgggccgaggggtacttatctataggcccgcagatctgcgcctgcgcccgtgggaatctccgcacctcgctatccgtctcttggatagatcgatcttccgtcgctggttccccttcgccccacacgagtacttccaaggaactggaacttccagccggcacggggattcgagcttctgctctatcagcaactccactgggcgctgagggtctgtagcagagcggtgcgatcggggcagaagggagccatgatgagggggcaggcgtggctggcgctgctggtcgtggtggcgctggccttggcggacgcggcggcggggaggttcgtggtggagaagaacagcctcgaggtgacctcccccgacgagctcaagggcaagtacgagtgcgccatcggcaacttcggggtgccgcagtacgggggcaccctgcacggatgggtcgagtaccccaagtccaaccggaaggcgtgccagagcttcgaccagttcgacatctcgttcaagcccaagcaggctgggggacgacccatcttcgtcctcgtcgaccgcggagaatgtttcttcacaaccaaggcatggaatgcacaaaatgctggagctgctgcagttcttgttgtggatgacaagtcggaacctctaatcacaatggacaacccagaagaaggcaaagagcacctagaaaacatcactattccctcagtgcttataacaaagaaattgggggaaaaccttaagaaatccgcggaaaatggcgatatgctcagcgttcttctggactggagagaatcccttccccatcccgatgagcgtgtagagtatgagttctggacaaacagtaatgatgaatgtggtcctaaatgtgatatgcaaatggacttcgtgaggagctttagaggaactgcacaaattcttgagaaaaagggttacactcagtttactcctcattatatcacatggtattgtccagaagcttttgttgatagcaagcaatgcaaatcacagtgcatcaatcatgggagatattgtgcaccagacccagatcaggattttagccaagggtatgatggaagaaatgttgtggttcaaaacctacatcagatttgtgtattcaagattgctaatgagactggaaagccatggctgtggtgggattatgtgcatgatttcgcacttaggtgtccaatgaaggataagaaatacaataatgactgtgcccatgatgttatcaaatcacttggattggacatcgagaatataaacaagtgtgttggagaccctgaagccgatgtggaaaatgaaattctaaaggcagaacaagatgcccaaattggtcatggtaaaaggggagatgtcacaatactaccaacccttgtcatcaacaacaagcaatatagagttgctgtcctgaaagcgatctgttcaggatttgaggagacaactgaacctgctatttgtttgagcgaagagattcaaacaaatgagtgtttggagaacaatgggggttgctggctggacaaagctaataatgttactgcatgcaaggataccttccgcgggcgtgtttgtgagtgccctattgtgagaggtgtaaaatttgttggtgatggatatacccattgtgaagcttccggtgttggtaggtgtgagatcagtaatggagggtgctggcaggaaactaaagatgggaaaacaatctctgcctgctcaaacgaaatatctgaaggttgtaaatgtccaatgggtttcaagggtgatggagaaaaaagttgtgaagacattgatgaatgccaagagaaactttattgtcagtgcaagggttgcagctgcaagaatacgtggggaagctatgaatgcagctgtggtgatgacaatatgctatacatgagagagcatgacacttgcatcagcaaagagggaactgccactactgttggctggagcttcctctgggttattttctttggacttgtttttgccggggttggagcatacgctgtgtacaaatacaggctgcggagttacatggattcagagatccgtgccatcatggctcagtacatgcctctggataaccaagaaggagcaaaccagcatcaggtcgtgcacgccaatgatatctgaagctgcactccttttctgaagcagaaatagagggggcgtgcaacatttcacttgtgctgctgcatcattgggtcatgggttttacaggtataggtcaactaggctcaaagatacacaggttatgcgagatcaagatctactgtaccatgaattaagatttaagagagagacgttgtgcgcctcttgttacgacacttgatgaacagcatagggaatgataccatcatagttttagtagtccttcgttgccttcagtttgtcttcaaagagttcttgttgcctcttcacatacatgtaaacactgtaaataccgttacctgaataaagcttcagcctgctaggctacaagcagggttcactgtacgtgtccgtacatgtgatttattacagatttctttcgctg

SEQ ID NO: 84014 - DNA, 2819 bp, Zea Mays
gtttggcagggctctacttggacggggtgaggagaggcgaggagagcagagcaggcagccgacgacttccccacgcggaggcgttgcttcccggtcgtccaacgcctggcatcccttccttctcctcacccagcagcagccggtcggcctcggctagatctcgccggccgcctccaattggttgtccactgtggccgggccgaggggtacttatctataggcccgcagatctgcgcctgcgcccgtgggaatctccgcacctcgctatccgtctcttggatagatcgatcttccgtcgctggttccccttcgccccacacgagtacttccaaggaactggaacttccagccggcacggggattcgagcttctgctctatcagcaactccactgggcgctgagggtctgtagcagagcggtgcgatcggggcagaagggagccatgatgagggggcaggcgtggctggcgctgctggtcgtggtggcgctggccttggcggacgcggcggcggggaggttcgtggtggagaagaacagcctcgaggtgacctcccccgacgagctcaagggcaagtacgagtgcgccatcggcaacttcggggtgccgcagtacgggggcaccctgcacggatgggtcgagtaccccaagtccaaccggaaggcgtgccagagcttcgaccagttcgacatctcgttcaagcccaagcaggctgggggacgacccatcttcgtcctcgtcgaccgcggagaatgtttcttcacaaccaaggcatggaatgcacaaaatgctggagctgctgcagttcttgttgtggatgacaagtcggaacctctaatcacaatggacaacccagaagaaggcaaagagcacctagaaaacatcactattccctcagtgcttataacaaagaaattgggggaaaaccttaagaaatccgcggaaaatggcgatatgctcagcgttcttctggactggagagaatcccttccccatcccgatgagcgtgtagagtatgagttctggacaaacagtaatgatgaatgtggtcctaaatgtgatatgcaaatggacttcgtgaggagctttagaggaactgcacaaattcttgagaaaaagggttacactcagtttactcctcattatatcacatggtattgtccagaagcttttgttgatagcaagcaatgcaaatcacagtgcatcaatcatgggagatattgtgcaccagacccagatcaggattttagccaagggtatgatggaagaaatgttgtggttcaaaacctacatcagatttgtgtattcaagattgctaatgagactggaaagccatggctgtggtgggattatgtgcatgatttcgcacttaggtgtccaatgaaggataagaaatacaataatgactgtgcccatgatgttatcaaatcacttggattggacatcgagaatataaacaagtgtgttggagaccctgaagccgatgtggaaaatgaaattctaaaggcagaacaagatgcccaaattggtcatggtaaaaggggagatgtcacaatactaccaacccttgtcatcaacaacaagcaatatagaggtcagcctactatcttgtagtgcctatctttttattggccaatgttgtttgtgccacatttagtttttctcttcaggtaagctggacaaagttgctgtcctgaaagcgatctgttcaggatttgaggagacaactgaacctgctatttgtttgagcgaagagattcaaacaaatgagtgtttggagaacaatgggggttgctggctggacaaagctaataatgttactgcatgcaaggataccttccgcgggcgtgtttgtgagtgccctattgtgagaggtgtaaaatttgttggtgatggatatacccattgtgaagcttccggtgttggtaggtgtgagatcagtaatggagggtgctggcaggaaactaaagatgggaaaacaatctctgcctgctcattctgcagaacgaaatatctgaaggttgtaaatgtccaatgggtttcaagggtgatggagaaaaaagttgtgaagacattgatgaatgccaagagaaactttattgtcagtgcaagggttgcagctgcaagaatacgtggggaagctatgaatgcagctgtggtgatgacaatatgctatacatgagagagcatgacacttgcatcagcaaagagggaactgccactactgttggctggagcttcctctgggttattttctttggacttgtttttgccggggttggagcatacgctgtgtacaaatacaggctgcggagttacatggattcagagatccgtgccatcatggctcagtacatgcctctggataaccaagaaggagcaaaccagcatcaggtcgtgcacgccaatgatatctgaagctgcactccttttctgaagcagaaatagagggggcgtgcaacatttcacttgtgctgctgcatcattgggtcatgggttttacaggtataggtcaactaggctcaaagatacacaggttatgcgagatcaagatctactgtaccatgaattaagatttaagagagagacgttgtgcgcctcttgttacgacacttgatgaacagcatagggaatgataccatcatagttttagtagtccttcgttgccttcagtttgtcttcaaagagttcttgttgcctcttcacatacatgtaaacactgtaaataccgttacctgaataaagcttcagcctgctaggctacaagcagggttcactgtacgtgtccgtacatgtgatttattacagatttctttcgctg

SEQ ID NO: 84015 - DNA, 2690 bp, Zea Mays
gtttggcagggctctacttggacggggtgaggagaggcgaggagagcagagcaggcagccgacgacttccccacgcggaggcgttgcttcccggtcgtccaacgcctggcatcccttccttctcctcacccagcagcagccggtcggcctcggctagatctcgccggccgcctccaattggttgtccactgtggccgggccgaggggtacttatctataggcccgcagatctgcgcctgcgcccgtgggaatctccgcacctcgctatccgtctcttggatagatcgatcttccgtcgctggttccccttcgccccacacgagtacttccaaggaactggaacttccagccggcacggggattcgagcttctgctctatcagcaactccactgggcgctgagggtctgtagcagagcggtgcgatcggggcagaagggagccatgatgagggggcaggcgtggctggcgctgctggtcgtggtggcgctggccttggcggacgcggcggcggggaggttcgtggtggagaagaacagcctcgaggtgacctcccccgacgagctcaagggcaagtacgagtgcgccatcggcaacttcggggtgccgcagtacgggggcaccctgcacggatgggtcgagtaccccaagtccaaccggaaggcgtgccagagcttcgaccagttcgacatctcgttcaagcccaagcaggctgggggacgacccatcttcgtcctcgtcgaccgcggagaatgtttcttcacaaccaaggcatggaatgcacaaaatgctggagctgctgcagttcttgttgtggatgacaagtcggaacctctaatcacaatggacaacccagaagaaggcaaagagcacctagaaaaccttaagaaatccgcggaaaatggcgatatgctcagcgttcttctggactggagagaatcccttccccatcccgatgagcgtgtagagtatgagttctggacaaacagtaatgatgaatgtggtcctaaatgtgatatgcaaatggacttcgtgaggagctttagaggaactgcacaaattcttgagaaaaagggttacactcagtttactcctcattatatcacatggtattgtccagaagcttttgttgatagcaagcaatgcaaatcacagtgcatcaatcatgggagatattgtgcaccagacccagatcaggattttagccaagggtatgatggaagaaatgttgtggttcaaaacctacatcagatttgtgtattcaagattgctaatgagactggaaagccatggctgtggtgggattatgtgcatgatttcgcacttaggtgtccaatgaaggataagaaatacaataatgactgtgcccatgatgttatcaaatcacttggattggacatcgagaatataaacaagtgtgttggagaccctgaagccgatgtggaaaatgaaattctaaaggcagaacaagatgcccaaattggtcatggtaaaaggggagatgtcacaatactaccaacccttgtcatcaacaacaagcaatatagaggtaagctggacaaagttgctgtcctgaaagcgatctgttcaggatttgaggagacaactgaacctgctatttgtttgagcgaagagattcaaacaaatgagtgtttggagaacaatgggggttgctggctggacaaagctaataatgttactgcatgcaaggataccttccgcgggcgtgtttgtgagtgccctattgtgagaggtgtaaaatttgttggtgatggatatacccattgtgaagcttccggtgttggtaggtgtgagatcagtaatggagggtgctggcaggaaactaaagatgggaaaacaatctctgcctgctcaaacgaaatatctgaaggttgtaaatgtccaatgggtttcaagggtgatggagaaaaaagttgtgaagacattgatgaatgccaagagaaactttattgtcagtgcaagggttgcagctgcaagaatacgtggggaagctatgaatgcagctgtggtgatgacaatatgctatacatgagagagcatgacacttgcatcagcaaagagggaactgccactactgttggctggagcttcctctgggttattttctttggacttgtttttgccggggttggagcatacgctgtgtacaaatacaggctgcggagttacatggattcagagatccgtgccatcatggctcagtacatgcctctggataaccaagaaggagcaaaccagcatcaggtcgtgcacgccaatgatatctgaagctgcactccttttctgaagcagaaatagagggggcgtgcaacatttcacttgtgctgctgcatcattgggtcatgggttttacaggtataggtcaactaggctcaaagatacacaggttatgcgagatcaagatctactgtaccatgaattaagatttaagagagagacgttgtgcgcctcttgttacgacacttgatgaacagcatagggaatgataccatcatagttttagtagtccttcgttgccttcagtttgtcttcaaagagttcttgttgcctcttcacatacatgtaaacactgtaaataccgttacctgaataaagcttcagcctgctaggctacaagcagggttcactgtacgtgtccgtacatgtgatttattacagatttctttcgctg

SEQ ID NO: 84016 - DNA, 1616 bp, Zea Mays
atcacttctgcatattctgcaacacataattatttgacttggcaacatcatgtaaagtcgtcatttgttgccgtgttgctcctctgcaaaaggctggtattgttgatttgattaaaagcagaacgagtgacatgaccctggcaattggtgacggggcaaatgatgtttcaatgatacagatggctgatgttggtgttggcatatgtggtcaagaaggtcgtcaggcagtgatggcttcagactttgctatgggtcaattccgctttctgaagagattacttcttgtgcatgggcactggaattatcagcggatcgcatacatgatcctgtacaacttctaccggaatgctgtcttcgttctaatgcttttctggtatatcctatatacggcttattctgcaactctggcattaacagattggagcagtgttttctattcccttatatacacatcagttccaacggtagtagttggcattctcgacaagaacttaagtcataatacccttctttgttacccgagactatatgaggcagggcttcgaaatgagggctacaacttgacactcttctggatcacaatgctcgatacattgtggcaaagccttgttcttttctatgtcccttttttcacatacaatatcagtacaatggacatatggagtctgggaagtttgtggacaattgctgtggttataattgtcaatatccatttagccatggacattcaacgttgggtgcttataacccatcttgctgtatggggttctatagctgctacgtttttgtgcatggtgttaattgactctataccaattttccctaactatgggacaatttacaacatggctgcttcaaggacttactggcttagcgtttgtcttataatagtccttgggttgcttcctcgtctcctttgtaaagtggtatatcagaccttttggccatctgatattcaaatagcaagagaagctgagctttttaaaaagctgccccaacagttgggttcaaggcctgcaagtgacatcagctaacaacagcttcacacagttattttgtcaattctaaatttgaggctgtgttgattcatttgttgagctgatttttgtcgaattttgattatacgctgaggacaaacttcggtaaggtgtacaaatttggctcgtggaagaggcttcagaatgcaatggagcggctgacaaagggaactgactactggtggtgatgaaaacggcttgggtcttcgggggctagtaatgacaattgtacagatatgggacacaacgatacatacacttgtattttacggtagagtttgttagcttgtgtttagggaataaaaacataaatagatacagattcttttcgcactgcggtatttttttaatccctgactatatgttaaccgtcttcatttacttccagctgcctgagggtttagctgtagcggtttgcgctgtcagaatttttacattttacagcaatacgaggcccagttccctaatgtagtggttccaaaccacatcgaattttgttgaacatttattttcggatgtcagttttaattgtgagatgtaggtctgtttggttggatgtttaacttgccacactttatc

SEQ ID NO: 84017 - DNA, 4760 bp, Zea Mays
tccaagtccagcacctcctcccacctccctcaccgtccccgagctgcgagcgcgaaaaaaaaagcgagagcaccacgtacctcgccgccgtcgtctccgcctctcccctcgccacgtcgctgccgagctgccgggtacaccgccaggcgcagccagatccgcgcggtccgaacccgggagcgcgccgccgtgcgtttcggatccgcgtaaggcgcgccgccggatccgccgcgccgacagggagggcgctgccgacgtccagctcggcattggtttggctcgatccggaggcgcggcgactgtgggtgggagtaatctgtatttgtggagctttgcttggtgctgaaaattgtgcaaacatgagatggcttcagcatatagcgtgctggaagtgggcaccgtgcaactgagcccatccttcttgtagccagattccttattccaatgatgcagtggttggtaggttgcagtagatgactaccggtgatcccttgctcctgtcatcatcgggaagtgcagattcaccttcaaagccagctcggccttcggtaggctcattaggctgcctctgcgcaactgattcattctcttcttcactgtacgaggattgtgaaacggcttctgtcacactcacggatgaaagggaggctcaaccaagacatttacgcgagttgtctgatgtgagcagggtggcagagcgcttccagtctgctgattcacaattcttccatcgtctctcagtggaatgctctcagaaggagaggcagcggaaggtttcttggggtggcgcaatggagaggcagcattctccatcatccctagagattggaatggtatcttcttcacatgagaagccaaatcgctcccagagaatcaggaacaagagctcacagtttgaagatccatccgagcaagagccaagaaaaatatacattaatgatcctaacaagacaaatgatcgatatgaatttacagggaatgagatcaggacaagcaagtacactttgattacgttcttgcctaagaacctcttcatacagtttcatcggttggcatatgtatacttcctggttatagctgctcttaaccagctccctcctttagctgtatttggaagaactgcttctcttttcccactactctttgtgttgtttgtgactgctataaaagatggatatgaagactggcggcgtcacagatctgacagaaatgaaaataaccgagaggcactagtacttcaacatggtgattttcggtcgaaaaagtggaaaaacatttgtgcaggggaggttgtcaaaattcatgccaatgagaccatgccgtgtgacatggttcttttgggtacgagcgatccaaatggtatagcttatatccaaaccatgaatttagatggtgagtcaaacctaaaaacaaggtatgctcgccaggaaactacttccatgatatatgatgacacatattcaggcttgatcgaatgtgagctgcccaacagaaatatctacgaatttacagctaccatgaagttggacagtcagagggttccgcttggacaatcgaacattgtactacgtggatgccagcttaaaaacactgaatgggttattggggttgttgtttatgccggtcaggagacaaaagctatgttgaacagcacgatatctccttcaaagagcagcaacctagagagttatatgaacagggaaaccctttggttatcagccttcctcttgatcacatgctcagttgtggctactgggatgggggtttggctgtttaaaaattctaaaaacctggatgccctgccatactacagaagaaagtacttcacctttgggcgtgaaaatcgaaaagatttcaagttttatggcattgctttagagatatttttctccttcctcagttctgtgataatctttcagataatgataccaatatctctgtacatcacaatggagctagtcagggtggggcaatcatacttcatgattggagatacacgaatgtatgacagtaattcaggttcaagatttcagtgtcgatccttgaatatcaacgaggacctaggacaaatcagatacatattttctgacaaaacaggcactttgacacaaaacaagatggagtttcagcaagctagcatctacgggaagaactatggcagttccttgcaagtcaccagtgacttttcacatgaaataagcactgcagagtcattgagacaaagtgtcaggaagcctaaagtcaatgttgatctggcactcacggaacttctgaatcaaccattaattggggaggaaagactttctgctcatgattttttccttactctggctgcctgcaacacagtaattccagtgaacacagagggttctcacgatttgacaaatgaagtggatgagataggtgcaattgattaccagggtgaatcacctgatgagcaggctttagtaattgcagcgtctgcttatgggtatacccttgttgaaagaacaactggacacattgttatagatgttctaggcgagaggttaaggttggatgttcttggtctccatgaattcgatagtgtgagaaaaagaatgtctgttattgtaaggtttccggacaacaatgtgaaggttcttgtgaaagtgaatggcaggaaatgtacgaagaagctagtacctccatgcatgagagatcagcaaagctccgtcaagcagcaggtctggtagaatgcaatctaacccttcttggtgcaactggaattgaagataaattgcaggatggtgttcctgaggccattgactctctgagacaggctggaatcaaggtgtgggttctcacaggagataagcaagaaactgctatatctattggtttgtcatgtcgattgttgactcaaaccatgcatttgatcatcataaatggttcctctgaggttgagtgcaggcgtcttctagctgaggctaaagccaaatttggaataaagtcagctgattttgggcgggatttgcaaggtacagaagacatgtaccatggtgatatttctaaattgaggccctcaaatggtcacctgtctgaaactggagcacaaagcctcgaactaaccggtgttattggtggtgacaagtcagagtacagtgagaacgtgacaaattttgatggcactgagttagcactgataattgatggaagctcccttgtgtatattctagagaaacctcttgaatcagagttatttgacttggcaacatcatgtaaagtcgtcatttgttgccgtgttgctcctctgcaaaaggctggtattgttgatttgattaaaagcagaacgagtgacatgaccctggcaattggtgacggggcaaatgatgtttcaatgatacagatggctgatgttggtgttggcatatgtggtcaagaaggtcgtcaggcagtgatggcttcagactttgctatgggtcaattccgctttctgaagagattacttcttgtgcatgggcactggaattatcagcggatcgcatacatgatcctgtacaacttctaccggaatgctgtcttcgttctaatgcttttctgattggagcagtgttttctattcccttatatacacatcagttccaacggtagtagttggcattctcgacaagaacttaagtcataatacccttctttgttacccgagactatatgaggcagggcttcgaaatgagggctacaacttgacactcttctggatcacaatgctcgatacattgtggcaaagccttgttcttttctatgtcccttttttcacatacaatatcagtacaatggacatatggagtctgggaagtttgtggacaattgctgtggttataattgtcaatatccatttagccatggacattcaacgttgggtgcttataacccatcttgctgtatggggttctatagctgctacgtttttgtgcatggtgttaattgactctataccaattttccctaactatgggacaatttacaacatggctgcttcaaggacttactggcttagcgtttgtcttataatagtccttgggttgcttcctcgtctcctttgtaaagtggtatatcagaccttttggccatctgatattcaaatagcaagagaagctgagctttttaaaaagctgccccaacagttgggttcaaggcctgcaagtgacatcagctaacaacagcttcacacagttattttgtcaattctaaatttgaggctgtgttgattcatttgttgagctgatttttgtcgaattttgattatacgctgaggacaaacttcggtaaggtgtacaaatttggctcgtggaagaggcttcagaatgcaatggagcggctgacaaagggaactgactactggtggtgatgaaaacggcttgggtcttcgggggctagtaatgacaattgtacagatatgggacacaacgatacatacacttgtattttacggtagagtttgttagcttgtgtttagggaataaaaacataaatagatacagattcttttcgcactgcggtatttttttaatccctgactatatgttaaccgtcttcatttacttccagctgcctgagggtttagctgtagcggtttgcgctgtcagaatttttacattttacagcaatacgaggcccagttccctaatgtagtggttccaaaccacatcgaattttgttgaacatttattttcggatgtcagttttaattgtgagatgtaggtctgtttggttggatgtttaacttgccacactttatc

SEQ ID NO: 84018 - DNA, 4950 bp, Zea Mays
tccaagtccagcacctcctcccacctccctcaccgtccccgagctgcgagcgcgaaaaaaaaagcgagagcaccacgtacctcgccgccgtcgtctccgcctctcccctcgccacgtcgctgccgagctgccgggtacaccgccaggcgcagccagatccgcgcggtccgaacccgggagcgcgccgccgtgcgtttcggatccgcgtaaggcgcgccgccggatccgccgcgccgacagggagggcgctgccgacgtccagctcggcattggtttggctcgatccggaggcgcggcgactgtgggtgggagtaatctgtatttgtggagctttgcttggtgctgaaaattgtgcaaacatgagatggcttcagcatatagcgtgctggaagtgggcaccgtgcaactgagcccatccttcttgtagccagattccttattccaatgatgcagtggttggtaggttgcagtagatgactaccggtgatcccttgctcctgtcatcatcgggaagtgcagattcaccttcaaagccagctcggccttcggtaggctcattaggctgcctctgcgcaactgattcattctcttcttcactgtacgaggattgtgaaacggcttctgtcacactcacggatgaaagggaggctcaaccaagacatttacgcgagttgtctgatgtgagcagggtggcagagcgcttccagtctgctgattcacaattcttccatcgtctctcagtggaatgctctcagaaggagaggcagcggaaggtttcttggggtggcgcaatggagaggcagcattctccatcatccctagagattggaatggtatcttcttcacatgagaagccaaatcgctcccagagaatcaggaacaagagctcacagtttgaagatccatccgagcaagagccaagaaaaatatacattaatgatcctaacaagacaaatgatcgatatgaatttacagggaatgagatcaggacaagcaagtacactttgattacgttcttgcctaagaacctcttcatacagtttcatcggttggcatatgtatacttcctggttatagctgctcttaaccagctccctcctttagctgtatttggaagaactgcttctcttttcccactactctttgtgttgtttgtgactgctataaaagatggatatgaagactggcggcgtcacagatctgacagaaatgaaaataaccgagaggcactagtacttcaacatggtgattttcggtcgaaaaagtggaaaaacatttgtgcaggggaggttgtcaaaattcatgccaatgagaccatgccgtgtgacatggttcttttgggtacgagcgatccaaatggtatagcttatatccaaaccatgaatttagatggtgagtcaaacctaaaaacaaggtatgctcgccaggaaactacttccatgatatatgatgacacatattcaggcttgatcgaatgtgagctgcccaacagaaatatctacgaatttacagctaccatgaagttggacagtcagagggttccgcttggacaatcgaacattgtactacgtggatgccagcttaaaaacactgaatgggttattggggttgttgtttatgccggtcaggagacaaaagctatgttgaacagcacgatatctccttcaaagagcagcaacctagagagttatatgaacagggaaaccctttggttatcagccttcctcttgatcacatgctcagttgtggctactgggatgggggtttggctgtttaaaaattctaaaaacctggatgccctgccatactacagaagaaagtacttcacctttgggcgtgaaaatcgaaaagatttcaagttttatggcattgctttagagatatttttctccttcctcagttctgtgataatctttcagataatgataccaatatctctgtacatcacaatggagctagtcagggtggggcaatcatacttcatgattggagatacacgaatgtatgacagtaattcaggttcaagatttcagtgtcgatccttgaatatcaacgaggacctaggacaaatcagatacatattttctgacaaaacaggcactttgacacaaaacaagatggagtttcagcaagctagcatctacgggaagaactatggcagttccttgcaagtcaccagtgacttttcacatgaaataagcactgcagagtcattgagacaaagtgtcaggaagcctaaagtcaatgttgatctggcactcacggaacttctgaatcaaccattaattggggaggaaagactttctgctcatgattttttccttactctggctgcctgcaacacagtaattccagtgaacacagagggttctcacgatttgacaaatgaagtggatgagataggtgcaattgattaccagggtgaatcacctgatgagcaggctttagtaattgcagcgtctgcttatgggtatacccttgttgaaagaacaactggacacattgttatagatgttctaggcgagaggttaaggttggatgttcttggtctccatgaattcgatagtgtgagaaaaagaatgtctgttattgtaaggtttccggacaacaatgtgaaggttcttgtgaaaggtgctgacacatcaatgttaaacattttgaaagtagaaattgatgatgaactttatgattcgttgcatgttaaaattagagaagctacagaaaatcatttgtcagcctattcatcagagggtttacggaccttagtcattggttcaaaaaatctgacagatgcagaatttagtgaatggcaggaaatgtacgaagaagctagtacctccatgcatgagagatcagcaaagctccgtcaagcagcaggtctggtagaatgcaatctaacccttcttggtgcaactggaattgaagataaattgcaggatggtgttcctgaggccattgactctctgagacaggctggaatcaaggtgtgggttctcacaggagataagcaagaaactgctatatctattggtttgtcatgtcgattgttgactcaaaccatgcatttgatcatcataaatggttcctctgaggttgagtgcaggcgtcttctagctgaggctaaagccaaatttggaataaagtcagctgattttgggcgggatttgcaaggtacagaagacatgtaccatggtgatatttctaaattgaggccctcaaatggtcacctgtctgaaactggagcacaaagcctcgaactaaccggtgttattggtggtgacaagtcagagtacagtgagaacgtgacaaattttgatggcactgagttagcactgataattgatggaagctcccttgtgtatattctagagaaacctcttgaatcagagttatttgacttggcaacatcatgtaaagtcgtcatttgttgccgtgttgctcctctgcaaaaggctggtattgttgatttgattaaaagcagaacgagtgacatgaccctggcaattggtgacgatggctgatgttggtgttggcatatgtggtcaagaaggtcgtcaggcagtgatggcttcagactttgctatgggtcaattccgctttctgaagagattacttcttgtgcatgggcactggaattatcagcggatcgcatacatgatcctgtacaacttctaccggaatgctgtcttcgttctaatgcttttctggtatatcctatatacggcttattctgcaactctggcattaacagattggagcagtgttttctattcccttatatacacatcagttccaacggtagtagttggcattctcgacaagaacttaagtcataatacccttctttgttacccgagactatatgaggcagggcttcgaaatgagggctacaacttgacactcttctggatcacaatgctcgatacattgtggcaaagccttgttcttttctatgtcccttttttcacatacaatatcagtacaatggacatatggagtctgggaagtttgtggacaattgctgtggttataattgtcaatatccatttagccatggacattcaacgttgggtgcttataacccatcttgctgtatggggttctatagctgctacgtttttgtgcatggtgttaattgactctataccaattttccctaactatgggacaatttacaacatggctgcttcaaggacttactggcttagcgtttgtcttataatagtccttgggttgcttcctcgtctcctttgtaaagtggtatatcagaccttttggccatctgatattcaaatagcaagagaagctgagctttttaaaaagctgccccaacagttgggttcaaggcctgcaagtgacatcagctaacaacagcttcacacagttattttgtcaattctaaatttgaggctgtgttgattcatttgttgagctgatttttgtcgaattttgattatacgctgaggacaaacttcggtaaggtgtacaaatttggctcgtggaagaggcttcagaatgcaatggagcggctgacaaagggaactgactactggtggtgatgaaaacggcttgggtcttcgggggctagtaatgacaattgtacagatatgggacacaacgatacatacacttgtattttacggtagagtttgttagcttgtgtttagggaataaaaacataaatagatacagattcttttcgcactgcggtatttttttaatccctgactatatgttaaccgtcttcatttacttccagctgcctgagggtttagctgtagcggtttgcgctgtcagaatttttacattttacagcaatacgaggcccagttccctaatgtagtggttccaaaccacatcgaattttgttgaacatttattttcggatgtcagttttaattgtgagatgtaggtctgtttggttggatgtttaacttgccacactttatc

SEQ ID NO: 84019 - DNA, 973 bp, Zea Mays
gcactagttttttttctcttccatgtatcattaatttgattttaaaatattcaagatatctagatttggatatctcatgtcaatcgagtttttatagacagtataatatgtgatatggttcagccatgacttcggaacttcgctcattggagggtgcaagggtttcaaagatacatgtagtactacagtgggctgttgcattggttgaagtgaagccaagcttactttcaggtgaagcggagaaattcctttttgaggacatatatcaggttggagacgtggtgcttgttgcgaatgaatctgtgatcgataatgaacataaactggttggattgcacagcttggtgggctacaatgtcgtaacttcccggcgacgcaatgttggcaaggtgcgtggtttcacatttgacatcagctcaggtgctatggagtctctcgagcttgactcttttgggctttcgattgtcccttctagcttggtaagcacgtactgtttatttgtcgaagacgtgctggatatagtctccgatacagtcgtggtgcatgaagacgccgtctcacgggttcaacggttaacacagggcattttgggcactcaaaacatccacggacctggtggtgagattgacgagtacggtagatttggggggagggggaggaggaggagagcaaatggccagggaaagtctggtggccgagaactccgcagcgaaccgaagcatccggatgatgaatgggagctgccgatggactactgacacaaactcgccatgatagcattctgtttagtgctattgtattgccagaaaagtacatgctttgtacatataacataccagaggattgcgaattcagaaaagacgaaaggccctttcagccttgtcagagtttgatcgctttggcccgggtgggttagtataaaaagcgagattgtgttgccatgcaatgaccgtaaccccctttgtcttccccg

SEQ ID NO: 84020 - DNA, 1243 bp, Zea Mays
acgccaacccatcctgtcgtcgccgctgccggctggacctccttgagtccttgtcgaccactggactggatcagttagtttcagccttcaggcttccagcgatgtgttcctgcgcctgcgcgcgcctcctccccccgctcttcagccccgctccaagccccaatctcagacccgccttcccgcacagcccgacgccagcccgcagccgcgccgtcgtcgcgctcgcgggcgcagcctcccgggacgacgcgcctgcgccgttgtccagcttcgacttcctcgcactgaagcgggagcttgatgaggaggaggaggcagtggtggctgtggatgcgaaggaaggtgctggagctgtcaatgaggacgatggagagttgggggcggaatggagtgcgggtggtacgaggagacggcggcggaggcagatggcgaggcgatcggctctgcttgcgaagcagtgggctgttgcattggttgaagtgaagccaagcttactttcaggtgaagcggagaaattcctttttgaggacatatatcaggttggagacgtggtgcttgttgcgaatgaatctgtgatcgataatgaacataaactggttggattgcacagcttggtgggctacaatgtcgtaacttcccggcgacgcaatgttggcaaggtgcgtggtttcacatttgacatcagctcaggtgctatggagtctctcgagcttgactcttttgggctttcgattgtcccttctagcttggtaagcacgtactgtttatttgtcgaagacgtgctggatatagtctccgatacagtcgtggtgcatgaagacgccgtctcacgggttcaacggttaacacagggcattttgggcactcaaaacatccacggacctggtggtgagattgacgagtacggtagatttggggggagggggaggaggaggagagcaaatggccagggaaagtctggtggccgagaactccgcagcgaaccgaagcatccggatgatgaatgggagctgccgatggactactgacacaaactcgccatgatagcattctgtttagtgctattgtattgccagaaaagtacatgctttgtacatataacataccagaggattgcgaattcagaaaagacgaaaggccctttcagccttgtcagagtttgatcgctttggcccgggtgggttagtataaaaagcgagattgtgttgccatgcaatgaccgtaaccccctttgtcttccccg

SEQ ID NO: 84021 - DNA, 1153 bp, Zea Mays
acgccaacccatcctgtcgtcgccgctgccggctggacctccttgagtccttgtcgaccactggactggatcagttagtttcagccttcaggcttccagcgatgtgttcctgcgcctgcgcgcgcctcctccccccgctcttcagccccgctccaagccccaatctcagacccgccttcccgcacagcccgacgccagcccgcagccgcgccgtcgtcgcgctcgcgggcgcagcctcccgggacgacgcgcctgcgccgttgtccagcttcgacttcctcgcactgaagcgggagcttgatgaggaggaggaggcagtggtggctgtggatgcgaaggaaggtgctggagctgtcaatgaggacgatggagagttgggggcggaatggagtgcgggtggtacgaggagacggcggcggaggcagatggcgaggcgatcggctctgcttgcgaagcaggtgattagtgtgacctcggcgcggagcctcgggttcgtgtcgcagctctggatcgacaccgcctcggtgggctacaatgtcgtaacttcccggcgacgcaatgttggcaaggtgcgtggtttcacatttgacatcagctcaggtgctatggagtctctcgagcttgactcttttgggctttcgattgtcccttctagcttggtaagcacgtactgtttatttgtcgaagacgtgctggatatagtctccgatacagtcgtggtgcatgaagacgccgtctcacgggttcaacggttaacacagggcattttgggcactcaaaacatccacggacctggtggtgagattgacgagtacggtagatttggggggagggggaggaggaggagagcaaatggccagggaaagtctggtggccgagaactccgcagcgaaccgaagcatccggatgatgaatgggagctgccgatggactactgacacaaactcgccatgatagcattctgtttagtgctattgtattgccagaaaagtacatgctttgtacatataacataccagaggattgcgaattcagaaaagacgaaaggccctttcagccttgtcagagtttgatcgctttggcccgggtgggttagtataaaaagcgagattgtgttgccatgcaatgaccgtaaccccctttgtcttccccg

SEQ ID NO: 84022 - DNA, 1168 bp, Zea Mays
acgccaacccatcctgtcgtcgccgctgccggctggacctccttgagtccttgtcgaccactggactggatcagttagtttcagccttcaggcttccagcgatgtgttcctgcgcctgcgcgcgcctcctccccccgctcttcagccccgctccaagccccaatctcagacccgccttcccgcacagcccgacgccagcccgcagccgcgccgtcgtcgcgctcgcgggcgcagcctcccgggacgacgcgcctgcgccgttgtccagcttcgacttcctcgcactgaagcgggagcttgatgaggaggaggaggcagtggtggctgtggatgcgaaggaaggtgctggagctgtcaatgaggacgatggagagttgggggcggaatggagtgcgggtggtacgaggagacggcggcggaggcagatggcgaggcgatcggctctgcttgcgaagcagtgggctgttgcattggttgaagtgaagccaagcttactttcaggtgaagcggagaaattcctttttgaggacatatatcaggtgggctacaatgtcgtaacttcccggcgacgcaatgttggcaaggtgcgtggtttcacatttgacatcagctcaggtgctatggagtctctcgagcttgactcttttgggctttcgattgtcccttctagcttggtaagcacgtactgtttatttgtcgaagacgtgctggatatagtctccgatacagtcgtggtgcatgaagacgccgtctcacgggttcaacggttaacacagggcattttgggcactcaaaacatccacggacctggtggtgagattgacgagtacggtagatttggggggagggggaggaggaggagagcaaatggccagggaaagtctggtggccgagaactccgcagcgaaccgaagcatccggatgatgaatgggagctgccgatggactactgacacaaactcgccatgatagcattctgtttagtgctattgtattgccagaaaagtacatgctttgtacatataacataccagaggattgcgaattcagaaaagacgaaaggccctttcagccttgtcagagtttgatcgctttggcccgggtgggttagtataaaaagcgagattgtgttgccatgcaatgaccgtaaccccctttgtcttccccg

SEQ ID NO: 84023 - DNA, 3346 bp, Zea Mays
gcgccaccgtcccccatcgcaccgcatggtccgcaccacacggaactggcgcccacgccaatgcacgtcgggtccacccggtggcgtccccacctaccagcgagtcaccaccgaaacgcgaccatcgcgccgacgcgacggctgtaatcaacagacgggagtgaaactagcgagcaaagagcacagcggagcagggttggtcgccgttgctggcctggcctcgctcgccccctcccacttaatgccgcaccgcccgtaatccggaggcttccccctcccccttccttcccccacccgcgggctgctgctgccaccttctcctccccacaaggctcacctccgccgccaaccccggccgcgaatccaccgcagatcggcctcggcgcgccgcttgatgcccgatctgtaagaggggcttgccaccatgagggccttgctgctgctggcgcttctcctggccacttgcgccgcggcggcggcgcaagcggccaactctacggcgttcgtgccgcgggatgacatcctgctggactgcggcgcgaaggggcagggcaacgacacggacggccgggtctggaccggggacgcgggctccaagttcgccccgcccgacaacctcgcctccgtggcctccgcctctggccaggatccctcggtcccgcagcaaccacgacgccgccgacggcctcttctccgtctccgtcgccgtcccggggggcaagctcacccttctctccaacttcagcgcctaccagacggctgccgcgatcacctactcgtacctcatccgggagttctccgtcaacgtctcatccgcgacgctcgacctcaccttcaccccggagaaaggccacccgaacgcctacgcgttcgtcaacggcatcgaggtcgtgtcgtccccagacctcttcgacatctccactcccaacatggtcaccggcgatggcaacctccagccgttcccaatcgatgctggcactgcggtgcagactatgtaccggctcaacgtgggaggccaggcgatttcgccctccaaggacacgggtgggtaccggtcctgggacgacgacacagcatacatctttggcgctggcttcggggtcagctacccgaaggataacaatgtcaccatcacatatccaagcaatgtgccggagtatgtggcgccagaggatgtctacggcacagcgcgctccatggggccagataagaatgtgaacatgaactacaatctcacatggatgttgcaggttgatgctggattcatgtaccttatcaggctgcatttctgtgagatccagtacccgatcacaaagatcaatcagcgggtcttcagtatttacattaacaaccagactgcagtcaaggatgctgatgtgaacgcgtgggcgaccatgagtggtgctaccacccttattggcactccagtgtatcaggactatgtggtgaccacatcgggtttaggggccatggatttgtggatagctctccatccgaatcctgactcaaagccacaaatatatgatgctatcctcaatggaatggaggtgttcaagttaccgcttacaaatggtagccttgcagggctcaaccctatcccaagtgttgccccgatgactggtgggacagctaagaagaagtcaactgttgggcctatcgtcggtggagtgatcggaggtttggtggttcttgcacttgggtattgctgcttctttgtgatctgcaagcggaagaggagtgctgggaaggatgcaggcatgagtgatggacattctggttggctgcccctgtctctttatggcaattcacacacttccagttcggccaagtcacacactactggtagctatgcttcatctttgccatccaacctgtgccgccatttctcttttgctgagatcaaggctgcaacaaacaactttgatgagtccctcatcctcggtgtgggtggatttggcaaagtttaccgtggtgaggttgatgggggaacgactaaggtggctatcaagcgtggcaatcccttgtctgagcagggtgtgcatgagttccagactgagattgaaatgctgtccaagctccgccaccgtcatttggtgtcactgattgggtactgcgaggagaagaatgaaatgatcctggtctatgattacatggctcatggtactctccgcgagcacctgtacaagacccagaagccacctcttacctggaggcagcgtttggatatctgcattggtgcagctcgtgggcttcactaccttcacactggtgcaaagcacaccatcatccaccgggatgtgaagacaacaaacatccttctggatgagaaatgggttgccaaggtttcagattttggtctgtccaagactggcccatctatggaccatactcatgtgagcacagttgtcaaaggcagtttcggataccttgatcctgaatactttcgcaggcagcagctcacagagaagtctgatgtatactcttttggtgttgtgctgtttgaggtcctctgtgcacggcctgccttgaaccctactcttccaaaagaggaagttagcttggcggagtgggcgttgcactgccagaagaagggcgttcttgatcagattgttgacccctacctgaagggaaagatagctccacaatgcttcaagaagtttgctgagacagccgagaagtgtgtttctgatcagagtattgaccgcccttcgatgggcgatgtgctctggaacttggagtttgcccttcagatgcaggagagcgcggaagagagcggaagcctcggttgtgggatgtcggacgagggcactccccttgtgatggtcgggaagaaggatccaaatgacccgtcgatcgaatcgagcaccaccaccacaaccaccacttctttgagcatgggcgatcagagcgtcgcgagtatggactcggatgggctgacgcctagcgccgtcttctcacagatcatgaaccccaaggggcggtgaggtaaagctggtcccattcgttaccttgcattcattcagcatgtttttttcacgagttcgtgctgttacggttctctcgaattaagaaccagacgtccgagaattgtttcatactagatattctgccttgccctgtacttcttccccagtattgcaacgactgtacatctgttggcttgtattgtaccgctgctattgacccaactagtattttactttatgagaaagtgatgtgcacgaactattgttatgagtggtcgtgtgacgtgctgttaggaaggagtctcgactctgaattcgacatgcacacttgataatcagttttcaatctgaatgggttgcgagagctgatagatcgttgt

SEQ ID NO: 84024 - DNA, 2221 bp, Zea Mays
cggacataaaaaccagaaaaggggcgtcgaacctagggtttcgtctgtctcccgacgccgccgctaggctttgcgcctttgcctgcatcactcgctcattcggagcccctctcttcgccggcgtcgtaagaagagatggcagagcgtttgacccgtatcgccatagttagcgaggacaagtgcaagcccaagaagtgccgccaggagtgcaagaagagctgccccgtcgtcaagactgggaagctttgcattgaagtgacttcggcgtcgaaactcgctttcatttctgaggaactgtgcatcggttgtggtatctgtgtaaagaaatgcccatttgatgccattgaaatcatcaaccttccaaaagacttggaaaaggataccactcaccggtatgggcctaataccttcaagctgcacaggttgcctgtcccgagacctggtcaggttttgggccttgttggaacaaatggaattggaaagtcgacagctcttaaagtgttggctggcaagctgaaacctaacttggggcgcttcaaaaacccgcctgattggcaggaaattcttacatacttccgtgggtctgaacttcagaactacttcacacgcatattggaagataacttgaaggcaatcatcaaaccgcagtatgttgaccacatcccaaaggctgttcaagggaatgtaggacaagtgcttgaacagaaggacgagagggatatgaaagctgaactgtgtgttgatcttgaattaaaccaagttattgaccgaaatgtaggagatctttctggcggtgagctccagagatttgcaatagcagttgttgcagtgcaaaatgcggaaatctacatgttcgatgagccatcaagttaccttgatgtgaagcagaggctgaaagctgcacaagtcatcaggtccttgcttaggcccaacagctatgtcatcgttgtggaacatgacttgagtgtcttggattacttgtccgacttcatttgttgtttatatggcaagccaggtgcttatggtgtggttaccttgccattctcggtccgagagggtatcaatattttcttggctggatttgttccaacagaaaatcttcggttccgagacgaatctcttacatttaagagactcaagaaagtgctgaggagattgagacatatcagcggtataagtaccctactatgagcaaaacacaggggaatttcaagcttactgttgttgagggtgaatttaccgattctcagattgttgttatgcttggtgaaaacgggacagggaaaactaccttcattagaatgctggctgggttgttgaagccagacacagtggaaggaactgatattgaaattcctgaattcaatgtgtcttacaagccccaaaagattagcccgaaattcaagaacaccgtgaggcatttgctacaccagaaaattcgggattcctatatgcaccctcagtttgtgtctgatgtaatgaagccactgcaaattgaacaactcatggaccaggaggttgttaatttatctggtggagagctccaaagagttgctatatgcctctgccttggaaagcctgcagatatctatctgattgatgaaccaagtgcttatcttgattcggagcagcgtattgtggcctcaaaggttatcaagagattcattcttcacgctaagaaaactgcatttattgttgagcatgatttcatcatggcaacatacttggctgacaaggtcattgtttatgaggggcgaccttctattgactgttctgccaatgcaccacagtctttagtatccgggatgaataaattcttatcgcatcttgacattacttttagaagagacccgaccaactataggccacgtataaacaagttggactctacaaaggacagggaacagaagtcggccgggtcctactactacctcgatgactaatgaggaagcacagattcttcttggagagccatatggcgcatagtctttcgagggcgcggagagtgcggaaacgagaagctactatgaagctaccacactacatggcatgagacttggttgcaggagtagagtgcgccggttataacttataaagcagagcatgctgtgttgatactggttttttttccctttttggcttgacctatatgaagaaaaggattggcgttaaaatggcaaagaagagaagcagcaacgaggcgaagaagggatacgtgcac

SEQ ID NO: 84025 - DNA, 2153 bp, Zea Mays
agagaataagggaaaaaagtcggacataaaaaccagaaaaggggcgtcgaacctagggtttcgtctgtctcccgacgccgccgctaggctttgcgcctttgcctgcatcactcgctcattcggagcccctctcttcgccggcgtcgtaagaagagatggcagagcgtttgacccgtatcgccatagttagcgaggacaagtgcaagcccaagaagtgccgccaggagtgcaagaagagctgccccgtcgtcaagactgggaagctttgcattgaagtgacttcggcgtcgaaactcgctttcatttctgaggaactgtgcatcggttgtggtatctgtgtaaagaaatgcccatttgatgccattgaaatcatcaaccttccaaaagacttggaaaaggataccactcaccggtatgggcctaataccttcaagctgcacaggttgcctgtcccgagacctggtcaggttttgggccttgttggaacaaatggaattggaaagtcgacagctcttaaagtgttggctggcaagctgaaacctaacttggggcgcttcaaaaacccgcctgattggcaggaaattcttacatacttccgtgggtctgaacttcagaactacttcacacgcatattggaagataacttgaaggcaatcatcaaaccgcagtatgttgaccacatcccaaaggctgttcaagggaatgtaggacaagtgcttgaacagaaggacgagagggatatgaaagctgaactgtgtgttgatcttgaattaaaccaagttattgaccgaaatgtaggagatctttctggcggtgagctccagagatttgcaatagcagttgttgcagtgcaaaatgcggaaatctacatgttcgatgagccatcaagttaccttgatgtgaagcagaggctgaaagctgcacaagtcatcaggtccttgcttaggcccaacagctatgtcatcgttgtggaacatgacttgagtgtcttggattacttgtccgacttcatttgttgtttatatggcaagccaggtgcttatggtgtggttaccttgccattctcggtccgagagggtatcaatattttcttggctggatttgttccaacagaaaatcttcggttccgagacgaatctcttacatttaagattgcagagactcaagaaagtgctgaggagattgagacatatcagcggtataagtaccctactatgagcaaaacacaggggaatttcaagcttactgttgttgagggtgaatttaccgattctcagattgttgttatgcttggtgaaaacgggacagggaaaactaccttcattagaatgctggctgggttgttgaagccagacacagtggaaggaactgatattgaaattcctgaattcaatgtgtcttacaagccccaaaagattagcccgaaattcaagaacaccgtgaggcatttgctacaccagaaaattcgggattcctatatgcaccctcagtttgtgtctgatgtaatgaagccactgcaaattgaacaactcatggaccaggaggttgttaatttatctggtggagagctccaaagagttgctatatgcctctgccttggaaagcctgcagatatctatctgattgatgaaccaagtgcttatcttgattcggagcagcgtattgtggcctcaaaggttatcaagagattcattcttcacgctaagaaaactgcatttattgttgagcatgatttcatcatggcaacatacttggctgacaaggtcattgtttatgaggggcgaccttctattgactgttctgccaatgcaccacagtctttagtatccgggatgaataaattcttatcgcatcttgacattacttttagaagagacccgaccaactataggccacgtataaacaagttggactctacaaaggacagggaacagaagtcggccgggtcctactactacctcgatgactaatgaggaagcacagattcttcttggagagccatatggcgcatagtctttcgagggcgcggagagtgcggaaacgagaagctactatgaagctaccacactacatggcatgagacttggttgcaggagtagagtgcgccggcaaagaagagaagcagcaacgaggcgaagaagggatacgtgcac

SEQ ID NO: 84026 - DNA, 2164 bp, Zea Mays
caaaaagtctcgtaggaatagagaataagggaaaaaagtcggacataaaaaccagaaaaggggcgtcgaacctagggtttcgtctgtctcccgacgccgccgctaggctttgcgcctttgcctgcatcactcgctcattcggagcccctctcttcgccggcgtcgtaagaagagatggcagagcgtttgacccgtatcgccatagttagcgaggacaagtgcaagcccaagaagtgccgccaggagtgcaagaagagctgccccgtcgtcaagactgggaagctttgcattgaagtgacttcggcgtcgaaactcgctttcatttctgaggaactgtgcatcggttgtggtatctgtgtaaagaaatgcccatttgatgccattgaaatcatcaaccttccaaaagacttggaaaaggataccactcaccggtatgggcctaataccttcaagctgcacaggttgcctgtcccgagacctggtcaggttttgggccttgttggaacaaatggaattggaaagtcgacagctcttaaagtgttggctggcaagctgaaacctaacttggggcgcttcaaaaacccgcctgattggcaggaaattcttacatacttccgtgggtctgaacttcagaactacttcacacgcatattggaagataacttgaaggcaatcatcaaaccgcagtatgttgaccacatcccaaaggctgttcaagggaatgtaggacaagtgcttgaacagaaggacgagagggatatgaaagctgaactgtgtgttgatcttgaattaaaccaagttattgaccgaaatgtaggagatctttctggcggtgagctccagagatttgcaatagcagttgttgcagtgcaaaatgcggaaatctacatgttcgatgagccatcaagttaccttgatgtgaagcagaggctgaaagctgcacaagtcatcaggtccttgcttaggcccaacagctatgtcatcgttgtggaacatgacttgagtgtcttggattacttgtccgacttcatttgttgtttatatggcaagccaggtgcttatggtgtggttaccttgccattctcggtccgagagggtatcaatattttcttggctggatttgttccaacagaaaatcttcggttccgagacgaatctcttacatttaagattgcagagactcaagaaagtgctgaggagattgagacatatcagcggtataagtaccctactatgagcaaaacacaggggaatttcaagcttactgttgttgagggtgaatttaccgattctcagattgttgttatgcttggtgaaaacgggacagggaaaactaccttcattagaatgctggctgggttgttgaagccagacacagtggaaggaactgatattgaaattcctgaattcaatgtgtcttacaagccccaaaagattagcccgaaattcaagaacaccgtgaggcatttgctacaccagaaaattcgggattcctatatgcaccctcagtttgtgtctgatgtaatgaagccactgcaaattgaacaactcatggaccaggaggttgttaatttatctggtggagagctccaaagagttgctatatgcctctgccttggaaagcctgcagatatctatctgattgatgaaccaagtgcttatcttgattcggagcagcgtattgtggcctcaaaggttatcaagagattcattcttcacgctaagaaaactgcatttattgttgagcatgatttcatcatggcaacatacttggctgacaaggtcattgtttatgaggggcgaccttctattgactgttctgccaatgcaccacagtctttagtatccgggatgaataaattcttatcgcatcttgacattacttttagaagagacccgaccaactataggccacgtataaacaagttggactctacaaaggacagggaacagaagtcggccgggtcctactactacctcgatgactaatgaggaagcacagattcttcttggagagccatatggcgcatagtctttcgagggcgcggagagtgcggaaacgagaagctactatgaagctaccacactacatggcatgagacttggttgcaggagtagagcaaagaagagaagcagcaacgaggcgaagaagggatacgtgcac

SEQ ID NO: 84027 - DNA, 2273 bp, Zea Mays
atctatcaaaaagtctcgtaggaatagagaataagggaaaaaagtcggacataaaaaccagaaaaggggcgtcgaacctagggtttcgtctgtctcccgacgccgccgctaggctttgcgcctttgcctgcatcactcgctcattcggagcccctctcttcgccggcgtcgtaagaagagatggcagagcgtttgacccgtatcgccatagttagcgaggacaagtgcaagcccaagaagtgccgccaggagtgcaagaagagctgccccgtcgtcaagactgggaagctttgcattgaagtgacttcggcgtcgaaactcgctttcatttctgaggaactgtgcatcggttgtggtatctgtgtaaagaaatgcccatttgatgccattgaaatcatcaaccttccaaaagacttggaaaaggataccactcaccggtatgggcctaataccttcaagctgcacaggttgcctgtcccgagacctggtcaggttttgggccttgttggaacaaatggaattggaaagtcgacagctcttaaagtgttggctggcaagctgaaacctaacttggggcgcttcaaaaacccgcctgattggcaggaaattcttacatacttccgtgggtctgaacttcagaactacttcacacgcatattggaagataacttgaaggcaatcatcaaaccgcagtatgttgaccacatcccaaaggctgttcaagggaatgtaggacaagtgcttgaacagaaggacgagagggatatgaaagctgaactgtgtgttgatcttgaattaaaccaagttattgaccgaaatgtaggagatctttctggcggtgagctccagagatttgcaatagcagttgttgcagtgcaaaatgcggaaatctacatgttcgatgagccatcaagttaccttgatgtgaagcagaggctgaaagctgcacaagtcatcaggtccttgcttaggcccaacagctatgtcatcgttgtggaacatgacttgagtgtcttggattacttgtccgacttcatttgttgtttatatggcaagccaggtgcttatggtgtggttaccttgccattctcggtccgagagggtatcaatattttcttggctggatttgttccaacagaaaatcttcggttccgagacgaatctcttacatttaagattgcagagactcaagaaagtgctgaggagattgagacatatcagcggtataagtaccctactatgagcaaaacacaggggaatttcaagcttactgttgttgagggtgaatttaccgattctcagattgttgttatgcttggtgaaaacgggacagggaaaactaccttcattagaatgctggctgggttgttgaagccagacacagtggaaggaactgatattgaaattcctgaattcaatgtgtcttacaagccccaaaagattagcccgaaattcaagaacaccgtgaggcatttgctacaccagaaaattcgggattcctatatgcaccctcagtttgtgtctgatgtaatgaagccactgcaaattgaacaactcatggaccaggaggttgttaatttatctggtggagagctccaaagagttgctatatgcctctgccttggaaagcctgcagatatctatctgattgatgaaccaagtgcttatcttgattcggagcagcgtattgtggcctcaaaggttatcaagagattcattcttcacgctaagaaaactgcatttattgttgagcatgatttcatcatggcaacatacttggctgacaaggtcattgtttatgaggggcgaccttctattgactgttctgccaatgcaccacagtctttagtatccgggatgaataaattcttatcgcatcttgacattacttttagaagagacccgaccaactataggccacgtataaacaagttggactctacaaaggacagggaacagaagtcggccgggtcctactactacctcgatgactaatgaggaagcacagattcttcttggagagccatatggcgcatagtctttcgagggcgcggagagtgcggaaacgagaagctactatgaagctaccacactacatggcatgagacttggttgcaggagtagagtgcgccggttataacttataaagcagagcatgctgtgttgatactggttttttttccctttttggcttgacctatatgaagaaaaggattggcgttaaaatggcaaagaagagaagcagcaacgaggcgaagaagggatacgtgcac

SEQ ID NO: 84028 - DNA, 3078 bp, Zea Mays
cggacataaaaaccagaaaaggggcgtcgaacctagggtttcgtctgtctcccgacgccgccgctaggctttgcgcctttgcctgcatcactcgctcattcggagcccctctcttcgccggcgtcgtaagaagagatggcagagcgtttgacccgtatcgccatagttagcgaggacaagtgcaagcccaagaagtgccgccaggagtgcaagaagagctgccccgtcgtcaagactgggaagctttgcattgaagtgacttcggcgtcgaaactcgctttcatttctgaggaactgtgcatcggttgtggtatctgtgtaaagaaatgcccatttgatgccattgaaatcatcaaccttccaaaagacttggaaaaggataccactcaccggtatgggcctaataccttcaagctgcacaggttgcctgtcccgagacctggtcaggttttgggccttgttggaacaaatggaattggaaagtcgacagctcttaaagtgttggctggcaagctgaaacctaacttggggcgcttcaaaaacccgcctgattggcaggaaattcttacatacttccgtgggtctgaacttcagaactacttcacacgcatattggaagataacttgaaggcaatcatcaaaccgcagtatgttgaccacatcccaaaggctgttcaagggaatgtaggacaagtgcttgaacagaaggacgagagggatatgaaagctgaactgtgtgttgatcttgaattaaaccaagttattgaccgaaatgtaggagatctttctggcggtgagctccagagatttgcaatagcagttgttgcagtgcaaaatgcggaaatctacatgttcgatgagccatcaagttaccttgatgtgaagcagaggctgaaagctgcacaagtcatcaggtccttgcttaggcccaacagctatgtcatcgttgtggaacatgacttgagtgtcttggattacttgtccgacttcatttgttgtttatatggcaagccaggtgcttatggtgtggttaccttgccattctcggtccgagagggtatcaatattttcttggctggatttgttccaacagaaaatcttcggttccgagacgaatctcttacatttaagattgcagagactcaagaaagtgctgaggagattgagacatatcagcggtataagtaccctactatgagcaaaacacaggggaatttcaagcttactgttgttgagggtgaatttaccgattctcagattgttgttatgcttggtgaaaacgggacagggaaaactaccttcattagaatgctggctgggttgttgaagccagacacagtggaaggaactgatattgaaattcctgaattcaatgtgtcttacaagccccaaaagattagcccgaaattcaagaacaccgtgaggcatttgctacaccagaaaattcgggattcctatatgcaccctcagtttgtgtctgatgtaatgaagccactgcaaattgaacaactcatggaccaggaggttgttaatttatctggtggagagctccaaagagttgctatatgcctctgccttggaaagcctgcagatatctatctgattgatgaaccaagtgcttatcttgattcggagcagcgtattgtggcctcaaaggttatcaagagattcattcttcacgctaagaaaactgcatttattgttgagcatgatttcatcatggcaacatacttggctgacaaggtcattgtttatgaggggcgaccttctattgactgttctgccaatgcaccacagtctttagtatccgggatgaataaattcttatcggtaagtgcatgataacaaaatatggactgttaccaataacatagcgtgctctttgttggtccagccttatgcagttctcataatttaatcttcagtcatactatatatctgcacttcaaacttttatgggttaattgtatgcatgccactaaacttttgcaaatttagatggttagttcattttgatgctatggagtggcatgaaaatgcactagtttctaacttttcaaaattggagttgtatatttctaattaacccaacttttattggcctggagtctagcttattaccctttacattggttcctatagtattaacctaggatttcatgggttgtacaaaaacatagaattacgtgcactagttttcttttgattttggtgtagtatctccatgttggtttccaaaaaagatgcactagttttcttttgattttggtgtagtatctccatgttggtttccaaaaaagatccaaccaactacaggctgtttataaacgaacaggactgtgacagaccaggctcttcaagaccttactaacagcttgatgtctaacaaaaatcttcagtaggatttgagaactcgaatatatttgcacataaaaaacctgttgctgtatctgtgtcattgctttgatttcttcatcattggcttatctatttccctgcactaacttcacttgccattcttgtggtagcatcttgacattacttttagaagagacccgaccaactataggccacgtataaacaagttggactctacaaaggacagggaacagaagtcggccgggtcctactactacctcgatgactaatgaggaagcacagattcttcttggagagccatatggcgcatagtctttcgagggcgcggagagtgcggaaacgagaagctactatgaagctaccacactacatggcatgagacttggttgcaggagtagagtgcgccggttataacttataaagcagagcatgctgtgttgatactggttttttttccctttttggcttgacctatatgaagaaaaggattggcgttaaaatggtattgtgaagggagaggtttttaagcaaaaatgttgtaccgtcgttttgccatcgagtatatttgaccctcgattatatagatcacattaaatttttggagcaacaatatgaaatctcgtgacaagtcgttgtgctttttggttctgattgtaattcattcttgagtttgaatgatcaagtacgctggttgccgac

SEQ ID NO: 84029 - DNA, 4332 bp, Zea Mays
acagcccccggcgcgcgggcgagccgacgagagtgggagtgtacggcagcggtagggtgggtttgctctttgattggccgcggctaaacaccaaaccttggggaaatggagctgctcagtggtgcagtggcggagcgggagcttggggaagcggaagcttgcgagcagccagagcactagccattacccagcgctaccctacactgacaagtccatcgatctgatcgcgctgctgctgagtgcagtgtgtatacaaaaggccgtgaaggcggtaagaccgagctgcaaaggggtgtgagggagaagcgagaagcccgtgagctgagctgctgcggtgctagggagccagggtttcgtttcgtttcgtctcgtctggcccctcttctcttggcgcggccatggacgcctacgaggccaccaaggtggtgttctcccggatccaagcgctagacccggaccacgccgccaagatcatgggtctcctcctcatccaggaccacggcgagaaggagatgattcgtctcgccttcggccccgaatctctgctccacgctgtcatggccaaggcgcgcaaggacctcggcctgctcctcccggcctcgccgacctccgtcgcggccgccggccacgcgccgttcctgcagctcccacgccaaaactccgggcgcgccggcgccccatcgccgctctcggtgtcctcgccgtcgtcatgggggcacgcgccggcgttctccaggagcaatagcacgagtaatggtactggcaccgcggaggaggcggcgggggctggggaggagctgcccagtcccgtgaacggcggcgcagcgccgttcttccctcatcagtccggggacgcgctcctggacgacttgcagctgcaggagcagcttgcgttcctcaacgagggcagcgcgaacccggcccaccagctcccgggtttcgtcggcggggagtgccggagccccggtccgggtgatgcctctgggatgttcgcgttcggcctcgggtggcccaacggcggcccagcgcaccgccggagctcgtcagtcaacgagttctgccttggcggcggcggcggcggcgatggtttcgggtggaagccctgtctctactacgcgcgcgggttctgcaagaacggcggcagctgcaggttcgtacatggcggtctctcagacgacgctgctgccttcgctggcgccaagatggaggcagctgccgatcagcagcagcagcagcagtgccaggacttcctcatccgttccaagagccagcgcctcggctccgccgccttcccctactcctccaccggctccctcccaggctcgccctccgccgctagcaagtgcctcagctttctgctgcagcaacagcaacagcagcacgacagagccgcggcggccgcgtctctgatgctgggcggcggcgacgaggcgcacaagttcatgggccggccgcgcctggaccgtgctgacttcgcgaacatgatgaacccgggctcgcggcagatttacctgacattcccggccgacagcacgttccgcgaggaggacgtctccaactacttcagcatctacggtccagttcacgacgtgcgcattccctaccagcagaagcgcatgttcgggttcgtcaccttcgtgtacccagagacggtgaagctcatcctggccaagggcaacccgcacttcatctgcgacgcacgcgtgctcgtcaagccctacaaggagaagggcaaggtccccgacaagtgcaggaagccgcagcaaggggacttctccggctgcacgacgcccactggcgggctggacggcgggtacccctttgatctgcaccagctcggcggcaggatgctgcagcactcgagcagcgccaacgagctgctcctacgccgaaagctggaggaacagcagcaggccattgagctccagagccgtcgcctcatgggtcttcagcttctcgaccttaaggctcgcgctgctgctgcagcagcatcgccactgccgacaccaattggcgatgccttcgcgtccagccaacctgtgagcaccaccgcagtcgagtcgccatcgccgccagagtccgcagctgctcaagctgaggagcggatttgctctggaggggaaggtcaacggtggtgataaggaggaatctgctcgcgaggcgagcccagacgccgctgatagcgaccaaagcggcggagagcacaatttgccggacagcccattcgcatcccctacgaaatctgctgcgcttttgcatgacagtttcactgccacggagaccgagagcaccgccgcgtcccgtgttggcgtggatgccggtgtcgggagcaagatcgacggtggaagcaaccatctccgcccccccgcgttggaaatcccttcgcccagctcctacttcttccccatgcacaggctgtcctccgatcacggagccatggggatgtaaagttcaccattgtaggcgagttataccccccaacctaatcatagtaagcactaacggcatctttattccgacttggcttctcaaataacagcctttctgctttactaattattctgccctctctctgtctctctctcttattttttctctctctcttctttcgctgctttgtggttgtgacaggaatactagaagccaagaaaagcgatggtggaatatatagggaaaaaaaaaggagtcgagtgtcagcatagtgttagctcccttatgttctagtaccttttttagaggatagttctactaaaccacaagagaagaagatgccattagccttgattaagaaaacggcagcatatgcagtattgccagatataagtatatatatattatatatacaaataatccagtgtcaccctagtctttagagagagatatataaatagtatctgtacttaatgtttaccagtagcaggcaggtaacatgagcacaaagatgttactgtgacactgtccttgatgtactctacaatgacaggccccccaacccaccccacccccactaggtttattatactaaatgcgaggttaatccacgattctggtaccagccacatgtcacatgtaaagagcagtacagctacagcctgctgcgagattcatcagatattgtatactactaggccactagggaggcccagtgactgtagaagtgcacatgaccatggcagttgtctgtaagctattttaactgctactagtgcaagatcccaagccaggatagagagtcatagaggtgtgtgtgtatgcgtgggtgtctcggtatgggtctcctagtatgtccgcagtctgcagagacaggtcgctgcagaatactactacaatactactagtacatgattgtattgacctagttgcgtggatgtagttgacagtttgacacctctatctacagacagaatggaagtaaaagtgagaaagaaagtttgtgcgagtgcttttgcctccattgatccatctttcaaaacctcgaaaggtgtgctttgcccctccagcggtccaattgatccacctttcaagatctcaaaggtaccgggatcaggtgttgctgctgttgtgagatgggtgtgaggatcttgactgaagaatgatggcggtagcgggtagcctatgagtgaatttatttaagtgtccaaaaggcttattttggaacgcaggaatttcagagaaatcgtataggaaatttacaggaatcgtgaagctgtgatctattcagatgtggctgtggttgtttgcagctatatatacagtggaatctaatttatttttgcacccataacagtttctgcagcaattaaaagttggccagccgaacagctttaattcacaagaaaaacgtaggaaacaagaaaaaaaattctttgttccaaagtagcactaattcttatttccgccaggatattttaattattttgttatcctacaacattcctaccagcagaatgcaatgcaggtcagattcgtttcgatcagctttagtcgtgaccctagaacattgcatcaagtacaatcatgtttgtcccagagtatctttgattacctgatgcaaagcccgaggcagcaacatcagcatgggcgtccacatcagtgcatgccgtggaattaacgatgattttgtgaaccgatgcagtagtgactcgtttgcctgattgagctgtaagcgccgtctagatgtggtctgcagatgccaacacgggccggcgacttttaagaaaccaaacccaaaaaaaaatgaattcgaggcaaataaaactgcagctcgaattgttgttgattttgttagcaagttttgtctggtggcattagactaaatctgtagcatggact

SEQ ID NO: 84030 - DNA, 4416 bp, Zea Mays
acagcccccggcgcgcgggcgagccgacgagagtgggagtgtacggcagcggtagggtgggtttgctctttgattggccgcggctaaacaccaaaccttggggaaatggagctgctcagtggtgcagtggcggagcgggagcttggggaagcggaagcttgcgagcagccagagcactagccattacccagcgctaccctacactgacaagtccatcgatctgatcgcgctgctgctgagtgcagtgtgtatacaaaaggccgtgaaggcggtaagaccgagctgcaaaggggtgtgagggagaagcgagaagcccgtgagctgagctgctgcggtgctagggagccagggtttcgtttcgtttcgtctcgtctggcccctcttctcttggcgcggccatggacgcctacgaggccaccaaggtggtgttctcccggatccaagcgctagacccggaccacgccgccaagatcatgggtctcctcctcatccaggaccacggcgagaaggagatgattcgtctcgccttcggccccgaatctctgctccacgctgtcatggccaaggcgcgcaaggacctcggcctgctcctcccggcctcgccgacctccgtcgcggccgccggccacgcgccgttcctgcagctcccacgccaaaactccgggcgcgccggcgccccatcgccgctctcggtgtcctcgccgtcgtcatgggggcacgcgccggcgttctccaggagcaatagcacgagtaatggtactggcaccgcggaggaggcggcgggggctggggaggagctgcccagtcccgtgaacggcggcgcagcgccgttcttccctcatcagtccggggacgcgctcctggacgacttgcagctgcaggagcagcttgcgttcctcaacgagggcagcgcgaacccggcccaccagctcccgggtttcgtcggcggggagtgccggagccccggtccgggtgatgcctctgggatgttcgcgttcggcctcgggtggcccaacggcggcccagcgcaccgccggagctcgtcagtcaacgagttctgccttggcggcggcggcggcggcgatggtttcgggtggaagccctgtctctactacgcgcgcgggttctgcaagaacggcggcagctgcaggttcgtacatggcggtctctcagacgacgctgctgccttcgctggcgccaagatggaggcagctgccgatcagcagcagcagcagcagtgccaggacttcctcatccgttccaagagccagcgcctcggctccgccgccttcccctactcctccaccggctccctcccaggctcgccctccgccgctagcaagtgcctcagctttctgctgcagcaacagcaacagcagcacgacaggtagagaagccgcctttacaagttctttcccccaaactcgaatcattcgcaccaaagctccagcctttttcgcctgttcgcgtgcagagccgcggcggccgcgtctctgatgctgggcggcggcgacgaggcgcacaagttcatgggccggccgcgcctggaccgtgctgacttcgcgaacatgatgaacccgggctcgcggcagatttacctgacattcccggccgacagcacgttccgcgaggaggacgtctccaactacttcagcatctacggtccagttcacgacgtgcgcattccctaccagcagaagcgcatgttcgggttcgtcaccttcgtgtacccagagacggtgaagctcatcctggccaagggcaacccgcacttcatctgcgacgcacgcgtgctcgtcaagccctacaaggagaagggcaaggtccccgacaagtgcaggaagccgcagcaaggggacttctccggctgcacgacgcccactggcgggctggacggcgggtacccctttgatctgcaccagctcggcggcaggatgctgcagcactcgagcagcgccaacgagctgctcctacgccgaaagctggaggaacagcagcaggccattgagctccagagccgtcgcctcatgggtcttcagcttctcgaccttaaggctcgcgctgctgctgcagcagcatcgccactgccgacaccaattggcgatgccttcgcgtccagccaacctgtgagcaccaccgcagtcgagtcgccatcgccgccagagtccgctgctcaagctgaggagcggatttgctctggaggggaaggtcaacggtggtgataaggaggaatctgctcgcgaggcgagcccagacgccgctgatagcgaccaaagcggcggagagcacaatttgccggacagcccattcgcatcccctacgaaatctgctgcgcttttgcatgacagtttcactgccacggagaccgagagcaccgccgcgtcccgtgttggcgtggatgccggtgtcgggagcaagatcgacggtggaagcaaccatctccgcccccccgcgttggaaatcccttcgcccagctcctacttcttccccatgcacaggctgtcctccgatcacggagccatggggatgtaaagttcaccattgtaggcgagttataccccccaacctaatcatagtaagcactaacggcatctttattccgacttggcttctcaaataacagcctttctgctttactaattattctgccctctctctgtctctctctcttattttttctctctctcttctttcgctgctttgtggttgtgacaggaatactagaagccaagaaaagcgatggtggaatatatagggaaaaaaaaaggagtcgagtgtcagcatagtgttagctcccttatgttctagtaccttttttagaggatagttctactaaaccacaagagaagaagatgccattagccttgattaagaaaacggcagcatatgcagtattgccagatataagtatatatatattatatatacaaataatccagtgtcaccctagtctttagagagagatatataaatagtatctgtacttaatgtttaccagtagcaggcaggtaacatgagcacaaagatgttactgtgacactgtccttgatgtactctacaatgacaggccccccaacccaccccacccccactaggtttattatactaaatgcgaggttaatccacgattctggtaccagccacatgtcacatgtaaagagcagtacagctacagcctgctgcgagattcatcagatattgtatactactaggccactagggaggcccagtgactgtagaagtgcacatgaccatggcagttgtctgtaagctattttaactgctactagtgcaagatcccaagccaggatagagagtcatagaggtgtgtgtgtatgcgtgggtgtctcggtatgggtctcctagtatgtccgcagtctgcagagacaggtcgctgcagaatactactacaatactactagtacatgattgtattgacctagttgcgtggatgtagttgacagtttgacacctctatctacagacagaatggaagtaaaagtgagaaagaaagtttgtgcgagtgcttttgcctccattgatccatctttcaaaacctcgaaaggtgtgctttgcccctccagcggtccaattgatccacctttcaagatctcaaaggtaccgggatcaggtgttgctgctgttgtgagatgggtgtgaggatcttgactgaagaatgatggcggtagcgggtagcctatgagtgaatttatttaagtgtccaaaaggcttattttggaacgcaggaatttcagagaaatcgtataggaaatttacaggaatcgtgaagctgtgatctattcagatgtggctgtggttgtttgcagctatatatacagtggaatctaatttatttttgcacccataacagtttctgcagcaattaaaagttggccagccgaacagctttaattcacaagaaaaacgtaggaaacaagaaaaaaaattctttgttccaaagtagcactaattcttatttccgccaggatattttaattattttgttatcctacaacattcctaccagcagaatgcaatgcaggtcagattcgtttcgatcagctttagtcgtgaccctagaacattgcatcaagtacaatcatgtttgtcccagagtatctttgattacctgatgcaaagcccgaggcagcaacatcagcatgggcgtccacatcagtgcatgccgtggaattaacgatgattttgtgaaccgatgcagtagtgactcgtttgcctgattgagctgtaagcgccgtctagatgtggtctgcagatgccaacacgggccggcgacttttaagaaaccaaacccaaaaaaaaatgaattcgaggcaaataaaactgcagctcgaattgttgttgattttgttagcaagttttgtctggtggcattagactaaatctgtagcatggact

SEQ ID NO: 84031 - DNA, 6295 bp, Zea Mays
gtgtacatgttccttatatagagatgtgagacccctcaggggcaaagccggtatttgcccatataaccctaactagggttacttaacactttgtattttacgcctcgtttccccctccttccattaaaaaaaaaacacacccagacaccctccccccaactccacccgcttccttcgcttcccttcacccccactccaccaaaccctcacgtcgctgggactgggcagcgcagagcagagtagcagacagagcacagcggagcagaaggtggcgagtggaagcaaatggggaatgagtggcggcaaatgggcaatgagtggcggcggcggtagtagctagcatagcatcctcctcgccttttcttctccccgccctctcgcgctctggttgttgcagccagtgggagcgagaggactcgtgctgcctccgtcgcttctccggcacgcctccctcgcccggatctgcgccgctcgcgtgggatcctgagctccgggttggagagctctcgcgttccgggtcaggtgacggtgatggagcccgcggtggctacggcgggtgaagggcagcggttcaagcggatttcgcggcaggcgtggtcggggaacctggaactggatcctttgcttaatgaaagcttagatcagtggccacatctaaatgatctggtacagtgctacaaggctgattttgtgaaggatgactgcaaatatggacgctatgagagtgttgcaccaccatctttccaaaatcaaattttcgagggacctgatacagacatagaaacagaattgcagctttgcaacgcaagacatttcaagcctgaagatcctaccgaagatgatatgccaagcacctcagggaggcaaatgtatgaaaccgaatcatctgcttcatcttcaaaagtgcactgtagtctgtcaccactgccagcatatgagcctgcatttgattgggagaatgagaggtctttgatatttggccaaagggtgccagaaagtataccagcaataagcaacagtggcttgaagataactgtcaaggtactatctttgtcattccaagctggattagttggtgagcaaaactagaatattttagatagaagagaaaaactgtcagaagacttctactttcacatacttccaacagatatgcaggatgctcagggttctttggatcgtcgaggcgttttttcattggacacaccttcaccatcagtctgccttttgattcaattggaaaaggctgctactgaagaagggggagtaacaccttctgtttattctcgtaaagagcctgtgcacttagctgagaaagagaagcaaaagctgcaagtatggtctcgaattatgccttgtaaagagtcatttgcatgggccatgattcctctgtttgaaggtaaccatgcgggtggtcttagtgatgctgcttctcctagcagtcctttagcaacaagtttaccaggatcaacttctcaagatagtattgtggaccctattttaaagcttactttagatggaaaagtaaaccattactcgagtggaagctcagttattgtagagatatcaaacctaaacaaagtgaaggaaagctatatagtggactccctccaagatccaaaacggaaagtacataaaccagtgaaaggtgtattgagattagaagtggaaaaacttcatggtggccacaatgatgtggataacacttctgaaggcggaagcatggccaatgatttgaatgatgctggtgacatcaataatggcagaagcaacagaagtagctttgatgggattcacagttttgtgaattctattgccattgcccagaaagatgctcatcacaatggaatcatttctaatgctgagaatggtgacaattttgaagcttttgactttcggatgctgacccgaagtgagccgttttcacaactttttcattgcctctatgtgtacccattgactgttagcttgagccgcaaaagaaacctgtttgttagagtggaactgagaaaggacgattctgacatccgaaagcctccattagaggctgttcatcctagggagcggaatatgatgctacagaagtggggccatacacagattgctgttggaacaagaatggcttcctaccatgatgaagttaaaatcagcctacctgctcttttgacaccccagcatcatcttgtgttcacatttttccatgtagatcttcaaatgaaacttgaagcaccaaaaccagtgatcgttgggcattctgtacttccactgtcgacacatattcagttactttcagatgtatccttgccaattttgagagagctcgttccacattacctgcagggaagtggaaaggagagaatggactatctggaagatggaaaaactgttttcaagttgcgtttaaggctctgttcttcattgttcccggttaatgaaaggataagagacttttttgttgaatatgaccgccatactctacatacaagtcccccatggggttctgagcttcttgaggccataaatagtttgaaaaacgttgaatctactgcattattacaatttctgcaaccaatacttaacatgctgcttcatcttattggcgatggcggtgagacccttcaggttgctgcgtttcgagccatggttaacattttaacccgtgtgcagcaggagtcatcagatggggctgagagaaatagattccttattaattatgttgattttgcttttgatgacttcggcggtcggcaagcacctgtgtatcctggtctgtctactgtttggggaagtcttgctaggagtaaggcgaaaggttatagagttggtcctgtgtatgatgatgtgttggcaatggcttggttttttctggagcttattgtaaaatcaatgggattggaacaaagtcgtctcttctaccacaaccttccattaggtgaagatgtcccaccgctacaattgaaagaaggtgtcttcagcacgcttgctttcttttgctatgatcttttatcaataattgagcctcgccaagtttttgagctggtttcgttgtacatggacaagtttgcaggagtttgtcaagcagtccttcatgactgcaaattgacattcctgcagataatatgcgaccatgatctattcgttgagatgcctgggcgggatccctctgatagaaactatctctcgtcagttcttattcaagagatctttctgaccttagaccatgatgatttgtctcaacgagcgaaggctgctcggattctggttgtccttatatgcaaacatgaatttgatgcacgctatcaaaaaagtgaagacaagctgtacattgctcagctgtacttctctcttatagggcagatccttgatgagatgcctgttttctataatctgaatgccatcgaaaagcgtgaagtgctagttgtcattttgcaaattgtaaggaacttggatgatgcaactcttatcaaagcatggcaacaaagcattgctagaaccagattgttcttcaagcttcttgaagaatgtataacccattttgagcacaacaaaacaggaggcagcatgctacttggtgctagttctcggagcccagatgttgagcgccctgcacccccaaagtactctgagcgattatccccatcagtcaatgcatatttgtcggaggcttcaaggcatgaaataaggcctcagggaacaccagaaaatgggtacatgtggaacagggttagccctcaattaagttcccctaatcaaccctattcattgagggaagcacttgctcaagcacaatcttcaagaattgggtcaaccgccagggcattgagagagtctctgcatccagtactgagacaaaaattggaactttgggaagaaaatctcagtactgctgtgagcctcgaagtgttgagaataaccgagaagttttcagctgctgcaggcactagaagcatcactactgattatgcgaagctagattgtgtaacatctatcgtaatgggtcttttatctaggagccaacccttggcattttggaaggctttccttcctgtggtctacaacatatttaatcttcatggtgcaacactaatggcaagggagaatgaccgcttcttgaagcaaattgcttttcatcttttgcggcttgctgtttttcgaaatgattctattaggaaaagagctgttgttgggttgcagattctcgttaggaacgcattcaactatttcaagaacactacaaggttgagagtcatgttgacaattactttgtcagagttgttgtctgatgtgcaagtgactcaaatgaaatccgatggttctcttgaagaaagtggtgaagctcggcgccttagaaaatcactggaggaaatggctgatgtaagaagcaaggatctgttgaaagattgtggcctccctgttactgcattggaggcggcccctgatggttcctctgataatatgtggtcttgggcagaggtgaaacatctctctaaatgtctagtccaggcccttgatgctggtctggaacacgccctcttggattctgtagtgactgtagacagcatttgtgtgatgcacaccaggagatgcaatcatgggctgaagcagcacaatgtgcagttgctgcagctggcgtgatcatgcaggcacttgttggaaggaatgatgctgtgtggagcaaggagcatgttacttcgctacacaagatttgccctatcgtcaacactgatgtgagtgcagaagcatctgcagctgaagttgagggatatggtgcatccaaattaacagtggactcagcggttaaatatcttcaacttgccaataaactcttcacacaagctgaactttatcatttttgtgcaagcattcaggaactcataattcctgtgtataaaagcagaagggcttatggacagctggccaaatgtcatacatcactcacaaacatctatgagtcaattcttgaacaggaggcaagtcctataccattcattgatgccacatactaccgagttggtttctatggtgagcgtttcggcaagctcaataaaaaggagtatgtatttagagaaccacgagatgtacgtcttggtgatattatggagaagcttagtcatatatatgaggttaaaatggatgggagtcacactttacatataattccagattctagacaagtcaatgctgatgagttgcagcctggcgtctgctatttacagatcactgctgttgatcctgtaatggaggatgaggacttgggtagcaggagggaaaggattttttctttatctactggtactgtacgtgcacgtgtttttgaccgttttcttttcgatacaccattcacaaaaaatggaaaaacacaaggtggtctagaagaccagtggaagaggcgtactgtgctccagacagagggttcctttcctgctttggtgaaccgtctgccagtcaccaaatctgaatctctggagttctctcctgtcgagaatgcgattggaatgatcgaaacaagaacagctgcattgagaaatgaactagaagaaccacggagttctgaaggtgatcaactcccaaggcttcaaagcttgcaaaggatactccaaggaagtgtggctgtgcaggtcaacagtggggtattaagtgtgtgcactgcattcttatctggcgagccagcaactaggctcagatcccaagaactgcagcagctcatcgccgcattgcttgaattcatggctgtctgcaagcgtgcaatccgtgtgcatttcagattgataggggaagaagaccaggaattccacacccaacttgtcaatgggttccagtcactcaccgctgagctatctcattatatccctgctatactctccgagctatgatagaactgtaacaagccagaaattaggtagcatgtgaatgattcattctttcagttgcaggttcccaccaaatgtccatatttccattagttttggttgtatagttgcaccgattcctgattttggagtgtaaagtttgtataacctagtgttatctgttatgcaccagttatatgctgagtgccatgttttttgcggtttgctactgtatcacagcgagccgacattttacaacagttatatgtaatgttctgtagtgatacaatagtgcctattctgggtgatatgtatttttttccctgtaggaaatttgctgctgtcgagggcatcctcgcaatttgtttatgcacgatttgaagccttgtgttattgaagtcgttcccataactgtagtttgtttattgttcctagtgtataatgac

SEQ ID NO: 84032 - DNA, 6526 bp, Zea Mays
gtgtacatgttccttatatagagatgtgagacccctcaggggcaaagccggtatttgcccatataaccctaactagggttacttaacactttgtattttacgcctcgtttccccctccttccattaaaaaaaaaacacacccagacaccctccccccaactccacccgcttccttcgcttcccttcacccccactccaccaaaccctcacgtcgctgggactgggcagcgcagagcagagtagcagacagagcacagcggagcagaaggtggcgagtggaagcaaatggggaatgagtggcggcaaatgggcaatgagtggcggcggcggtagtagctagcatagcatcctcctcgccttttcttctccccgccctctcgcgctctggttgttgcagccagtgggagcgagaggactcgtgctgcctccgtcgcttctccggcacgcctccctcgcccggatctgcgccgctcgcgtgggatcctgagctccgggttggagagctctcgcgttccgggtcaggtgacggtgatggagcccgcggtggctacggcgggtgaagggcagcggttcaagcggatttcgcggcaggcgtggtcggggaacctggaactggatcctttgctccaaaatcaagcaacgattcttgatttaagagtttcagcttaatgaaagcttagatcagtggccacatctaaatgatctggtacagtgctacaaggctgattttgtgaaggatgactgcaaatatggacgctatgagagtgttgcaccaccatctttccaaaatcaaattttcgagggacctgatacagacatagaaacagaattgcagctttgcaacgcaagacatttcaagcctgaagatcctaccgaagatgatatgccaagcacctcagggaggcaaatgtatgaaaccgaatcatctgcttcatcttcaaaagtgcactgtagtctgtcaccactgccagcatatgagcctgcatttgattgggagaatgagaggtctttgatatttggccaaagggtgccagaaagtataccagcaataagcaacagtggcttgaagataactgtcaaggtactatctttgtcattccaagctggattagttgaacctttcagtggaacgatttgcttgtataacagagatagaagagaaaaactgtcagaagacttctactttcacatacttccaacagatatgcaggatgtaagctctcaatgctcagggttctttggatcgtcgaggcgttttttcattggacacaccttcaccatcagtctgccttttgattcaattggaaaaggctgctactgaagaagggggagtaacaccttctgtttattctcgtaaagagcctgtgcacttagctgagaaagagaagcaaaagctgcaagtatggtctcgaattatgccttgtaaagagtcatttgcatgggccatgattcctctgtttgaaggtaaccatgcgggtggtcttagtgatgctgcttctcctagcagtcctttagcaacaagtttaccaggatcaacttctcaagatagtattgtggaccctattttaaagcttactttagatggaaaagtaaaccattactcgagtggaagctcagttattgtagagatatcaaacctaaacaaagtgaaggaaagctatatagtggactccctccaagatccaaaacggaaagtacataaaccagtgaaaggtgtattgagattagaagtggaaaaacttcatggtggccacaatgatgtggataacacttctgaaggcggaagcatggccaatgatttgaatgatgctggtgacatcaataatggcagaagcaacagaagtagctttgatgggattcacagttttgtgaattctattgccattgcccagaaagatgctcatcacaatggaatcatttctaatgctgagaatggtgacaattttgaagcttttgactttcggatgctgacccgaagtgagccgttttcacaactttttcattgcctctatgtgtacccattgactgttagcttgagccgcaaaagaaacctgtttgttagagtggaactgagaaaggacgattctgacatccgaaagcctccattagaggctgttcatcctagggagcggaatatgatgctacagaagtggggccatacacagattgctgttggaacaagaatggcttcctaccatgatgaagttaaaatcagcctacctgctcttttgacaccccagcatcatcttgtgttcacatttttccatgtagatcttcaaatgaaacttgaagcaccaaaaccagtgatcgttgggcattctgtacttccactgtcgacacatattcagttactttcagatgtatccttgccaattttgagagagctcgttccacattacctgcagggaagtggaaaggagagaatggactatctggaagatggaaaaactgttttcaagttgcgtttaaggctctgttcttcattgttcccggttaatgaaaggataagagacttttttgttgaatatgaccgccatactctacatacaagtcccccatggggttctgagcttcttgaggccataaatagtttgaaaaacgttgaatctactgcattattacaatttctgcaaccaatacttaacatgctgcttcatcttattggcgatggcggtgagacccttcaggttgctgcgtttcgagccatggttaacattttaacccgtgtgcagcaggagtcatcagatggggctgagagaaatagattccttattaattatgttgattttgcttttgatgacttcggcggtcggcaagcacctgtgtatcctggtctgtctactgtttggggaagtcttgctaggagtaaggcgaaaggttatagagttggtcctgtgtatgatgatgtgttggcaatggcttggttttttctggagcttattgtaaaatcaatgggattggaacaaagtcgtctcttctaccacaaccttccattaggtgaagatgtcccaccgctacaattgaaagaaggtgtcttcaggtgcatcatgcagctctttgattgccttctaactgaggttcatgaacgctgtaaaaagggtttaagcttggcaaaacgcttgaacagcacgcttgctttcttttgctatgatcttttatcaataattgagcctcgccaagtttttgagctggtttcgttgtacatggacaagtttgcaggagtttgtcaagcagtccttcatgactgcaaattgacattcctgcagataatatgcgaccatgatctattcgttgagatgcctgggcgggatccctctgatagaaactatctctcgtcagttcttattcaagagatctttctgaccttagaccatgatgatttgtctcaacgagcgaaggctgctcggattctggttgtccttatatgcaaacatgaatttgatgcacgctatcaaaaaagtgaagacaagctgtacattgctcagctgtacttctctcttatagggcagatccttgatgagatgcctgttttctataatctgaatgccatcgaaaagcgtgaagtgctagttgtcattttgcaaattgtaaggaacttggatgatgcaactcttatcaaagcatggcaacaaagcattgctagaaccagattgttcttcaagcttcttgaagaatgtataacccattttgagcacaacaaaacaggaggcagcatgctacttggtgctagttctcggagcccagatgttgagcgccctgcacccccaaagtactctgagcgattatccccatcagtcaatgcatatttgtcggaggcttcaaggcatgaaataaggcctcagggaacaccagaaaatgggtacatgtggaacagggttagccctcaattaagttcccctaatcaaccctattcattgagggaagcacttgctcaagcacaatcttcaagaattgggtcaaccgccagggcattgagagagtctctgcatccagtactgagacaaaaattggaactttgggaagaaaatctcagtactgctgtgagcctcgaagtgttgagaataaccgagaagttttcagctgctgcaggcactagaagcatcactactgattatgcgaagctagattgtgtaacatctatcgtaatgggtcttttatctaggagccaacccttggcattttggaaggctttccttcctgtggtctacaacatatttaatcttcatggtgcaacactaatggcaagggagaatgaccgcttcttgaagcaaattgcttttcatcttttgcggcttgctgtttttcgaaatgattctattaggaaaagagctgttgttgggttgcagattctcgttaggaacgcattcaactatttcaagaacactacaaggttgagagtcatgttgacaattactttgtcagagttgttgtctgatgtgcaagtgactcaaatgaaatccgatggttctcttgaagaaagtggtgaagctcggcgccttagaaaatcactggaggaaatggctgatgtaagaagcaaggatctgttgaaagattgtggcctccctgttactgcattggaggcggcccctgatggttcctctgataatatgtggtcttgggcagaggtgaaacatctctctaaatgtctagtccaggcccttgatgctggtctggaacacgccctcttggattctgtagtgactgtagacaggtatgcagctgctgagggtttctataaactagctatggcctatgcgcccgttccagatcttcacattatgtggttgcagcatttgtgtgatgcacaccaggagatgcaatcatgggctgaagcagcacaatgtgcagttgctgcagctggcgtgatcatgcaggcacttgttggaaggaatgatgctgtgtggagcaaggagcatgttacttcgctacacaagatttgccctatcgtcaacactgatgtgagtgcagaagcatctgcagctgaagttgagggatatggtgcatccaaattaacagtggactcagcggttaaatatcttcaacttgccaataaactcttcacacaagctgaactttatcatttttgtgcaagcattcaggaactcataattcctgtgtataaaagcagaagggcttatggacagctggccaaatgtcatacatcactcacaaacatctatgagtcaattcttgaacaggaggcaagtcctataccattcattgatgccacatactaccgagttggtttctatggtgagcgtttcggcaagctcaataaaaaggagtatgtatttagagaaccacgagatgtacgtcttggtgatattatggagaagcttagtcatatatatgaggttaaaatggatgggagtcacactttacatataattccagattctagacaagtcaatgctgatgagttgcagcctggcgtctgctatttacagatcactgctgttgatcctgtaatggaggatgaggacttgggtagcaggagggaaaggattttttctttatctactggtactgtacgtgcacgtgtttttgaccgttttcttttcgatacaccattcacaaaaaatggaaaaacacaaggtggtctagaagaccagtggaagaggcgtactgtgctccagacagagggttcctttcctgctttggtgaaccgtctgccagtcaccaaatctgaatctctggagttctctcctgtcgagaatgcgattggaatgatcgaaacaagaacagctgcattgagaaatgaactagaagaaccacggagttctgaaggtgatcaactcccaaggcttcaaagcttgcaaaggatactccaaggaagtgtggctgtgcaggtcaacagtggggtattaagtgtgtgcactgcattcttatctggcgagccagcaactaggctcagatcccaagaactgcagcagctcatcgccgcattgcttgaattcatggctgtctgcaagcgtgcaatccgtgtgcatttcagattgataggggaagaagaccaggaattccacacccaacttgtcaatgggttccagtcactcaccgctgagctatctcattatatccctgctatactctccgagctatgatagaactgtaacaagccagaaattaggtagcatgtgaatgattcattctttcagttgcaggttcccaccaaatgtccatatttccattagttttggttgtatagttgcaccgattcctgattttggagtgtaaagtttgtataacctagtgttatctgttatgcaccagttatatgctgagtgccatgttttttgcggtttgctactgtatcacagcgagccgacattttacaacagttatatgtaatgttctgtagtgatacaatagtgcctattctgggtgatatgtatttttttccctgtaggaaatttgctgctgtcgagggcatcctcgcaatttgtttatgcacgatttgaagccttgtgttattgaagtcgttcccataactgtagtttgtttattgttcctagtgtataatgac

SEQ ID NO: 84033 - DNA, 6537 bp, Zea Mays
cacacgggacactagatatagggttgggcctctggcctctttctaatctctgtaatatgatggggtgtacatgttccttatatagagatgtgagacccctcaggggcaaagccggtatttgcccatataaccctaactagggttacttaacactttgtattttacgcctcgtttccccctccttccattaaaaaaaaaacacacccagacaccctccccccaactccacccgcttccttcgcttcccttcacccccactccaccaaaccctcacgtcgctgggactgggcagcgcagagcagagtagcagacagagcacagcggagcagaaggtggcgagtggaagcaaatggggaatgagtggcggcaaatgggcaatgagtggcggcggcggtagtagctagcatagcatcctcctcgccttttcttctccccgccctctcgcgctctggttgttgcagccagtgggagcgagaggactcgtgctgcctccgtcgcttctccggcacgcctccctcgcccggatctgcgccgctcgcgtgggatcctgagctccgggttggagagctctcgcgttccgggtcaggtgacggtgatggagcccgcggtggctacggcgggtgaagggcagcggttcaagcggatttcgcggcaggcgtggtcggggaacctggaactggatcctttgcttaatgaaagcttagatcagtggccacatctaaatgatctggtacagtgctacaaggctgattttgtgaaggatgactgcaaatatggacgctatgagagtgttgcaccaccatctttccaaaatcaaattttcgagggacctgatacagacatagaaacagaattgcagctttgcaacgcaagacatttcaagcctgaagatcctaccgaagatgatatgccaagcacctcagggaggcaaatgtatgaaaccgaatcatctgcttcatcttcaaaagtgcactgtagtctgtcaccactgccagcatatgagcctgcatttgattgggagaatgagaggtctttgatatttggccaaagggtgccagaaagtataccagcaataagcaacagtggcttgaagataactgtcaaggtactatctttgtcattccaagctggattagttgaacctttcagtggaacgatttgcttgtataacagagatagaagagaaaaactgtcagaagacttctactttcacatacttccaacagatatgcaggatgctcagggttctttggatcgtcgaggcgttttttcattggacacaccttcaccatcagtctgccttttgattcaattggaaaaggctgctactgaagaagggggagtaacaccttctgtttattctcgtaaagagcctgtgcacttagctgagaaagagaagcaaaagctgcaagtatggtctcgaattatgccttgtaaagagtcatttgcatgggccatgattcctctgtttgaaggtaaccatgcgggtggtcttagtgatgctgcttctcctagcagtcctttagcaacaagtttaccaggatcaacttctcaagatagtattgtggaccctattttaaagcttactttagatggaaaagtaaaccattactcgagtggaagctcagttattgtagagatatcaaacctaaacaaagtgaaggaaagctatatagtggactccctccaagatccaaaacggaaagtacataaaccagtgaaaggtgtattgagattagaagtggaaaaacttcatggtggccacaatgatgtggataacacttctgaaggcggaagcatggccaatgatttgaatgatgctggtgacatcaataatggcagaagcaacagaagtagctttgatgggattcacagttttgtgaattctattgccattgcccagaaagatgctcatcacaatggaatcatttctaatgctgagaatggtgacaattttgaagcttttgactttcggatgctgacccgaagtgagccgttttcacaactttttcattgcctctatgtgtacccattgactgttagcttgagccgcaaaagaaacctgtttgttagagtggaactgagaaaggacgattctgacatccgaaagcctccattagaggctgttcatcctagggagcggaatatgatgctacagaagtggggccatacacagattgctgttggaacaagaatggcttcctaccatgatgaagttaaaatcagcctacctgctcttttgacaccccagcatcatcttgtgttcacatttttccatgtagatcttcaaatgaaacttgaagcaccaaaaccagtgatcgttgggcattctgtacttccactgtcgacacatattcagttactttcagatgtatccttgccaattttgagagagctcgttccacattacctgcagggaagtggaaaggagagaatggactatctggaagatggaaaaactgttttcaagttgcgtttaaggctctgttcttcattgttcccggttaatgaaaggataagagacttttttgttgaatatgaccgccatactctacatacaagtcccccatggggttctgagcttcttgaggccataaatagtttgaaaaacgttgaatctactgcattattacaatttctgcaaccaatacttaacatgctgcttcatcttattggcgatggcggtgagacccttcaggttgctgcgtttcgagccatggttaacattttaacccgtgtgcagcaggagtcatcagatggggctgagagaaatagattccttattaattatgttgattttgcttttgatgacttcggcggtcggcaagcacctgtgtatcctggtctgtctactgtttggggaagtcttgctaggagtaaggcgaaaggttatagagttggtcctgtgtatgatgatgtgttggcaatggcttggttttttctggagcttattgtaaaatcaatgggattggaacaaagtcgtctcttctaccacaaccttccattaggtgaagatgtcccaccgctacaattgaaagaaggtgtcttcaggtgcatcatgcagctctttgattgccttctaactgaggttcatgaacgctgtaaaaagggtttaagcttggcaaaacgcttgaacagcacgcttgctttcttttgctatgatcttttatcaataattgagcctcgccaagtttttgagctggtttcgttgtacatggacaagtttgcaggagtttgtcaagcagtccttcatgactgcaaattgacattcctgcagataatatgcgaccatgatctattcgttgagatgcctgggcgggatccctctgatagaaactatctctcgtcagttcttattcaagagatctttctgaccttagaccatgatgatttgtctcaacgagcgaaggctgctcggattctggttgtccttatatgcaaacatgaatttgatgcacgctatcaaaaaagtgaagacaagctgtacattgctcagctgtacttctctcttatagggcagatccttgatgagatgcctgttttctataatctgaatgccatcgaaaagcgtgaagtgctagttgtcattttgcaaattgtaaggaacttggatgatgcaactcttatcaaagcatggcaacaaagcattgctagaaccagattgttcttcaagcttcttgaagaatgtataacccattttgagcacaacaaaacaggaggcagcatgctacttggtgctagttctcggagcccagatgttgagcgccctgcacccccaaagtactctgagcgattatccccatcagtcaatgcatatttgtcggaggcttcaaggcatgaaataaggcctcagggaacaccagaaaatgggtacatgtggaacagggttagccctcaattaagttcccctaatcaaccctattcattgagggaagcacttgctcaagcacaatcttcaagaattgggtcaaccgccagggcattgagagagtctctgcatccagtactgagacaaaaattggaactttgggaagaaaatctcagtactgctgtgagcctcgaagtgttgagaataaccgagaagttttcagctgctgcaggcactagaagcatcactactgattatgcgaagctagattgtgtaacatctatcgtaatgggtcttttatctaggagccaacccttggcattttggaaggctttccttcctgtggtctacaacatatttaatcttcatggtgcaacactaatggcaagggagaatgaccgcttcttgaagcaaattgcttttcatcttttgcggcttgctgtttttcgaaatgattctattaggaaaagagctgttgttgggttgcagattctcgttaggaacgcattcaactatttcaagaacactacaaggttgagagtcatgttgacaattactttgtcagagttgttgtctgatgtgcaagtgactcaaatgaaatccgatggttctcttgaagaaagtggtgaagctcggcgccttagaaaatcactggaggaaatggctgatgtaagaagcaaggatctgttgaaagattgtggcctccctgttactgcattggaggcggcccctgatggttcctctgataatatgtggtcttgggcagaggtgaaacatctctctaaatgtctagtccaggcccttgatgctggtctggaacacgccctcttggattctgtagtgactgtagacaggtatgcagctgctgagggtttctataaactagctatggcctatgcgcccgttccagatcttcacattatgtggttgcagcatttgtgtgatgcacaccaggagatgcaatcatgggctgaagcagcacaatgtgcagttgctgcagctggcgtgatcatgcaggcacttgttggaaggaatgatgctgtgtggagcaaggagcatgttacttcgctacacaagatttgccctatcgtcaacactgatgtgagtgcagaagcatctgcagctgaagttgagggatatggtgcatccaaattaacagtggactcagcggttaaatatcttcaacttgccaataaactcttcacacaagctgaactttatcatttttgtgcaagcattcaggaactcataattcctgtgtataaaagcagaagggcttatggacagctggccaaatgtcatacatcactcacaaacatctatgagtcaattcttgaacaggaggcaagtcctataccattcattgatgccacatactaccgagttggtttctatggtgagcgtttcggcaagctcaataaaaaggagtatgtatttagagaaccacgagatgtacgtcttggtgatattatggagaagcttagtcatatatatgaggttaaaatggatgggagtcacactttacatataattccagattctagacaagtcaatgctgatgagttgcagcctggcgtctgctatttacagatcactgctgttgatcctgtaatggaggatgaggacttgggtagcaggagggaaaggattttttctttatctactggtactgtacgtgcacgtgtttttgaccgttttcttttcgatacaccattcacaaaaaatggaaaaacacaaggtggtctagaagaccagtggaagaggcgtactgtgctccagacagagggttcctttcctgctttggtgaaccgtctgccagtcaccaaatctgaatctctggagttctctcctgtcgagaatgcgattggaatgatcgaaacaagaacagctgcattgagaaatgaactagaagaaccacggagttctgaaggtgatcaactcccaaggcttcaaagcttgcaaaggatactccaaggaagtgtggctgtgcaggtcaacagtggggtattaagtgtgtgcactgcattcttatctggcgagccagcaactaggctcagatcccaagaactgcagcagctcatcgccgcattgcttgaattcatggctgtctgcaagcgtgcaatccgtgtgcatttcagattgataggggaagaagaccaggaattccacacccaacttgtcaatgggttccagtcactcaccgctgagctatctcattatatccctgctatactctccgagctatgatagaactgtaacaagccagaaattaggtagcatgtgaatgattcattctttcagttgcaggttcccaccaaatgtccatatttccattagttttggttgtatagttgcaccgattcctgattttggagtgtaaagtttgtataacctagtgttatctgttatgcaccagttatatgctgagtgccatgttttttgcggtttgctactgtatcacagcgagccgacattttacaacagttatatgtaatgttctgtagtgatacaatagtgcctattctgggtgatatgtatttttttccctgtaggaaatttgctgctgtcgagggcatcctcgcaatttgtttatgcacgatttgaagccttgtgttattgaagtcgttcccataactgtagtttgtttattgttcctagtgtataatgac

SEQ ID NO: 84034 - DNA, 460 bp, Zea Mays
caaacgccgttacctaggtgcttcgtcctcccctccaccccgtcaagagctctcccaagtcccaagcgccggcacacaccgccacctcgccgcgctctacagggttgccgtgcctccgccccggtatggtcgaccgcgccgcggcgagcaactcaactagaaaatactttgccacagcggtgatgaatttccacccagtggtttctggctgtcaatatgcacgacctccttgcgcacatcgccagctttgattaccggcccgggatgatagatgagctcgacgcgcagatggggttcgtcgtgggcggaaccattctcatgctactcactgtcgtcttctatgaaattcagtttggatttagttaccaacatgagatatcttggaaattgagcttttatttgtgccacttcacttgcagtactgctcaaacatgtttaactttcaattcttttcattatt

SEQ ID NO: 84035 - DNA, 795 bp, Zea Mays
aacacacagcccacttcgcagccgctcgcagcctgtaccgtcgcggcagtgcgcggctccgcgggtctcctactctcctccggtcctctcctccccactccccagtccggcagtccccatccctcgcctcgtcccccgcatcctaccgcgtgaccatgcacgacaccaggagctcggtagatcacatagccggcgccccgtcggccgcttccaatctctctgtagagcgaagcctaccgtaacggtggatatgcagatcctcctacgatgcatgaatctttaggatcggcagagttggctccggtctgtctcgcttgcgatggtggtgtcgaacggtggcctcctgcgtttgcatgaggagaagctccactcatggcgtttatcagcccatccaggtactcatgaacgggtacaagggccgatgattggagcaagaatatatcgattacaacatgagatgaatcttctccttaatgattgtaagcatgtctttactacgaatcatctactacctaatggggatgtactacttgttctcaggtttgaactttgaagcataagctaatcgaaaggagtaatctggagatgacgtgctgacgtgcagattctgactaccaagttaatgatgaaaactgtactgctctcaaaggttcccacaacagtaaaactaaaaaaattcgaagccttaaagcttatgtccgacaacaaatgttcatcggttctaaaatgtcagatataagagtatttctgacagccaccgtcgaacataaattattttcgatggcctctaagagc

SEQ ID NO: 84036 - DNA, 946 bp, Zea Mays
gaccaccatcagcgtacttcactctgtcttttcacaacaagttcattcaatatacttagggtggtttcatccggcaagaactgtattaccttctgaaagacgagaaagatgtgcatttctcatttggaagcgtagccggtaatgggatcgagcaagcaacacaagggatgcggtcatccaagttctgcctcaacattgcagcgatgagattgagctcccgtttgaggatgtcctcgactactcgaagttcagtgtcatagtacgtggcgcagacgcagtcaagaaggggtttctaatgaacctgatcaaagggatcagccgagaagagtggacacgcatgtggaacaggctaaaggaagtggaaaagcactttgagtaccaatacccatctcagaccgatgatgccgtgcagatgatatggaaggccattgctcggaaggtgccgtctatccggctgaagattaacagactgcaaagattttctctgtttgagactaacaggacagatgagactctacccccatcttcttcttggctacagaatcaggctccttgattttggactagcaagctcaggctttcgccatgttttcaatctcgtagaatcaagagttgatactgaagaccaaatcttaatcgcttgactgggggcagatgttagtatgttacagctgcagacattagcggatagtaaagttgaaacactttagcatagcagaattacatatccagtggcacatcattttcttcatttttttttcttttgcttgcgattcatccaaagtgtcctcggctgcagactaaggacaatgaattttgtatgtgaagctgtatattctaggcggcaatatagttactgatcagttacagttgctgagcacttccgattcatgtccactaagtctaaagtcacgtagggaagggaggttctgcagctggagaaaag

SEQ ID NO: 84037 - DNA, 1305 bp, Zea Mays
gccaaaccgagctaactaagaatcgaagtagctgacaagcatttcgtcccgctttgacagtgtctttgaagcctgaactttttgaaggattgaggtttgacttcacaaaagggttgaatcaaaagttttctcttagccacagcgtttttatgggctccttagaagttccagcccaggggtctgaaactattaaagttccaactgctcattatgaatttggtgccaattttttagatccaaagttaatgctcattggaagggtgatgacagatggaaggcttaatgctcgcgtgaaatgtgatttgacagacaatctgatgctgaaagtaaatgcacagcttacccaagaggcacattactcacaaggaatgtttaactttgactacaaggttgacgtttctgacaaggaagtgactatcgagcacaattccaaatagggaacaatgcattctatggtgcaaattatattcagagtgttactccgaacctatcaatgggaactgaaatgttctggcttggtcaccaaaggaagtctggaattggttttgcctgtcgctataacacggacaaaatggtgggcactctacaggtcgcaagcactggaatagttgccttaagttatgtccagaagatttctgagaaggtttcccttgcgtctgatttcatgtataaccatatgtcaagagacgtaacttccagctttggttacgattacttgcttaggcagtgccgtctaagaggcaaaattgactcgaatggtgttgttgcggcatatctggaggagaggttgaacatgggtgtcaactttcttctatctgctgagattgaccattgtaagaagaactacaagtttggtttcggaatgaccgtaggagagtaattctgctaaaacaattgctgagaagagcacatgaggactttcgcagtctgctttgcattgtatgttaagatacttcaggtctcagttttgattgatcaggttctgccccgtcgaaaaaaatactagctgttgctgctttacagggttttgtctcagtgtattggtggttgtttattttcagctacttgagcatgggggccatgattctttgttcatcttggatgtaactagctgattggtgttccaatgatgttgtatttgcagaacgattttttccttttaaatcaccaacaaccaccacactaggctttttctgtaccatcatggacgggccacaagattttacagttcaaagctttggcacttgccatatttgatgtcgtcttgtgcttttgctcatccatgcgatgtgccacctcaacatt

SEQ ID NO: 84038 - DNA, 1898 bp, Zea Mays
gccaaaccgagctaactaagaatcgaagtagctgacaagcatttcgtcccgctttgacaggtatgtcctaattcctaaacaaacgaacgcattctcctcccaaaccaccagacatattgcagtctgccgtagaagtgaaagggtttggtgaaaaattccggccgcctcagcgtcgcgaggtgggggacgagacgaagccagagcgccccaaacccaaaccccagaaccccgacatagggttacgccatcgccatgggatctgttgcctccgcagcagcgccaccttctcctcactcagcgctaccccaggagggcgcgccgccctatggccccgggctcgccgggatcctcccgcagacgtcagtgggagaggagaagaaggaggagaaggtggactacctcaacctcctctgccccgtgcccttcgaggagatccagcgcgaggctctcatgtctttgaagcctgaactttttgaaggattgaggtttgacttcacaaaagggttgaatcaaaagttttctcttagccacaggtaagatcattacataagggcagacccagggccagaggctcccacatgagtgtggcctggggaagggataaactgaaccaagtatccccccgcaattgcggagaggctgcttcgaacccgtgacctggtgattcagtgagacagctctcaccactgcaccaggcctgcccactaagatcattacataaatgttagcaaatatcttatgttatattttcccgagtatatcctaacaacatcttccacagcgtttttatgggctccttagaagttccagcccaggggtctgaaactattaaagttccaactgctcattatgaatttggtgccaattttttagatccaaagttaatgctcattggaagggtgatgacagatggaaggcttaatgctcgcgtgaaatgtgatttgacagacaatctgatgctgaaagtaaatgcacaggtagatggatcaaagagtttaggttcagtggttcatcctttccttcgttgatactttgctttccttattctactgatggttgttctcttcccagcttacccaagaggcacattactcacaaggaatgtttaactttgactacaagggaagtgactatcgagcacaattccaaatagggaacaatgcattctatggtgcaaattatattcagagtgttactccgaacctatcaatgggaactgaaatgttctggcttggtcaccaaaggaagtctggaattggttttgcctgtcgctataacacggacaaaatggtgggcactctacaggtcgcaagcactggaatagttgccttaagttatgtccagaagatttctgagaaggtttcccttgcgtctgatttcatgtataaccatatgtcaagagacgtaacttccagctttggttacgattacttgcttaggcagtgccgtctaagaggcaaaattgactcgaatggtgttgttgcggcatatctggaggagaggttgaacatgggtgtcaactttcttctatctgctgagattgaccattgtaagaagaactacaagtttggtttcggaatgaccgtaggagagtaattctgctaaaacaattgctgagaagagcacatgaggactttcgcagtctgctttgcattaacgattttttccttttaaatcaccaacaaccaccacactaggctttttctgtaccatcatggacgggccacaagattttacagttcaaagctttggcacttgccatatttgatgtcgtcttgtgcttttgctcatccatgtaagtcagaaatctcagttcatatcagtgcttttgctcatccatgtaagtcagaaatctctgttcatatcagtttttttattaaaaaaagtttccgctgcat

SEQ ID NO: 84039 - DNA, 1679 bp, Zea Mays
gccaaaccgagctaactaagaatcgaagtagctgacaagcatttcgtcccgctttgacaggtatgtcctaattcctaaacaaacgaacgcattctcctcccaaaccaccagacatattgcagtctgccgtagaagtgaaagggtttggtgaaaaattccggccgcctcagcgtcgcgaggtgggggacgagacgaagccagagcgccccaaacccaaaccccagaaccccgacatagggttacgccatcgccatgggatctgttgcctccgcagcagcgccaccttctcctcactcagcgctaccccaggagggcgcgccgccctatggccccgggctcgccgggatcctcccgcagacgtcagtgggagaggagaagaaggaggagaaggtggactacctcaacctcctctgccccgtgcccttcgaggagatccagcgcgaggctctcatgtctttgaagcctgaactttttgaaggattgaggtttgacttcacaaaagggttgaatcaaaagttttctcttagccacagcgtttttatgggctccttagaagttccagcccaggggtctgaaactattaaagttccaactgctcattatgaatttggtgccaattttttagatccaaagttaatgctcattggaagggtgatgacagatggaaggcttaatgctcgcgtgaaatgtgatttgacagacaatctgatgctgaaagtaaatgcacagcttacccaagaggcacattactcacaaggaatgtttaactttgactacaagggaagtgactatcgagcacaattccaaatagggaacaatgcattctatggtgcaaattatattcagagtgttactccgaacctatcaatgggaactgaaatgttctggcttggtcaccaaaggaagtctggaattggttttgcctgtcgctataacacggacaaaatggtgggcactctacaggtcgcaagcactggaatagttgccttaagttatgtccagaagatttctgagaaggtttcccttgcgtctgatttcatgtataaccatatgtcaagagacgtaacttccagctttggttacgattacttgcttaggcagtgccgtctaagaggcaaaattgactcgaatggtgttgttgcggcatatctggaggagaggttgaacatgggtgtcaactttcttctatctgctgagattgaccattgtaagaagaactacaagtttggtttcggaatgaccgtaggagagtaattctgctaaaacaattgctgagaagagcacatgaggactttcgcagtctgctttgcattgtatgttaagatacttcaggtctcagttttgattgatcagctacttgagcatgggggccatgattctttgttcatcttggatgtaactagctgattggtgttccaatgatgttgtatttgcagaacgattttttccttttaaatcaccaacaaccaccacactaggctttttctgtaccatcatggacgggccacaagattttacagttcaaagctttggcacttgccatatttgatgtcgtcttgtgcttttgctcatccatgtaagtcagaaatctcagttcatatcagtgcttttgctcatccatgtaagtcagaaatctctgttcatatcagtttttttattaaaaaaagtttccgctgcat

SEQ ID NO: 84040 - DNA, 1416 bp, Zea Mays
ctcgctttaaaaggttgtatccaaataatatttttcgagaccatgatatactatatggtaatgtaacagccataaagtatatggtaatgtaacaattataaagtacagtaacgtaaaatacattagacaaacatcgttggctgaccaacaaactgatgatcgtaacacaatcgtagtatgatgggtagtaagtagtaacgaacggcaggtgtattggatagagtaccactaccagagtacagaaggagcgaaaacatacagcccaaaacaagggcccggaaatgaagttaaacacaacgggaggctactagtttaacaagtttatttattatcgctcatcgaccatgcacggacgccacagtagggggcggcacgtaggggcgggcgcgcgccacggcatcacatgatcacatcttcccctggcgatgcacgcaggacgagccggcgcaaccctccacgcacttctcgacgcactggtccacccgctccgccgcacgctgctgcatcagccggtccttctcctcgaagtacaccgacgccgccttctccgccgcgcgttccttcgccgcgcgctcgtcctcgccgcccagccggacgtcgacgtgctgaccttggcccagcgtcagcttctccttgatcgcgcccgtcaccggcggtctgtgctgtggctcgggacctgtccctggcctcctgcgcggcctccctgctggcgtcggtgtactcgcccgccttctgcctggtcacgtctctcgcctccctcgccttgtcggcggtggcgtccctcgtctcctgggccttctgcatggtcgcgtccttggcctccctcgccttgccggcggtggtgtccgcggcctcccgcgccttgccggccgccgcgtccttgtactccccgagcttgttcttggtcgcctccgcggtctcgctcgtcttctgcgccaccgcgtccttggtctccctcgccttctccacggcgctgtccttgtactcgcccagcttgttccgggtggcctccgccgtctcgcccgtcttacgcgagacgctgtcgttggcctcccgggccttgtcggcggtgtagtccctgtactcgccgagcttgtcgcccgcggtgtgcgccgtctgcgaggtcttgtccacggtcgcgtccttggcgccaccgaaggtgcggcccacggcgctggccaaggacctggcgccctcctgcacgctctccaggatgccgccgccaccggcggcaccgcggtcggcgcgggagcgcgcgatctcgtccgcggccgagcgggcgttcacctccgccttctcgaggtgctcgtcccgcgcccgagccagctcctccacggcgcgccgcgcgtcggcctcggcgcgcgcctcacgcgtgttctgcctcgatgccatagcggtcggtcagtgactctgtag

SEQ ID NO: 84041 - DNA, 1165 bp, Zea Mays
gaggaaactttggggctgctgctcgtgtagtgtgcctagtaaacgatgattttctgtaactaggtgttccaagattaaaggaacagtatttatgactacctcaaatggtgcatatatcgacatccaatccaagtctactgcttttttgcccttagatgaggcatgtcttcttgatatcgataatgttgaagaggctggcattcgtcctgggttagtagaagaattcatgataattgatgagaacccaggtgatgaaactttgattctaagtttgcaagcaattcagcaagaacttgcatgggaaaggtgccggcaacttcaggccgaagatgtcgttgtcacgggtaaagtaattggtggaaacaaaggaggtgtagtagctcttgtggatgggcttaagggtttcgttccattttcgcaagtgtcatcgaaaacaaccgccgaagagctgcttgagaaagaattgcctctgaagtttgtagaggtcgatgaggaacaaggcaggcttgtcctcagtaatcgcaaggcaatggcagatagtcaggcccagctaggtattggatcagttgtcttgggaactgtagagagcctaaaaccttatggcgccttcattgacatcggtggaatcaacggccttctccatgtgagccagattagtcatgaccgtgttgcagatatctcaacagttctgcaaccaggagataccctcaaggttatgatactgagccatgaccgtgaaagaggccgagtcagcctttctactaagaagcttgagccaacacctggtgacatgatccgcaatcccaagcttgtgtttgagaaggctgatgagatggctcagatattcaggcagagaatagctcaggcagaggctatggctcgtgctgacatgttgagattccagccagagagtggattgaccctcagttcagagggcatcttaggaccattgtcgtcggatgcaccttcggaggattctgaagatcgcacagatgaatagaggcagttgacgaagtgcaccgggtttgagatatgggatggcagttcgtcaagctcattttcaatcgggtgggggaggcatgacgagatcattttctgttcagatcgtgaggtccgttccagttattatccatttggattaggaaatagaaaaagtaacagggtt

SEQ ID NO: 84042 - DNA, 1469 bp, Zea Mays
ctatcctaaaccccaccgaccggataacaggacactggcactgccattcccgtttcctcgctcgaacacacaccgaagagagagacagagcgagagaggatggcgtccctggcgcagcacgtcgcgggcctaccgtgcccccctctatccggcgcgtcgcgccgtcgccccgcggcgcagaggcggcctccgtcggcgcttgtgtgcggtacctatgcgctgaccaaggacgagcgggagcgggagcggatgcgccaggtgttcgacgacgcctccgagcgctgccgcaccgcgcccatggagggcgtcgccttctcccccgacgacctcgacaccgccgtcgagtccaccgacatagacacggagatcggctcgctcattaaaggaacagtatttatgactacctcaaatggtgcatatatcgacatccaatccaagtctactgcttttttgcccttagatgaggcatgtcttcttgatatcgataatgttgaagaggctggcattcgtcctgggttagtagaagaattcatgataattgatgagaacccaggtgatgaaactttgattctaagtttgcaagcaattcagcaagaacttgcatgggaaaggtgccggcaacttcaggccgaagatgtcgttgtcacgggtaagtaattggtggaaacaaaggaggtgtagtagctcttgtggatgggcttaagggtttcgttccattttcgcaagtgtcatcgaaaacaaccgccgaagagctgcttgagaaagaattgcctctgaagtttgtagaggtcgatgaggaacaaggcaggcttgtcctcagtaatcgcaaggcaatggcagatagtcaggcccagctaggtattggatcagttgtcttgggaactgtagagagcctaaaaccttatggcgccttcattgacatcggtggaatcaacggccttctccatgtgagccagattagtcatgaccgtgttgcagatatctcaacagttctgcaaccaggagataccctcaaggttatgatactgagccatgaccgtgaaagaggccgagtcagcctttctactaagaagcttgagccaacacctggtgacatgatccgcaatcccaagcttgtgtttgagaaggctgatgagatggctcagatattcaggcagagaatagctcaggcagaggctatggctcgtgctgacatgttgagattccagccagagagtggattgaccctcagttcagagggcatcttaggaccattgtcgtcggatgcaccttcggaggattctgaagatcgcacagatgaatagaggcagttgacgaagtgcaccgggtttgagatatgggatggcagttcgtcaagctcattttcaatcgggtgggggaggcatgacgagatcattttctgttcagatcgtgaggtccgttccagttattatccatttggattaggaaatagaaaaagtaacagggtt

SEQ ID NO: 84043 - DNA, 2603 bp, Zea Mays
cagcggttcaacttcgacggcggccccagcctcgctacactgtcgctatccattttccccgtcacgagctgccatgagcaattaagtcttcttcacttcctggttcccagtattggtcgaggcgatctgacggagggagcagccaagtcagcaagtaccgcagcaccaagcagtcgaacagcgccgaagatgccagggctcgccgcgtcggcgtccgcagctccggcgccgttctcgttggcgacctcgcgcttaaccccggttgcaagacctgctccaagtttcagaacgcaagcttgtggattgaggtgctggattgctgcaaagctgaaactccgcaaggcattgaaaaggcatcacggatggcaacttcaaagaaatctagatgctcgagggaatgataacgttccagattgcttggaggctgcatctctgactgaaaagagaagtcattggaacatgcatcttgcttatgattctggaggtgaaatggccaacacaagctctgatactttggatagttcaactgttcaggaaaaaccagtggttccgggacacatcatctctgaaatcagttctcatgttcaaaaggaagagtctgctgtgtccaaaagacgctctaacaatgaaccatctctttgcattgctgtaattggagctactggtgagctggcaagaactaaagtttttccagcattatttgctctgtattacagtggttttcttcctcggaatgttggtatatttgggtattctaggaagaaattgacagatgagggcttaagatctataattgaagccaatttgacctgccgggtggatcaccatgaaaattgtgatgacaagctaattgagttcctcaaaaagacgtattatgtagatgccggacatgacaaccaagaagggatggttagattaaattctaggatgtcacaaatagagggcattggtgctgcaaacagaatattctaccttgctgttccacaagaggcactccttgatgtagcattgccactggctgacggtgcccaaactaagcaaggctggaatagaataattatcgagaaaccatttggctttactggtttgtcctcactgcgggtaacacaatctatgctgtcaaggtttgaggagaagcaaatttacaggtactattccacctttaatgtttaatcctttcaaccttaactccaacataaaatttggtcccacggggagtcaaacccaggacttgagtgctaatgaggccatctaaccaattgagctagacacccattcacattccttccaaccttagctggttttcccttttttggattgttcaattacgaagcttgacatttttatcccataggattgaccaccttctggggaaggatctgatcgaaaatcttactgtcttgagattttctaacttggtgtttgaacctttgtggagtcgaacttacatacggaatgtgcaggtcattttttctgaagaaacatcaaatgaaatacaagggaggtactttggaaattatgggataatccgtgacatagttcacagccacattcttcaaacaatagctctatttgctatggaaccacctgtaagtcttgatggagaggatatccgagatgaaaaggtgaaggttctcagatcaattcggaaagtgaaccttgatgatgttgttcttggtcaacttaaagatatgtctggtaaagttgacagatacacaaaatccatgataccaacctattttgctgctgctatgtacattgacaatgcacgctgggatggggtaccattttttatcaggacaggcatgggacttatgacgaatagagcagaaattcgaattcagtttcgccatgtccctggtaatatctaccgtgaacgctttggccatgacatagatctcgacacaaacgagctggttctacgcgatcaacctgaagaagcaatcctgttgaaagtcaacaacaaggtcccagggcttgggctccagctggatgcttcagaactgaacctgctttaccgggataggtacaacaccgaggtaccagattcgtatgaacatcttctactggacgtgctagatggagatagtcatttattcatgcgcagcgacgaactggctgccgcatggaatgtgctcactccgataatccatgagatagatcagaacagagtagttcctgagctctacgaggctggggacagagggcctatcaatgcttaccatctcgctgctaaacatggggtgcgatgggatgacgactggtgagtcgatacatggcaaagattctcgatgcgcaacgagattcattaccaatttttgtcgttgtatcgcagtcagatgtacaatatgccttctgtaatcggcctgatcaaggactttcaaggagacatgcctttcaaggagatatgcaaacatggtttctttcctgtcctgtagactgtagcactgttgattcaagttggaaaaagaaaaaaaggagaaaagaaaatatgcttgcgacaagccgaggccccatgtcttgtgcgtttagcatctcgtttgccacaagtatggcagtgtttggaaaatggcaatgaaaagatggcggcaatcggatcatac

SEQ ID NO: 84044 - DNA, 2715 bp, Zea Mays
acgtcgtcgacgtgtaatgtaaagctacagcggttcaacttcgacggcggccccagcctcgctacactgtcgctatccattttccccgtcacgagctgccatgagcaattaagtcttcttcacttcctggttcccagtattggtcgaggcgatctgacggagggagcagccaagtcagcaagtaccgcagcaccaagcagtcgaacagcgccgaagatgccagggctcgccgcgtcggcgtccgcagctccggcgccgttctcgttggcgacctcgcgcttaaccccggttgcaagacctgctccaagtttcagaacgcaagcttgtggattgaggtgctggattgctgcaaagctgaaactccgcaaggcattgaaaaggcatcacggatggcaacttcaaagaaatctagatgctcgagggaatgataacgttccagattgcttggaggctgcatctctgactgaaaagagaagtcattggaacatgcatcttgcttatggttgtcactctattgggaaatccgttgtcttgagtccgttactttgcatgtgcagatgtgcttatcacagttgtcattattgtcttaatgccttatgatttcgtcagtgctgctgacactggattgcttcatacttttgatagttacattcaatttgcattagcattataagcaaaaaaatgctcaagagaaactttcttcgtcatattatcttacaactactttttactgcaaacttcttggcaatttttgtctttatgctttcatgttgccctgactgtttcccctttatgcagattctggaggtgaaatggccaacacaagctctgatactttggatagttcaactgttcaggaaaaaccagtggttccgggacacatcatctctgaaatcagttctcatgttcaaaaggaagagtctgctgtgtccaaaagacgctctaacaatgaaccatctctttgcattgctgtaattggagctactggtgagctggcaagaactaaagtttttccagcattatttgctctgtattacagtggttttcttcctcggaatgttggtatatttgggtattctaggaagaaattgacagatgagggcttaagatctataattgaagccaatttgacctgccgggtggatcaccatgaaaattgtgatgacaagctaattgagttcctcaaaaagacgtattatgtagatgccggacatgacaaccaagaagggatggttagattaaattctaggatgtcacaaatagagggcattggtgctgcaaacagaatattctaccttgctgttccacaagaggcactccttgatgtagcattgccactggctgacggtgcccaaactaagcaaggctggaatagaataattatcgagaaaccatttggctttactggtttgtcctcactgcgggtaacacaatctatgctgtcaaggtttgaggagaagcaaatttacaggattgaccaccttctggggaaggatctgatcgaaaatcttactgtcttgagattttctaacttggtgtttgaacctttgtggagtcgaacttacatacggaatgtgcaggtcattttttctgaagaaacatcaaatgaaatacaagggaggtactttggaaattatgggataatccgtgacatagttcacagccacattcttcaaacaatagctctatttgctatggaaccacctgtaagtcttgatggagaggatatccgagatgaaaaggtgaaggttctcagatcaattcggaaagtgaaccttgatgatgttgttcttggtcaacttaaagatatgtctggtaaagttgacagatacacaaaatccatgataccaacctattttgctgctgctatgtacattgacaatgcacgctgggatggggtaccattttttatcaggacaggcatgggacttatgacgaatagaaattcgaattcagtttcgccatgtccctggtaatatctaccgtgaacgctttggccatgacatagatctcgacacaaacgagctggttctacgcgatcaacctgaagaagcaatcctgttgaaagtcaacaacaaggtcccagggcttgggctccagctggatgcttcagaactgaacctgctttaccgggataggtacaacaccgaggtaccagattcgtatgaacatcttctactggacgtgctagatggagatagtcatttattcatgcgcagcgacgaactggctgccgcatggaatgtgctcactccgataatccatgagatagatcagaacagagtagttcctgagctctacgaggctggggacagagggcctatcaatgcttaccatctcgctgctaaacatggggtgcgatgggatgacgactggtgagtcgatacatggcaaagattctcgatgcgcaacgagattcattaccaatttttgtcgttgtatcgcagtcagatgtacaatatgccttctgtaatcggcctgatcaaggactttcaaggagacatgcctttcaaggagatatgcaaacatggtttctttcctgtcctgtagactgtagcactgttgattcaagttggaaaaagaaaaaaaggagaaaagaaaatatgcttgcgacaagccgaggccccatgtcttgtgcgtttagcatctcgtttgccacaagtatggcagtgtttggaaaatggcaatgaaaagatggcggcaatcggatcatac

SEQ ID NO: 84045 - DNA, 2647 bp, Zea Mays
acgtcgtcgacgtgtaatgtaaagctacagcggttcaacttcgacggcggccccagcctcgctacactgtcgctatccattttccccgtcacgagctgccatgagcaattaagtcttcttcacttcctggttcccagtattggtcgaggcgatctgacggagggagcagccaagtcagcaagtaccgcagcaccaagcagtcgaacagcgccgaagatgccagggctcgccgcgtcggcgtccgcagctccggcgccgttctcgttggcgacctcgcgcttaaccccggttgcaagacctgctccaagtttcagaacgcaagcttgtggattgaggtgctggattgctgcaaagctgaaactccgcaaggcattgaaaaggcatcacggatggcaacttcaaagaaatctagatgctcgagggaatgataacgttccagattgcttggaggctgcatctctgactgaaaagagaagtcattggaacatgcatcttgcttatggttgtcactctattgggaaatccgttgtcttgagtccgttactttgcatgtgcagatgtgcttatcacagttgtcattattgtcttaatgccttatgatttcgtcagtgctgctgacactggattgcttcatacttttgatagttacattcaatttgcattagcattataagcaaaaaaatgctcaagagaaactttcttcgtcatattatcttacaactactttttactgcaaacttcttggcaatttttgtctttatgctttcatgttgccctgactgtttcccctttatgcagattctggaggtgaaatggccaacacaagctctgatactttggatagttcaactgttcaggaaaaaccagtggttccgggacacatcatctctgaaatcagttctcatgttcaaaaggaagagtctgctgtgtccaaaagacgctctaacaatgaaccatctctttgcattgctgtaattggagctactgaatgttggtatatttgggtattctaggaagaaattgacagatgagggcttaagatctataattgaagccaatttgacctgccgggtggatcaccatgaaaattgtgatgacaagctaattgagttcctcaaaaagacgtattatgtagatgccggacatgacaaccaagaagggatggttagattaaattctaggatgtcacaaatagagggcattggtgctgcaaacagaatattctaccttgctgttccacaagaggcactccttgatgtagcattgccactggctgacggtgcccaaactaagcaaggctggaatagaataattatcgagaaaccatttggctttactggtttgtcctcactgcgggtaacacaatctatgctgtcaaggtttgaggagaagcaaatttacaggattgaccaccttctggggaaggatctgatcgaaaatcttactgtcttgagattttctaacttggtgtttgaacctttgtggagtcgaacttacatacggaatgtgcaggtcattttttctgaagaaacatcaaatgaaatacaagggaggtactttggaaattatgggataatccgtgacatagttcacagccacattcttcaaacaatagctctatttgctatggaaccacctgtaagtcttgatggagaggatatccgagatgaaaaggtgaaggttctcagatcaattcggaaagtgaaccttgatgatgttgttcttggtcaacttaaagatatgtctggtaaagttgacagatacacaaaatccatgataccaacctattttgctgctgctatgtacattgacaatgcacgctgggatggggtaccattttttatcaggacaggcatgggacttatgacgaatagaaattcgaattcagtttcgccatgtccctggtaatatctaccgtgaacgctttggccatgacatagatctcgacacaaacgagctggttctacgcgatcaacctgaagaagcaatcctgttgaaagtcaacaacaaggtcccagggcttgggctccagctggatgcttcagaactgaacctgctttaccgggataggtacaacaccgaggtaccagattcgtatgaacatcttctactggacgtgctagatggagatagtcatttattcatgcgcagcgacgaactggctgccgcatggaatgtgctcactccgataatccatgagatagatcagaacagagtagttcctgagctctacgaggctggggacagagggcctatcaatgcttaccatctcgctgctaaacatggggtgcgatgggatgacgactggtgagtcgatacatggcaaagattctcgatgcgcaacgagattcattaccaatttttgtcgttgtatcgcagtcagatgtacaatatgccttctgtaatcggcctgatcaaggactttcaaggagacatgcctttcaaggagatatgcaaacatggtttctttcctgtcctgtagactgtagcactgttgattcaagttggaaaaagaaaaaaaggagaaaagaaaatatgcttgcgacaagccgaggccccatgtcttgtgcgtttagcatctcgtttgccacaagtatggcagtgtttggaaaatggcaatgaaaagatggcggcaatcggatcatac

SEQ ID NO: 84046 - DNA, 2288 bp, Zea Mays
acgacgtcgtcgacgtgtaatgtaaagctacagcggttcaacttcgacggcggccccagcctcgctacactgtcgctatccattttccccgtcacgagctgccatgagcaattaagtcttcttcacttcctggttcccagtattggtcgaggcgatctgacggagggagcagccaagtcagcaagtaccgcagcaccaagcagtcgaacagcgccgaagatgccagggctcgccgcgtcggcgtccgcagctccggcgccgttctcgttggcgacctcgcgcttaaccccggttgcaagacctgctccaagtttcagaacgcaagcttgtggattgaggtgctggattgctgcaaagctgaaactccgcaaggcattgaaaaggcatcacggatggcaacttcaaagaaatctagatgctcgagggaatgataacgttccagattgcttggaggctgcatctctgactgaaaagagaagtcattggaacatgcatcttgcttatgattctggaggtgaaatggccaacacaagctctgatactttggatagttcaactgttcaggaaaaaccagtggttccgggacacatcatctctgaaatcagttctcatgttcaaaaggaagagtctgctgtgtccaaaagacgctctaacaatgaaccatctctttgcattgctgtaattggagctactgaatgttggtatatttgggtattctaggaagaaattgacagatgagggcttaagatctataattgaagccaatttgacctgccgggtggatcaccatgaaaattgtgatgacaagctaattgagttcctcaaaaagacgtattatgtagatgccggacatgacaaccaagaagggatggttagattaaattctaggatgtcacaaatagagggcattggtgctgcaaacagaatattctaccttgctgttccacaagaggcactccttgatgtagcattgccactggctgacggtgcccaaactaagcaaggctggaatagaataattatcgagaaaccatttggctttactggtttgtcctcactgcgggtaacacaatctatgctgtcaaggtttgaggagaagcaaatttacaggattgaccaccttctggggaaggatctgatcgaaaatcttactgtcttgagattttctaacttggtgtttgaacctttgtggagtcgaacttacatacggaatgtgcaggtcattttttctgaagaaacatcaaatgaaatacaagggaggtactttggaaattatgggataatccgtgacatagttcacagccacattcttcaaacaatagctctatttgctatggaaccacctgtaagtcttgatggagaggatatccgagatgaaaaggtgaaggttctcagatcaattcggaaagtgaaccttgatgatgttgttcttggtcaacttaaagatatgtctggtaaagttgacagatacacaaaatccatgataccaacctattttgctgctgctatgtacattgacaatgcacgctgggatggggtaccattttttatcaggacaggcatgggacttatgacgaatagatctcgacacaaacgagctggttctacgcgatcaacctgaagaagcaatcctgttgaaagtcaacaacaaggtcccagggcttgggctccagctggatgcttcagaactgaacctgctttaccgggataggtacaacaccgaggtaccagattcgtatgaacatcttctactggacgtgctagatggagatagtcatttattcatgcgcagcgacgaactggctgccgcatggaatgtgctcactccgataatccatgagatagatcagaacagagtagttcctgagctctacgaggctggggacagagggcctatcaatgcttaccatctcgctgctaaacatggggtgcgatgggatgacgactggtgagtcgatacatggcaaagattctcgatgcgcaacgagattcattaccaatttttgtcgttgtatcgcagtcagatgtacaatatgccttctgtaatcggcctgatcaaggactttcaaggagacatgcctttcaaggagatatgcaaacatggtttctttcctgtcctgtagactgtagcactgttgattcaagttggaaaaagaaaaaaaggagaaaagaaaatatgcttgcgacaagccgaggccccatgtcttgtgcgtttagcatctcgtttgccacaagtatggcagtgtttggaaaatggcaatgaaaagatggcggcaatcggatcatac

SEQ ID NO: 84047 - DNA, 2401 bp, Zea Mays
acgacgtcgtcgacgtgtaatgtaaagctacagcggttcaacttcgacggcggccccagcctcgctacactgtcgctatccattttccccgtcacgagctgccatgagcaattaagtcttcttcacttcctggttcccagtattggtcgaggcgatctgacggagggagcagccaagtcagcaagtaccgcagcaccaagcagtcgaacagcgccgaagatgccagggctcgccgcgtcggcgtccgcagctccggcgccgttctcgttggcgacctcgcgcttaaccccggttgcaagacctgctccaagtttcagaacgcaagcttgtggattgaggtgctggattgctgcaaagctgaaactccgcaaggcattgaaaaggcatcacggatggcaacttcaaagaaatctagatgctcgagggaatgataacgttccagattgcttggaggctgcatctctgactgaaaagagaagtcattggaacatgcatcttgcttatgattctggaggtgaaatggccaacacaagctctgatactttggatagttcaactgttcaggaaaaaccagtggttccgggacacatcatctctgaaatcagttctcatgttcaaaaggaagagtctgctgtgtccaaaagacgctctaacaatgaaccatctctttgcattgctgtaattggagctactggtgagctggcaagaactaaagtttttccagcattatttgctctgtattacagtggttttcttcctcgggaagaaattgacagatgagggcttaagatctataattgaagccaatttgacctgccgggtggatcaccatgaaaattgtgatgacaagctaattgagttcctcaaaaagacgtattatgtagatgccggacatgacaaccaagaagggatggttagattaaattctaggatgtcacaaatagagggcattggtgctgcaaacagaatattctaccttgctgttccacaagaggcactccttgatgtagcattgccactggctgacggtgcccaaactaagcaaggctggaatagaataattatcgagaaaccatttggctttactggtttgtcctcactgcgggtaacacaatctatgctgtcaaggtttgaggagaagcaaatttacaggattgaccaccttctggggaaggatctgatcgaaaatcttactgtcttgagattttctaacttggtgtttgaacctttgtggagtcgaacttacatacggaatgtgcaggtcattttttctgaagaaacatcaaatgaaatacaagggaggtactttggaaattatgggataatccgtgacatagttcacagccacattcttcaaacaatagctctatttgctatggaaccacctgtaagtcttgatggagaggatatccgagatgaaaaggtgaaggttctcagatcaattcggaaagtgaaccttgatgatgttgttcttggtcaacttaaagatatgtctggtaaagttgacagatacacaaaatccatgataccaacctattttgctgctgctatgtacattgacaatgcacgctgggatggggtaccattttttatcaggacaggcatgggacttatgacgaatagagcagaaattcgaattcagtttcgccatgtccctggtaatatctaccgtgaacgctttggccatgacatagatctcgacacaaacgagctggttctacgcgatcaacctgaagaagcaatcctgttgaaagtcaacaacaaggtcccagggcttgggctccagctggatgcttcagaactgaacctgctttaccgggataggtacaacaccgaggtaccagattcgtatgaacatcttctactggacgtgctagatggagatagtcatttattcatgcgcagcgacgaactggctgccgcatggaatgtgctcactccgataatccatgagatagatcagaacagagtagttcctgagctctacgaggctggggacagagggcctatcaatgcttaccatctcgctgctaaacatggggtgcgatgggatgacgactggtgagtcgatacatggcaaagattctcgatgcgcaacgagattcattaccaatttttgtcgttgtatcgcagtcagatgtacaatatgccttctgtaatcggcctgatcaaggactttcaaggagacatgcctttcaaggagatatgcaaacatggtttctttcctgtcctgtagactgtagcactgttgattcaagttggaaaaagaaaaaaaggagaaaagaaaatatgcttgcgacaagccgaggccccatgtcttgtgcgtttagcatctcgtttgccacaagtatggcagtgtttggaaaatggcaatgaaaagatggcggcaatcggatcatac

SEQ ID NO: 84048 - DNA, 2370 bp, Zea Mays
atcaattgctctatacacgacgtcgtcgacgtgtaatgtaaagctacagcggttcaacttcgacggcggccccagcctcgctacactgtcgctatccattttccccgtcacgagctgccatgagcaattaagtcttcttcacttcctggttcccagtattggtcgaggcgatctgacggagggagcagccaagtcagcaagtaccgcagcaccaagcagtcgaacagcgccgaagatgccagggctcgccgcgtcggcgtccgcagctccggcgccgttctcgttggcgacctcgcgcttaaccccggttgcaagacctgctccaagtttcagaacgcaagcttgtggattgaggtgctggattgctgcaaagctgaaactccgcaaggcattgaaaaggcatcacggatggcaacttcaaagaaatctagatgctcgagggaatgataacgttccagattgcttggaggctgcatctctgactgaaaagagaagtcattggaacatgcatcttgcttatgattctggaggtgaaatggccaacacaagctctgatactttggatagttcaactgttcaggaaaaaccagtggttccgggacacatcatctctgaaatcagttctcatgttcaaaaggaagagtctgctgtgtccaaaagacgctctaacaatgaaccatctctttgcattgctgtaattggagctactgaatgttggtatatttgggtattctaggaagaaattgacagatgagggcttaagatctataattgaagccaatttgacctgccgggtggatcaccatgaaaattgtgatgacaagctaattgagttcctcaaaaagacgtattatgtagatgccggacatgacaaccaagaagggatggttagattaaattctaggatgtcacaaatagagggcattggtgctgcaaacagaatattctaccttgctgttccacaagaggcactccttgatgtagcattgccactggctgacggtgcccaaactaagcaaggctggaatagaataattatcgagaaaccatttggctttactggtttgtcctcactgcgggtaacacaatctatgctgtcaaggtttgaggagaagcaaatttacaggattgaccaccttctggggaaggatctgatcgaaaatcttactgtcttgagattttctaacttggtgtttgaacctttgtggagtcgaacttacatacggaatgtgcaggtcattttttctgaagaaacatcaaatgaaatacaagggaggtactttggaaattatgggataatccgtgacatagttcacagccacattcttcaaacaatagctctatttgctatggaaccacctgtaagtcttgatggagaggatatccgagatgaaaaggtgaaggttctcagatcaattcggaaagtgaaccttgatgatgttgttcttggtcaacttaaagatatgtctggtaaagttgacagatacacaaaatccatgataccaacctattttgctgctgctatgtacattgacaatgcacgctgggatggggtaccattttttatcaggacaggcatgggacttatgacgaatagaaattcgaattcagtttcgccatgtccctggtaatatctaccgtgaacgctttggccatgacatagatctcgacacaaacgagctggttctacgcgatcaacctgaagaagcaatcctgttgaaagtcaacaacaaggtcccagggcttgggctccagctggatgcttcagaactgaacctgctttaccgggataggtacaacaccgaggtaccagattcgtatgaacatcttctactggacgtgctagatggagatagtcatttattcatgcgcagcgacgaactggctgccgcatggaatgtgctcactccgataatccatgagatagatcagaacagagtagttcctgagctctacgaggctggggacagagggcctatcaatgcttaccatctcgctgctaaacatggggtgcgatgggatgacgactggtgagtcgatacatggcaaagattctcgatgcgcaacgagattcattaccaatttttgtcgttgtatcgcagtcagatgtacaatatgccttctgtaatcggcctgatcaaggactttcaaggagacatgcctttcaaggagatatgcaaacatggtttctttcctgtcctgtagactgtagcactgttgattcaagttggaaaaagaaaaaaaggagaaaagaaaatatgcttgcgacaagccgaggccccatgtcttgtgcgtttagcatctcgtttgccacaagtatggcagtgtttggaaaatggcaatgaaaagatggcggcaatcggatcatac

SEQ ID NO: 84049 - DNA, 2610 bp, Zea Mays
ccaagaattccatcaattgctctatacacgacgtcgtcgacgtgtaatgtaaagctacagcggttcaacttcgacggcggccccagcctcgctacactgtcgctatccattttccccgtcacgagctgccatgagcaattaagtcttcttcacttcctggttcccagtattggtcgaggcgatctgacggagggagcagccaagtcagcaagtaccgcagcaccaagcagtcgaacagcgccgaagatgccagggctcgccgcgtcggcgtccgcagctccggcgccgttctcgttggcgacctcgcgcttaaccccggttgcaagacctgctccaagtttcagaacgcaagcttgtggattgaggtgctggattgctgcaaagctgaaactccgcaaggcattgaaaaggcatcacggatggcaacttcaaagaaatctagatgctcgagggaatgataacgttccagattgcttggaggctgcatctctgactgaaaagagaagtcattggaacatgcatcttgcttatggttgtcactctattgggaaatccgttgtcttgagtccgttactttgcatgtgcagatgtgcttatcacagttgtcattattgtcttaatgccttatgatttcgtcagtgctgctgacactggattgcttcatacttttgatagttacattcaatttgcattagcattataagcaaaaaaatgctcaagagaaactttcttcgtcatattatcttacaactactttttactgcaaacttcttggcaatttttgtctttatgctttcatgttgccctgactgtttcccctttatgcagattctggaggtgaaatggccaacacaagctctgatactttggatagttcaactgttcaggaaaaaccagtggttccgggacacatcatctctgaaatcagttctcatgttcaaaaggaagagtctgctgtgtccaaaagacgctctaacaatgaaccatctctttgcattgctgtaattggagctactgaatgttggtatatttgggtattctaggaagaaattgacagatgagggcttaagatctataattgaagccaatttgacctgccgggtggatcaccatgaaaattgtgatgacaagctaattgagttcctcaaaaagacgtattatgtagatgccggacatgacaaccaagaagggatggttagattaaattctaggatgtcacaaatagagggcattggtgctgcaaacagaatattctaccttgctgttccacaagaggcactccttgatgtagcattgccactggctgacggtgcccaaactaagcaaggctggaatagaataattatcgagaaaccatttggctttactggtttgtcctcactgcgggtaacacaatctatgctgtcaaggtttgaggagaagcaaatttacaggattgaccaccttctggggaaggatctgatcgaaaatcttactgtcttgagattttctaacttggtgtttgaacctttgtggagtcgaacttacatacggaatgtgcaggtcattttttctgaagaaacatcaaatgaaatacaagggaggtactttggaaattatgggataatccgtgacatagttcacagccacattcttcaaacaatagctctatttgctatggaaccacctgtaagtcttgatggagaggatatccgagatgaaaaggtgaaggttctcagatcaattcggaaagtgaaccttgatgatgttgttcttggtcaacttaaagatatgtctggtaaagttgacagatacacaaaatccatgataccaacctattttgctgctgctatgtacattgacaatgcacgctgggatggggtaccattttttatcaggacaggcatgggacttatgacgaatagagcagaaattcgaattcagtttcgccatgtccctggtaatatctaccgtgaacgctttggccatgacatagatctcgacacaaacgagctggttctacgcgatcaacctgaagaagcaatcctgttgaaagtcaacaacaaggtcccagggcttgggctccagctggatgcttcagaactgaacctgctttaccgggataggtacaacaccgaggtaccagattcgtatgaacatcttctactggacgtgctagatggagatagtcatttattcatgcgcagcgacgaactggctgccgcatggaatgtgctcactccgataatccatgagatagatcagaacagagtagttcctgagctctacgaggctggggacagagggcctatcaatgcttaccatctcgctgctaaacatggggtgcgatgggatgacgactgtcagatgtacaatatgccttctgtaatcggcctgatcaaggactttcaaggagacatgcctttcaaggagatatgcaaacatggtttctttcctgtcctgtagactgtagcactgttgattcaagttggaaaaagaaaaaaaggagaaaagaaaatatgcttgcgacaagccgaggccccatgtcttgtgcgtttagcatctcgtttgccacaagtatggcagtgtttggaaaatggcaatgaaaagatggcggcaatcggatcatac

SEQ ID NO: 84050 - DNA, 2489 bp, Zea Mays
ctttttctaacgcatcgaagaagtgcatatgctttcgattcctggggaattccggtattttccatcaaattctggtaaagcatcctgggctcctggcggttagccaagaattccatcaattgctctatacacgacgtcgtcgacgtgtaatgtaaagctacagcggttcaacttcgacggcggccccagcctcgctacactgtcgctatccattttccccgtcacgagctgccatgagcaattaagtcttcttcacttcctggttcccagtattggtcgaggcgatctgacggagggagcagccaagtcagcaagtaccgcagcaccaagcagtcgaacagcgccgaagatgccagggctcgccgcgtcggcgtccgcagctccggcgccgttctcgttggcgacctcgcgcttaaccccggttgcaagacctgctccaagtttcagaacgcaagcttgtggattgaggtgctggattgctgcaaagctgaaactccgcaaggcattgaaaaggcatcacggatggcaacttcaaagaaatctagatgctcgagggaatgataacgttccagattgcttggaggctgcatctctgactgaaaagagaagtcattggaacatgcatcttgcttatgattctggaggtgaaatggccaacacaagctctgatactttggatagttcaactgttcaggaaaaaccagtggttccgggacacatcatctctgaaatcagttctcatgttcaaaaggaagagtctgctgtgtccaaaagacgctctaacaatgaaccatctctttgcattgctgtaattggagctactgaatgttggtatatttgggtattctaggaagaaattgacagatgagggcttaagatctataattgaagccaatttgacctgccgggtggatcaccatgaaaattgtgatgacaagctaattgagttcctcaaaaagacgtattatgtagatgccggacatgacaaccaagaagggatggttagattaaattctaggatgtcacaaatagagggcattggtgctgcaaacagaatattctaccttgctgttccacaagaggcactccttgatgtagcattgccactggctgacggtgcccaaactaagcaaggctggaatagaataattatcgagaaaccatttggctttactggtttgtcctcactgcgggtaacacaatctatgctgtcaaggtttgaggagaagcaaatttacaggattgaccaccttctggggaaggatctgatcgaaaatcttactgtcttgagattttctaacttggtgtttgaacctttgtggagtcgaacttacatacggaatgtgcaggtcattttttctgaagaaacatcaaatgaaatacaagggaggtactttggaaattatgggataatccgtgacatagttcacagccacattcttcaaacaatagctctatttgctatggaaccacctgtaagtcttgatggagaggatatccgagatgaaaaggtgaaggttctcagatcaattcggaaagtgaaccttgatgatgttgttcttggtcaacttaaagatatgtctggtaaagttgacagatacacaaaatccatgataccaacctattttgctgctgctatgtacattgacaatgcacgctgggatggggtaccattttttatcaggacaggcatgggacttatgacgaatagagcagaaattcgaattcagtttcgccatgtccctggtaatatctaccgtgaacgctttggccatgacatagatctcgacacaaacgagctggttctacgcgatcaacctgaagaagcaatcctgttgaaagtcaacaacaaggtcccagggcttgggctccagctggatgcttcagaactgaacctgctttaccgggataggtacaacaccgaggtaccagattcgtatgaacatcttctactggacgtgctagatggagatagtcatttattcatgcgcagcgacgaactggctgccgcatggaatgtgctcactccgataatccatgagatagatcagaacagagtagttcctgagctctacgaggctggggacagagggcctatcaatgcttaccatctcgctgctaaacatggggtgcgatgggatgacgactggtgagtcgatacatggcaaagattctcgatgcgcaacgagattcattaccaatttttgtcgttgtatcgcagtcagatgtacaatatgccttctgtaatcggcctgatcaaggactttcaaggagacatgcctttcaaggagatatgcaaacatggtttctttcctgtcctgtagactgtagcactgttgattcaagttggaaaaagaaaaaaaggagaaaagaaaatatgcttgcgacaagccgaggccccatgtcttgtgcgtttagcatctcgtttgccacaagtatggcagtgtttggaaaatggcaatgaaaagatggcggcaatcggatcatac

SEQ ID NO: 84051 - DNA, 4996 bp, Zea Mays
ctttccttcccccaccatcgcgtgtgagtccacggtgtgatgtcacggagcggtggcggctttcccgatccactgtgcgggagaaatccccgtgcagccttcttccagctcttcctactctttgctactcgtcttcgctgatttctgccttaattccatcccttccctgcctagaacttgctttgcttcaccccatcacagcttttggtgcctcgtcatcggcgacctaaccgccggcgaccagataaactaagccaggcccttcgctccgaaagtcgtctctcgtagagagcacttgctcacctgctcctcgccctcctctgctggcagtggacttgcgcggagtggagatccatccggacctggttcgatttcttcatctcggttgcttctctgtccagtgggtggatcactggattgtgggttgtgctaactgcaggctggcttgtcagcctatcataaggaaagtgaaaaagagacaacaaagcaatttgttgtctcattcttaggagctggcgagcactcggcatggcagatgctagttcgaggactgacacctcgactgttgtagacatggatgataagaatcaaaggattattttacgaaatttcaacttctctctgtgggacatctaatggtacaggtcttggagagatgcatgtaaagtgttagaaaacggacagagtggagccatggtcccggcttctaattcatctgaccggtctgacagatctgacaaacctatggaccagaaggttttacgacggcttgcccaaaatcgtgaggcagcaagaaaaagccggctgaggaaaaaggcatatgtgcaacagctagagagcagtaagctaaaacttgcaagcctggagcaagaactccagaaagctcgacagcagggaatcttcatttctagttctggagatcaaactcatactatgagtggaaatggagctatgaccttcgatttagaatattctcgatggcaagaggaacaaaataagcagataaatgagctgaggactgcagtaaatgctcatgcatgtggaaaacatctgctgaaaggtgcttcttgtggcttgggggtttccgttcgtctgagcttctaaagctccttgtgaatcagcttgagcctctaactgagcagcaattgatggggctgtccaatctgcagcaatcttctcagcaggctgaggatgcattgtcacaaggaatggaagcattgcagcagtccttggcagaaacgctggctgggtcccttggtccatcaggatcttctggaaacgtggcaaactatatgggtcaaatggctatggccatgggaaaacttggcacactcgagaatttccttcgccaggctgacaatctacgacagcagaccttacatcagatgcaacgtatcctgacaatccgacaagctgctcgtgcgcttcttgcaatccatgactacttttcacgtttgcgcgcactgagttctctttggcttgctaggccacgagagtaacatcacccccgttggggtcactcgatgaactgatctgtgaatgtgggactgctggctgcaaactcgcaaagcatttgcagatgactggaggatcagtcctctctgtacaagttgtattaacatcttctggtctcatattgtgctccagtgttgtacaatttagggaaaagcttggattaacttgtaagttatcatgaatttgttattggcatattgtacaattgtattagcaataaaaatagaagtacataagtgctggaagcctggaaggatatccagaatctatattggttggaaacgagcagcagaagattgttatagattgttatgttgctttgaatattcggttgtaagtgccttttttggggtatatagaacaaagaaagattcaggagagatgtagggattcaccagaggctatcggggattgtgcttctaggagctccctggactatctctagcaagtctcatattaagctctactctgtaaacagtgatacattgaattgaacgtgctacggttatgatggtaacatttgctatgcattttttaggatgaattctgtgacattaaaatttagtacacattttgactgaggattctgtaaacatttctttcacaagttatctaggcaaaattcgaactttttctaacgcatcgaagaagtgcatatgctttcgattcctggggaattccggtattttccatcaaattctggtaaagcatcctgggctcctggcggttagccaagaattccatcaattgctctatacacgacgtcgtcgacgtgtaatgtaaagctacagcggttcaacttcgacggcggccccagcctcgctacactgtcgctatccattttccccgtcacgagctgccatgagcaattaagtcttcttcacttcctggttcccagtattggtcgaggcgatctgacggagggagcagccaagtcagcaagtaccgcagcaccaagcagtcgaacagcgccgaagatgccagggctcgccgcgtcggcgtccgcagctccggcgccgttctcgttggcgacctcgcgcttaaccccggttgcaagacctgctccaagtttcagaacgcaagcttgtggattgaggtgctggattgctgcaaagctgaaactccgcaaggcattgaaaaggcatcacggatggcaacttcaaagaaatctagatgctcgagggaatgataacgttccagattgcttggaggctgcatctctgactgaaaagagaagtcattggaacatgcatcttgcttatggttgtcactctattgggaaatccgttgtcttgagtccgttactttgcatgtgcagatgtgcttatcacagttgtcattattgtcttaatgccttatgatttcgtcagtgctgctgacactggattgcttcatacttttgatagttacattcaatttgcattagcattataagcaaaaaaatgctcaagagaaactttcttcgtcatattatcttacaactactttttactgcaaacttcttggcaatttttgtctttatgctttcatgttgccctgactgtttcccctttatgcagattctggaggtgaaatggccaacacaagctctgatactttggatagttcaactgttcaggaaaaaccagtggttccgggacacatcatctctgaaatcagttctcatgttcaaaaggaagagtctgctgtgtccaaaagacgctctaacaatgaaccatctctttgcattgctgtaattggagctactggtgagctggcaagaactaaagtttttccagcattatttgctctgtattacagtggttttcttcctcggaatgttggtatatttgggtattctaggaagaaattgacagatgagggcttaagatctataattgaagccaatttgacctgccgggtggatcaccatgaaaattgtgatgacaagctaattgagttcctcaaaaagacgtattatgtagatgccggacatgacaaccaagaagggatggttagattaaattctaggatgtcacaaatagagggcattggtgctgcaaacagaatattctaccttgctgttccacaagaggcactccttgatgtagcattgccactggctgacggtgcccaaactaagcaaggctggaatagaataattatcgagaaaccatttggctttactggtttgtcctcactgcgggtaacacaatctatgctgtcaaggtttgaggagaagcaaatttacaggattgaccaccttctggggaaggatctgatcgaaaatcttactgtcttgagattttctaacttggtgtttgaacctttgtggagtcgaacttacatacggaatgtgcaggtcattttttctgaagaaacatcaaatgaaatacaagggaggtactttggaaattatgggataatccgtgacatagttcacagccacattcttcaaacaatagctctatttgctatggaaccacctgtaagtcttgatggagaggatatccgagatgaaaaggtgaaggttctcagatcaattcggaaagtgaaccttgatgatgttgttcttggtcaacttaaagatatgtctggtaaagttgacagatacacaaaatccatgataccaacctattttgctgctgctatgtacattgacaatgcacgctgggatggggtaccattttttatcaggacaggcatgggacttatgacgaatagagcagaaattcgaattcagtttcgccatgtccctggtaatatctaccgtgaacgctttggccatgacatagatctcgacacaaacgagctggttctacgcgatcaacctgaagaagcaatcctgttgaaagtcaacaacaaggtcccagggcttgggctccagctggatgcttcagaactgaacctgctttaccgggataggtacaacaccgaggtaccagattcgtatgaacatcttctactggacgtgctagatggagatagtcatttattcatgcgcagcgacgaactggctgccgcatggaatgtgctcactccgataatccatgagatagatcagaacagagtagttcctgagctctacgaggctggggacagagggcctatcaatgcttaccatctcgctgctaaacatggggtgcgatgggatgacgactggtgagtcgatacatggcaaagattctcgatgcgcaacgagattcattaccaatttttgtcgttgtatcgcagtcagatgtacaatatgccttctgtaatcggcctgatcaaggactttcaaggagacatgcctttcaaggagatatgcaaacatggtttctttcctgtcctgtagactgtagcactgttgattcaagttggaaaaagaaaaaaaggagaaaagaaaatatgcttgcgacaagccgaggccccatgtcttgtgcgtttagcatctcgtttgccacaagtatggcagtgtttggaaaatggcaatgaaaagatggcggcaatcggatcatac

SEQ ID NO: 84052 - DNA, 4484 bp, Zea Mays
cggctttccttcccccaccatcgcgtgtgagtccacggtgtgatgtcacggagcggtggcggctttcccgatccactgtgcgggagaaatccccgtgcagccttcttccagctcttcctactctttgctactcgtcttcgctgatttctgccttaattccatcccttccctgcctagaacttgctttgcttcaccccatcacagcttttggtgcctcgtcatcggcgacctaaccgccggcgaccagataaactaagccaggcccttcgctccgaaagtcgtctctcgtagagagcacttgctcacctgctcctcgccctcctctgctggcagtggacttgcgcggagtggagatccatccggacctggttcgatttcttcatctcgttagaaaacggacagagtggagccatggtcccggcttctaattcatctgaccggtctgacagatctgacaaacctatggaccagaaggttttacgacggcttgcccaaaatcgtgaggcagcaagaaaaagccggctgaggaaaaaggcatatgtgcaacagctagagagcagtaagctaaaacttgcaagcctggagcaagaactccagaaagctcgacagcagggaatcttcatttctagttctggagatcaaactcatactatgagtggaaatggagctatgaccttcgatttagaatattctcgatggcaagaggaacaaaataagcagataaatgagctgaggactgcagtaaatgctcatgcaagtgatagtgacctccgtcttatagtcgatgggataatggcacattatgacgagatattcaggctgaagggcattgctgcaaaggctgatgtgttccatatactttcaggcatgtggaaaacatctgctgaaagctccttgtgaatcagcttgagcctctaactgagcagcaattgatggggctgtccaatctgcagcaatcttctcagcaggctgaggatgcattgtcacaaggaatggaagcattgcagcagtccttggcagaaacgctggctgggtcccttggtccatcaggatcttctggaaacgtggcaaactatatgggtcaaatggctatggccatgggaaaacttggcacactcgagaatttccttcgccaggctgacaatctacgacagcagaccttacatcagatgcaacgtatcctgacaatccgacaagctgctcgtgcgcttcttgcaatccatgactacttttcacgtttgcgcgcactgagttctctttggcttgctaggccacgagagtaacatcacccccgttggggtcactcgatgaactgatctgtgaatgtgggactgctggctgcaaactcgcaaagcatttgcagatgactggaggatcagtcctctctgtacaagttgtattaacatcttctggtctcatattgtgctccagtgttgtacaatttagggaaaagcttggattaacttgtaagttatcatgaatttgttattggcatattgtacaattgtattagcaataaaaatagaagtacataagtgctggaagcctggaaggatatccagaatctatattggttggaaacgagcagcagaagattgttatagattgttatgttgctttgaatattcggttgtaagtgccttttttggggtatatagaacaaagaaagattcaggagagatgtagggattcaccagaggctatcggggattgtgcttctaggagctccctggactatctctagcaagtctcatattaagctctactctgtaaacagtgatacattgaattgaacgtgctacggttatgatggtaacatttgctatgcattttttaggatgaattctgtgacattaaaatttagtacacattttgactgaggattctgtaaacatttctttcacaagttatctaggcaaaattcgaactttttctaacgcatcgaagaagtgcatatgctttcgattcctggggaattccggtattttccatcaaattctggtaaagcatcctgggctcctggcggttagccaagaattccatcaattgctctatacacgacgtcgtcgacgtgtaatgtaaagctacagcggttcaacttcgacggcggccccagcctcgctacactgtcgctatccattttccccgtcacgagctgccatgagcaattaagtcttcttcacttcctggttcccagtattggtcgaggcgatctgacggagggagcagccaagtcagcaagtaccgcagcaccaagcagtcgaacagcgccgaagatgccagggctcgccgcgtcggcgtccgcagctccggcgccgttctcgttggcgacctcgcgcttaaccccggttgcaagacctgctccaagtttcagaacgcaagcttgtggattgaggtgctggattgctgcaaagctgaaactccgcaaggcattgaaaaggcatcacggatggcaacttcaaagaaatctagatgctcgagggaatgataacgttccagattgcttggaggctgcatctctgactgaaaagagaagtcattggaacatgcatcttgcttatgattctggaggtgaaatggccaacacaagctctgatactttggatagttcaactgttcaggaaaaaccagtggttccgggacacatcatctctgaaatcagttctcatgttcaaaaggaagagtctgctgtgtccaaaagacgctctaacaatgaaccatctctttgcattgctgtaattggagctactggtgagctggcaagaactaaagtttttccagcattatttgctctgtattacagtggttttcttcctcggaatgttggtatatttgggtattctaggaagaaattgacagatgagggcttaagatctataattgaagccaatttgacctgccgggtggatcaccatgaaaattgtgatgacaagctaattgagttcctcaaaaagacgtattatgtagatgccggacatgacaaccaagaagggatggttagattaaattctaggatgtcacaaatagagggcattggtgctgcaaacagaatattctaccttgctgttccacaagaggcactccttgatgtagcattgccactggctgacggtgcccaaactaagcaaggctggaatagaataattatcgagaaaccatttggctttactggtttgtcctcactgcgggtaacacaatctatgctgtcaaggtttgaggagaagcaaatttacaggattgaccaccttctggggaaggatctgatcgaaaatcttactgtcttgagattttctaacttggtgtttgaacctttgtggagtcgaacttacatacggaatgtgcaggtcattttttctgaagaaacatcaaatgaaatacaagggaggtactttggaaattatgggataatccgtgacatagttcacagccacattcttcaaacaatagctctatttgctatggaaccacctgtaagtcttgatggagaggatatccgagatgaaaaggtgaaggttctcagatcaattcggaaagtgaaccttgatgatgttgttcttggtcaacttaaagatatgtctggtaaagttgacagatacacaaaatccatgataccaacctattttgctgctgctatgtacattgacaatgcacgctgggatggggtaccattttttatcaggacaggcatgggacttatgacgaatagagcagaaattcgaattcagtttcgccatgtccctggtaatatctaccgtgaacgctttggccatgacatagatctcgacacaaacgagctggttctacgcgatcaacctgaagaagcaatcctgttgaaagtcaacaacaaggtcccagggcttgggctccagctggatgcttcagaactgaacctgctttaccgggataggtacaacaccgaggtaccagattcgtatgaacatcttctactggacgtgctagatggagatagtcatttattcatgcgcagcgacgaactggctgccgcatggaatgtgctcactccgataatccatgagatagatcagaacagagtagttcctgagctctacgaggctggggacagagggcctatcaatgcttaccatctcgctgctaaacatggggtgcgatgggatgacgactggtgagtcgatacatggcaaagattctcgatgcgcaacgagattcattaccaatttttgtcgttgtatcgcagtcagatgtacaatatgccttctgtaatcggcctgatcaaggactttcaaggagacatgcctttcaaggagatatgcaaacatggtttctttcctgtcctgtagactgtagcactgttgattcaagttggaaaaagaaaaaaaggagaaaagaaaatatgcttgcgacaagccgaggccccatgtcttgtgcgtttagcatctcgtttgccacaagtatggcagtgtttggaaaatggcaatgaaaagatggcggcaatcggatcatac

SEQ ID NO: 84053 - DNA, 4376 bp, Zea Mays
ctctgctgctgcagcctgcagcggctttccttcccccaccatcgcgtgtgagtccacggtgtgatgtcacggagcggtggcggctttcccgatccactgtgcgggagaaatccccgtgcagccttcttccagctcttcctactctttgctactcgtcttcgctgatttctgccttaattccatcccttccctgcctagaacttgctttgcttcaccccatcacagcttttggtgcctcgtcatcggcgacctaaccgccggcgaccagataaactaagccaggcccttcgctccgaaagtcgtctctcgtagagagcacttgctcacctgctcctcgccctcctctgctggcagtggacttgcgcggagtggagatccatccggacctggttcgatttcttcatctcgttagaaaacggacagagtggagccatggtcccggcttctaattcatctgaccggtctgacagatctgacaaacctatggaccagaaggttttacgacggcttgcccaaaatcgtgaggcagcaagaaaaagccggctgaggaaaaaggcatatgtgcaacagctagagagcagtaagctaaaacttgcaagcctggagcaagaactccagaaagctcgacagcagggaatcttcatttctagttctggagatcaaactcatactatgagtggaaatggagctatgaccttcgatttagaatattctcgatggcaagaggaacaaaataagcagataaatgagctgaggactgcagtaaatgctcatgcatgtggaaaacatctgctgaaaggtgcttcttgtggcttgggggtttccgttcgtctgagcttctaaagcaatcttctcagcaggctgaggatgcattgtcacaaggaatggaagcattgcagcagtccttggcagaaacgctggctgggtcccttggtccatcaggatcttctggaaacgtggcaaactatatgggtcaaatggctatggccatgggaaaacttggcacactcgagaatttccttcgccaggctgacaatctacgacagcagaccttacatcagatgcaacgtatcctgacaatccgacaagctgctcgtgcgcttcttgcaatccatgactacttttcacgtttgcgcgcactgagttctctttggcttgctaggccacgagagtaacatcacccccgttggggtcactcgatgaactgatctgtgaatgtgggactgctggctgcaaactcgcaaagcatttgcagatgactggaggatcagtcctctctgtacaagttgtattaacatcttctggtctcatattgtgctccagtgttgtacaatttagggaaaagcttggattaacttgtaagttatcatgaatttgttattggcatattgtacaattgtattagcaataaaaatagaagtacataagtgctggaagcctggaaggatatccagaatctatattggttggaaacgagcagcagaagattgttatagattgttatgttgctttgaatattcggttgtaagtgccttttttggggtatatagaacaaagaaagattcaggagagatgtagggattcaccagaggctatcggggattgtgcttctaggagctccctggactatctctagcaagtctcatattaagctctactctgtaaacagtgatacattgaattgaacgtgctacggttatgatggtaacatttgctatgcattttttaggatgaattctgtgacattaaaatttagtacacattttgactgaggattctgtaaacatttctttcacaagttatctaggcaaaattcgaactttttctaacgcatcgaagaagtgcatatgctttcgattcctggggaattccggtattttccatcaaattctggtaaagcatcctgggctcctggcggttagccaagaattccatcaattgctctatacacgacgtcgtcgacgtgtaatgtaaagctacagcggttcaacttcgacggcggccccagcctcgctacactgtcgctatccattttccccgtcacgagctgccatgagcaattaagtcttcttcacttcctggttcccagtattggtcgaggcgatctgacggagggagcagccaagtcagcaagtaccgcagcaccaagcagtcgaacagcgccgaagatgccagggctcgccgcgtcggcgtccgcagctccggcgccgttctcgttggcgacctcgcgcttaaccccggttgcaagacctgctccaagtttcagaacgcaagcttgtggattgaggtgctggattgctgcaaagctgaaactccgcaaggcattgaaaaggcatcacggatggcaacttcaaagaaatctagatgctcgagggaatgataacgttccagattgcttggaggctgcatctctgactgaaaagagaagtcattggaacatgcatcttgcttatgattctggaggtgaaatggccaacacaagctctgatactttggatagttcaactgttcaggaaaaaccagtggttccgggacacatcatctctgaaatcagttctcatgttcaaaaggaagagtctgctgtgtccaaaagacgctctaacaatgaaccatctctttgcattgctgtaattggagctactggtgagctggcaagaactaaagtttttccagcattatttgctctgtattacagtggttttcttcctcggaatgttggtatatttgggtattctaggaagaaattgacagatgagggcttaagatctataattgaagccaatttgacctgccgggtggatcaccatgaaaattgtgatgacaagctaattgagttcctcaaaaagacgtattatgtagatgccggacatgacaaccaagaagggatggttagattaaattctaggatgtcacaaatagagggcattggtgctgcaaacagaatattctaccttgctgttccacaagaggcactccttgatgtagcattgccactggctgacggtgcccaaactaagcaaggctggaatagaataattatcgagaaaccatttggctttactggtttgtcctcactgcgggtaacacaatctatgctgtcaaggtttgaggagaagcaaatttacaggattgaccaccttctggggaaggatctgatcgaaaatcttactgtcttgagattttctaacttggtgtttgaacctttgtggagtcgaacttacatacggaatgtgcaggtcattttttctgaagaaacatcaaatgaaatacaagggaggtactttggaaattatgggataatccgtgacatagttcacagccacattcttcaaacaatagctctatttgctatggaaccacctgtaagtcttgatggagaggatatccgagatgaaaaggtgaaggttctcagatcaattcggaaagtgaaccttgatgatgttgttcttggtcaacttaaagatatgtctggtaaagttgacagatacacaaaatccatgataccaacctattttgctgctgctatgtacattgacaatgcacgctgggatggggtaccattttttatcaggacaggcatgggacttatgacgaatagagcagaaattcgaattcagtttcgccatgtccctggtaatatctaccgtgaacgctttggccatgacatagatctcgacacaaacgagctggttctacgcgatcaacctgaagaagcaatcctgttgaaagtcaacaacaaggtcccagggcttgggctccagctggatgcttcagaactgaacctgctttaccgggataggtacaacaccgaggtaccagattcgtatgaacatcttctactggacgtgctagatggagatagtcatttattcatgcgcagcgacgaactggctgccgcatggaatgtgctcactccgataatccatgagatagatcagaacagagtagttcctgagctctacgaggctggggacagagggcctatcaatgcttaccatctcgctgctaaacatggggtgcgatgggatgacgactggtgagtcgatacatggcaaagattctcgatgcgcaacgagattcattaccaatttttgtcgttgtatcgcagtcagatgtacaatatgccttctgtaatcggcctgatcaaggactttcaaggagacatgcctttcaaggagatatgcaaacatggtttctttcctgtcctgtagactgtagcactgttgattcaagttggaaaaagaaaaaaaggagaaaagaaaatatgcttgcgacaagccgaggccccatgtcttgtgcgtttagcatctcgtttgccacaagtatggcagtgtttggaaaatggcaatgaaaagatggcggcaatcggatcatac

SEQ ID NO: 84054 - DNA, 4654 bp, Zea Mays
acgtgctctgctgctgcagcctgcagcggctttccttcccccaccatcgcgtgtgagtccacggtgtgatgtcacggagcggtggcggctttcccgatccactgtgcgggagaaatccccgtgcagccttcttccagctcttcctactctttgctactcgtcttcgctgatttctgccttaattccatcccttccctgcctagaacttgctttgcttcaccccatcacagcttttggtgcctcgtcatcggcgacctaaccgccggcgaccagataaactaagccaggcccttcgctccgaaagtcgtctctcgtagagagcacttgctcacctgctcctcgccctcctctgctggcagtggacttgcgcggagtggagatccatccggacctggttcgatttcttcatctcggttgcttctctgtccagtgggtggatcactggattgtgggttgtgctaactgcaggctggcttgtcagcctatcataaggaaagtgaaaaagagacaacaaagcaatttgttgtctcattcttaggagctggcgagcactcggcatggcagatgctagttcgaggactgacacctcgactgttgtagacatggatgataagaatcaaaggttagaaaacggacagagtggagccatggtcccggcttctaattcatctgaccggtctgacagatctgacaaacctatggaccagaaggttttacgacggcttgcccaaaatcgtgaggcagcaagaaaaagccggctgaggaaaaaggcatatgtgcaacagctagagagcagtaagctaaaacttgcaagcctggagcaagaactccagaaagctcgacagcagggaatcttcatttctagttctggagatcaaactcatactatgagtggaaatggagctatgaccttcgatttagaatattctcgatggcaagaggaacaaaataagcagataaatgagctgaggactgcagtaaatgctcatgcatgtggaaaacatctgctgaaaggtgcttcttgtggcttgggggtttccgttcgtctgagcttctaaagctccttgtgaatcagcttgagcctctaactgagcagcaattgatggggctgtccaatctgcagcaatcttctcagcaggctgaggatgcattgtcacaaggaatggaagcattgcagcagtccttggcagaaacgctggctgggtcccttggtccatcaggatcttctggaaacgtggcaaactatatgggtcaaatggctatggccatgggaaaacttggcacactcgagaatttccttcgccaggctgacaatctacgacagcagaccttacatcagatgcaacgtatcctgacaatccgacaagctgctcgtgcgcttcttgcaatccatgactacttttcacgtttgcgcgcactgagttctctttggcttgctaggccacgagagtaacatcacccccgttggggtcactcgatgaactgatctgtgaatgtgggactgctggctgcaaactcgcaaagcatttgcagatgactggaggatcagtcctctctgtacaagttgtattaacatcttctggtctcatattgtgctccagtgttgtacaatttagggaaaagcttggattaacttgtaagttatcatgaatttgttattggcatattgtacaattgtattagcaataaaaatagaagtacataagtgctggaagcctggaaggatatccagaatctatattggttggaaacgagcagcagaagattgttatagattgttatgttgctttgaatattcggttgtaagtgccttttttggggtatatagaacaaagaaagattcaggagagatgtagggattcaccagaggctatcggggattgtgcttctaggagctccctggactatctctagcaagtctcatattaagctctactctgtaaacagtgatacattgaattgaacgtgctacggttatgatggtaacatttgctatgcattttttaggatgaattctgtgacattaaaatttagtacacattttgactgaggattctgtaaacatttctttcacaagttatctaggcaaaattcgaactttttctaacgcatcgaagaagtgcatatgctttcgattcctggggaattccggtattttccatcaaattctggtaaagcatcctgggctcctggcggttagccaagaattccatcaattgctctatacacgacgtcgtcgacgtgtaatgtaaagctacagcggttcaacttcgacggcggccccagcctcgctacactgtcgctatccattttccccgtcacgagctgccatgagcaattaagtcttcttcacttcctggttcccagtattggtcgaggcgatctgacggagggagcagccaagtcagcaagtaccgcagcaccaagcagtcgaacagcgccgaagatgccagggctcgccgcgtcggcgtccgcagctccggcgccgttctcgttggcgacctcgcgcttaaccccggttgcaagacctgctccaagtttcagaacgcaagcttgtggattgaggtgctggattgctgcaaagctgaaactccgcaaggcattgaaaaggcatcacggatggcaacttcaaagaaatctagatgctcgagggaatgataacgttccagattgcttggaggctgcatctctgactgaaaagagaagtcattggaacatgcatcttgcttatgattctggaggtgaaatggccaacacaagctctgatactttggatagttcaactgttcaggaaaaaccagtggttccgggacacatcatctctgaaatcagttctcatgttcaaaaggaagagtctgctgtgtccaaaagacgctctaacaatgaaccatctctttgcattgctgtaattggagctactggtgagctggcaagaactaaagtttttccagcattatttgctctgtattacagtggttttcttcctcggaatgttggtatatttgggtattctaggaagaaattgacagatgagggcttaagatctataattgaagccaatttgacctgccgggtggatcaccatgaaaattgtgatgacaagctaattgagttcctcaaaaagacgtattatgtagatgccggacatgacaaccaagaagggatggttagattaaattctaggatgtcacaaatagagggcattggtgctgcaaacagaatattctaccttgctgttccacaagaggcactccttgatgtagcattgccactggctgacggtgcccaaactaagcaaggctggaatagaataattatcgagaaaccatttggctttactggtttgtcctcactgcgggtaacacaatctatgctgtcaaggtttgaggagaagcaaatttacaggattgaccaccttctggggaaggatctgatcgaaaatcttactgtcttgagattttctaacttggtgtttgaacctttgtggagtcgaacttacatacggaatgtgcaggtcattttttctgaagaaacatcaaatgaaatacaagggaggtactttggaaattatgggataatccgtgacatagttcacagccacattcttcaaacaatagctctatttgctatggaaccacctgtaagtcttgatggagaggatatccgagatgaaaaggtgaaggttctcagatcaattcggaaagtgaaccttgatgatgttgttcttggtcaacttaaagatatgtctggtaaagttgacagatacacaaaatccatgataccaacctattttgctgctgctatgtacattgacaatgcacgctgggatggggtaccattttttatcaggacaggcatgggacttatgacgaatagagcagaaattcgaattcagtttcgccatgtccctggtaatatctaccgtgaacgctttggccatgacatagatctcgacacaaacgagctggttctacgcgatcaacctgaagaagcaatcctgttgaaagtcaacaacaaggtcccagggcttgggctccagctggatgcttcagaactgaacctgctttaccgggataggtacaacaccgaggtaccagattcgtatgaacatcttctactggacgtgctagatggagatagtcatttattcatgcgcagcgacgaactggctgccgcatggaatgtgctcactccgataatccatgagatagatcagaacagagtagttcctgagctctacgaggctggggacagagggcctatcaatgcttaccatctcgctgctaaacatggggtgcgatgggatgacgactggtgagtcgatacatggcaaagattctcgatgcgcaacgagattcattaccaatttttgtcgttgtatcgcagtcagatgtacaatatgccttctgtaatcggcctgatcaaggactttcaaggagacatgcctttcaaggagatatgcaaacatggtttctttcctgtcctgtagactgtagcactgttgattcaagttggaaaaagaaaaaaaggagaaaagaaaatatgcttgcgacaagccgaggccccatgtcttgtgcgtttagcatctcgtttgccacaagtatggcagtgtttggaaaatggcaatgaaaagatggcggcaatcggatcatac

SEQ ID NO: 84055 - DNA, 4608 bp, Zea Mays
acgtgctctgctgctgcagcctgcagcggctttccttcccccaccatcgcgtgtgagtccacggtgtgatgtcacggagcggtggcggctttcccgatccactgtgcgggagaaatccccgtgcagccttcttccagctcttcctactctttgctactcgtcttcgctgatttctgccttaattccatcccttccctgcctagaacttgctttgcttcaccccatcacagcttttggtgcctcgtcatcggcgacctaaccgccggcgaccagataaactaagccaggcccttcgctccgaaagtcgtctctcgtagagagcacttgctcacctgctcctcgccctcctctgctggcagtggacttgcgcggagtggagatccatccggacctggttcgatttcttcatctcggttgcttctctgtccagtgggtggatcactggattgtgggttgtgctaactgcaggctggcttgtcagcctatcataaggaaagtgaaaaagagacaacaaagcaatttgttgtctcattcttaggagctggcgagcactcggcatggcagatgctagttcgaggactgacacctcgactgttgtagacatggatgataagaatcaaaggttagaaaacggacagagtggagccatggtcccggcttctaattcatctgaccggtctgacagatctgacaaacctatggaccagaaggttttacgacggcttgcccaaaatcgtgaggcagcaagaaaaagccggctgaggaaaaaggcatatgtgcaacagctagagagcagtaagctaaaacttgcaagcctggagcaagaactccagaaagctcgacagcagggaatcttcatttctagttctggagatcaaactcatactatgagtggaaatggagctatgaccttcgatttagaatattctcgatggcaagaggaacaaaataagcagataaatgagctgaggactgcagtaaatgctcatgcatgtggaaaacatctgctgaaagctccttgtgaatcagcttgagcctctaactgagcagcaattgatggggctgtccaatctgcagcaatcttctcagcaggctgaggatgcattgtcacaaggaatggaagcattgcagcagtccttggcagaaacgctggctgggtcccttggtccatcaggatcttctggaaacgtggcaaactatatgggtcaaatggctatggccatgggaaaacttggcacactcgagaatttccttcgccaggctgacaatctacgacagcagaccttacatcagatgcaacgtatcctgacaatccgacaagctgctcgtgcgcttcttgcaatccatgactacttttcacgtttgcgcgcactgagttctctttggcttgctaggccacgagagtaacatcacccccgttggggtcactcgatgaactgatctgtgaatgtgggactgctggctgcaaactcgcaaagcatttgcagatgactggaggatcagtcctctctgtacaagttgtattaacatcttctggtctcatattgtgctccagtgttgtacaatttagggaaaagcttggattaacttgtaagttatcatgaatttgttattggcatattgtacaattgtattagcaataaaaatagaagtacataagtgctggaagcctggaaggatatccagaatctatattggttggaaacgagcagcagaagattgttatagattgttatgttgctttgaatattcggttgtaagtgccttttttggggtatatagaacaaagaaagattcaggagagatgtagggattcaccagaggctatcggggattgtgcttctaggagctccctggactatctctagcaagtctcatattaagctctactctgtaaacagtgatacattgaattgaacgtgctacggttatgatggtaacatttgctatgcattttttaggatgaattctgtgacattaaaatttagtacacattttgactgaggattctgtaaacatttctttcacaagttatctaggcaaaattcgaactttttctaacgcatcgaagaagtgcatatgctttcgattcctggggaattccggtattttccatcaaattctggtaaagcatcctgggctcctggcggttagccaagaattccatcaattgctctatacacgacgtcgtcgacgtgtaatgtaaagctacagcggttcaacttcgacggcggccccagcctcgctacactgtcgctatccattttccccgtcacgagctgccatgagcaattaagtcttcttcacttcctggttcccagtattggtcgaggcgatctgacggagggagcagccaagtcagcaagtaccgcagcaccaagcagtcgaacagcgccgaagatgccagggctcgccgcgtcggcgtccgcagctccggcgccgttctcgttggcgacctcgcgcttaaccccggttgcaagacctgctccaagtttcagaacgcaagcttgtggattgaggtgctggattgctgcaaagctgaaactccgcaaggcattgaaaaggcatcacggatggcaacttcaaagaaatctagatgctcgagggaatgataacgttccagattgcttggaggctgcatctctgactgaaaagagaagtcattggaacatgcatcttgcttatgattctggaggtgaaatggccaacacaagctctgatactttggatagttcaactgttcaggaaaaaccagtggttccgggacacatcatctctgaaatcagttctcatgttcaaaaggaagagtctgctgtgtccaaaagacgctctaacaatgaaccatctctttgcattgctgtaattggagctactggtgagctggcaagaactaaagtttttccagcattatttgctctgtattacagtggttttcttcctcggaatgttggtatatttgggtattctaggaagaaattgacagatgagggcttaagatctataattgaagccaatttgacctgccgggtggatcaccatgaaaattgtgatgacaagctaattgagttcctcaaaaagacgtattatgtagatgccggacatgacaaccaagaagggatggttagattaaattctaggatgtcacaaatagagggcattggtgctgcaaacagaatattctaccttgctgttccacaagaggcactccttgatgtagcattgccactggctgacggtgcccaaactaagcaaggctggaatagaataattatcgagaaaccatttggctttactggtttgtcctcactgcgggtaacacaatctatgctgtcaaggtttgaggagaagcaaatttacaggattgaccaccttctggggaaggatctgatcgaaaatcttactgtcttgagattttctaacttggtgtttgaacctttgtggagtcgaacttacatacggaatgtgcaggtcattttttctgaagaaacatcaaatgaaatacaagggaggtactttggaaattatgggataatccgtgacatagttcacagccacattcttcaaacaatagctctatttgctatggaaccacctgtaagtcttgatggagaggatatccgagatgaaaaggtgaaggttctcagatcaattcggaaagtgaaccttgatgatgttgttcttggtcaacttaaagatatgtctggtaaagttgacagatacacaaaatccatgataccaacctattttgctgctgctatgtacattgacaatgcacgctgggatggggtaccattttttatcaggacaggcatgggacttatgacgaatagagcagaaattcgaattcagtttcgccatgtccctggtaatatctaccgtgaacgctttggccatgacatagatctcgacacaaacgagctggttctacgcgatcaacctgaagaagcaatcctgttgaaagtcaacaacaaggtcccagggcttgggctccagctggatgcttcagaactgaacctgctttaccgggataggtacaacaccgaggtaccagattcgtatgaacatcttctactggacgtgctagatggagatagtcatttattcatgcgcagcgacgaactggctgccgcatggaatgtgctcactccgataatccatgagatagatcagaacagagtagttcctgagctctacgaggctggggacagagggcctatcaatgcttaccatctcgctgctaaacatggggtgcgatgggatgacgactggtgagtcgatacatggcaaagattctcgatgcgcaacgagattcattaccaatttttgtcgttgtatcgcagtcagatgtacaatatgccttctgtaatcggcctgatcaaggactttcaaggagacatgcctttcaaggagatatgcaaacatggtttctttcctgtcctgtagactgtagcactgttgattcaagttggaaaaagaaaaaaaggagaaaagaaaatatgcttgcgacaagccgaggccccatgtcttgtgcgtttagcatctcgtttgccacaagtatggcagtgtttggaaaatggcaatgaaaagatggcggcaatcggatcatac

SEQ ID NO: 84056 - DNA, 4795 bp, Zea Mays
acgtgctctgctgctgcagcctgcagcggctttccttcccccaccatcgcgtgtgagtccacggtgtgatgtcacggagcggtggcggctttcccgatccactgtgcgggagaaatccccgtgcagccttcttccagctcttcctactctttgctactcgtcttcgctgatttctgccttaattccatcccttccctgcctagaacttgctttgcttcaccccatcacagcttttggtgcctcgtcatcggcgacctaaccgccggcgaccagataaactaagccaggcccttcgctccgaaagtcgtctctcgtagagagcacttgctcacctgctcctcgccctcctctgctggcagtggacttgcgcggagtggagatccatccggacctggttcgatttcttcatctcggttgcttctctgtccagtgggtggatcactggattgtgggttgtgctaactgcaggctggcttgtcagcctatcataaggaaagtgaaaaagagacaacaaagcaatttgttgtctcattcttaggagctggcgagcactcggcatggcagatgctagttcgaggactgacacctcgactgttgtagacatggatgataagaatcaaaggattattttacgaaatttcaacttctctctgtgggacatctaatggtacaggtcttggagagatgcatgtaaagtgttagaaaacggacagagtggagccatggtcccggcttctaattcatctgaccggtctgacagatctgacaaacctatggaccagaaggttttacgacggcttgcccaaaatcgtgaggcagcaagaaaaagccggctgaggaaaaaggcatatgtgcaacagctagagagcagtaagctaaaacttgcaagcctggagcaagaactccagaaagctcgacagcagggaatcttcatttctagttctggagatcaaactcatactatgagtggaaatggagctatgaccttcgatttagaatattctcgatggcaagaggaacaaaataagcagataaatgagctgaggactgcagtaaatgctcatgcaagtgatagtgacctccgtcttatagtcgatgggataatggcacattatgacgagatattcaggctgaagggcattgctgcaaaggctgatgtgttccatatactttcaggcatgtggaaaacatctgctgaaagctccttgtgaatcagcttgagcctctaactgagcagcaattgatggggctgtccaatctgcagcaatcttctcagcaggctgaggatgcattgtcacaaggaatggaagcattgcagcagtccttggcagaaacgctggctgggtcccttggtccatcaggatcttctggaaacgtggcaaactatatgggtcaaatggctatggccatgggaaaacttggcacactcgagaatttccttcgccaggctgacaatctacgacagcagaccttacatcagatgcaacgtatcctgacaatccgacaagctgctcgtgcgcttcttgcaatccatgactacttttcacgtttgcgcgcactgagttctctttggcttgctaggccacgagagtaacatcacccccgttggggtcactcgatgaactgatctgtgaatgtgggactgctggctgcaaactcgcaaagcatttgcagatgactggaggatcagtcctctctgtacaagttgtattaacatcttctggtctcatattgtgctccagtgttgtacaatttagggaaaagcttggattaacttgtaagttatcatgaatttgttattggcatattgtacaattgtattagcaataaaaatagaagtacataagtgctggaagcctggaaggatatccagaatctatattggttggaaacgagcagcagaagattgttatagattgttatgttgctttgaatattcggttgtaagtgccttttttggggtatatagaacaaagaaagattcaggagagatgtagggattcaccagaggctatcggggattgtgcttctaggagctccctggactatctctagcaagtctcatattaagctctactctgtaaacagtgatacattgaattgaacgtgctacggttatgatggtaacatttgctatgcattttttaggatgaattctgtgacattaaaatttagtacacattttgactgaggattctgtaaacatttctttcacaagttatctaggcaaaattcgaactttttctaacgcatcgaagaagtgcatatgctttcgattcctggggaattccggtattttccatcaaattctggtaaagcatcctgggctcctggcggttagccaagaattccatcaattgctctatacacgacgtcgtcgacgtgtaatgtaaagctacagcggttcaacttcgacggcggccccagcctcgctacactgtcgctatccattttccccgtcacgagctgccatgagcaattaagtcttcttcacttcctggttcccagtattggtcgaggcgatctgacggagggagcagccaagtcagcaagtaccgcagcaccaagcagtcgaacagcgccgaagatgccagggctcgccgcgtcggcgtccgcagctccggcgccgttctcgttggcgacctcgcgcttaaccccggttgcaagacctgctccaagtttcagaacgcaagcttgtggattgaggtgctggattgctgcaaagctgaaactccgcaaggcattgaaaaggcatcacggatggcaacttcaaagaaatctagatgctcgagggaatgataacgttccagattgcttggaggctgcatctctgactgaaaagagaagtcattggaacatgcatcttgcttatgattctggaggtgaaatggccaacacaagctctgatactttggatagttcaactgttcaggaaaaaccagtggttccgggacacatcatctctgaaatcagttctcatgttcaaaaggaagagtctgctgtgtccaaaagacgctctaacaatgaaccatctctttgcattgctgtaattggagctactggtgagctggcaagaactaaagtttttccagcattatttgctctgtattacagtggttttcttcctcggaatgttggtatatttgggtattctaggaagaaattgacagatgagggcttaagatctataattgaagccaatttgacctgccgggtggatcaccatgaaaattgtgatgacaagctaattgagttcctcaaaaagacgtattatgtagatgccggacatgacaaccaagaagggatggttagattaaattctaggatgtcacaaatagagggcattggtgctgcaaacagaatattctaccttgctgttccacaagaggcactccttgatgtagcattgccactggctgacggtgcccaaactaagcaaggctggaatagaataattatcgagaaaccatttggctttactggtttgtcctcactgcgggtaacacaatctatgctgtcaaggtttgaggagaagcaaatttacaggattgaccaccttctggggaaggatctgatcgaaaatcttactgtcttgagattttctaacttggtgtttgaacctttgtggagtcgaacttacatacggaatgtgcaggtcattttttctgaagaaacatcaaatgaaatacaagggaggtactttggaaattatgggataatccgtgacatagttcacagccacattcttcaaacaatagctctatttgctatggaaccacctgtaagtcttgatggagaggatatccgagatgaaaaggtgaaggttctcagatcaattcggaaagtgaaccttgatgatgttgttcttggtcaacttaaagatatgtctggtaaagttgacagatacacaaaatccatgataccaacctattttgctgctgctatgtacattgacaatgcacgctgggatggggtaccattttttatcaggacaggcatgggacttatgacgaatagagcagaaattcgaattcagtttcgccatgtccctggtaatatctaccgtgaacgctttggccatgacatagatctcgacacaaacgagctggttctacgcgatcaacctgaagaagcaatcctgttgaaagtcaacaacaaggtcccagggcttgggctccagctggatgcttcagaactgaacctgctttaccgggataggtacaacaccgaggtaccagattcgtatgaacatcttctactggacgtgctagatggagatagtcatttattcatgcgcagcgacgaactggctgccgcatggaatgtgctcactccgataatccatgagatagatcagaacagagtagttcctgagctctacgaggctggggacagagggcctatcaatgcttaccatctcgctgctaaacatggggtgcgatgggatgacgactggtgagtcgatacatggcaaagattctcgatgcgcaacgagattcattaccaatttttgtcgttgtatcgcagtcagatgtacaatatgccttctgtaatcggcctgatcaaggactttcaaggagacatgcctttcaaggagatatgcaaacatggtttctttcctgtcctgtagactgtagcactgttgattcaagttggaaaaagaaaaaaaggagaaaagaaaatatgcttgcgacaagccgaggccccatgtcttgtgcgtttagcatctcgtttgccacaagtatggcagtgtttggaaaatggcaatgaaaagatggcggcaatcggatcatac

SEQ ID NO: 84057 - DNA, 4695 bp, Zea Mays
acgtgctctgctgctgcagcctgcagcggctttccttcccccaccatcgcgtgtgagtccacggtgtgatgtcacggagcggtggcggctttcccgatccactgtgcgggagaaatccccgtgcagccttcttccagctcttcctactctttgctactcgtcttcgctgatttctgccttaattccatcccttccctgcctagaacttgctttgcttcaccccatcacagcttttggtgcctcgtcatcggcgacctaaccgccggcgaccagataaactaagccaggcccttcgctccgaaagtcgtctctcgtagagagcacttgctcacctgctcctcgccctcctctgctggcagtggacttgcgcggagtggagatccatccggacctggttcgatttcttcatctcggttgcttctctgtccagtgggtggatcactggattgtgggttgtgctaactgcaggctggcttgtcagcctatcataaggaaagtgaaaaagagacaacaaagcaatttgttgtctcattcttaggagctggcgagcactcggcatggcagatgctagttcgaggactgacacctcgactgttgtagacatggatgataagaatcaaaggttagaaaacggacagagtggagccatggtcccggcttctaattcatctgaccggtctgacagatctgacaaacctatggaccagaaggttttacgacggcttgcccaaaatcgtgaggcagcaagaaaaagccggctgaggaaaaaggcatatgtgcaacagctagagagcagtaagctaaaacttgcaagcctggagcaagaactccagaaagctcgacagcagggaatcttcatttctagttctggagatcaaactcatactatgagtggaaatggagctatgaccttcgatttagaatattctcgatggcaagaggaacaaaataagcagataaatgagctgaggactgcagtaaatgctcatgcaagtgatagtgacctccgtcttatagtcgatgggataatggcacattatgacgagatattcaggctgaagggcattgctgcaaaggctgatgtgttccatatactttcagctccttgtgaatcagcttgagcctctaactgagcagcaattgatggggctgtccaatctgcagcaatcttctcagcaggctgaggatgcattgtcacaaggaatggaagcattgcagcagtccttggcagaaacgctggctgggtcccttggtccatcaggatcttctggaaacgtggcaaactatatgggtcaaatggctatggccatgggaaaacttggcacactcgagaatttccttcgccaggctgacaatctacgacagcagaccttacatcagatgcaacgtatcctgacaatccgacaagctgctcgtgcgcttcttgcaatccatgactacttttcacgtttgcgcgcactgagttctctttggcttgctaggccacgagagtaacatcacccccgttggggtcactcgatgaactgatctgtgaatgtgggactgctggctgcaaactcgcaaagcatttgcagatgactggaggatcagtcctctctgtacaagttgtattaacatcttctggtctcatattgtgctccagtgttgtacaatttagggaaaagcttggattaacttgtaagttatcatgaatttgttattggcatattgtacaattgtattagcaataaaaatagaagtacataagtgctggaagcctggaaggatatccagaatctatattggttggaaacgagcagcagaagattgttatagattgttatgttgctttgaatattcggttgtaagtgccttttttggggtatatagaacaaagaaagattcaggagagatgtagggattcaccagaggctatcggggattgtgcttctaggagctccctggactatctctagcaagtctcatattaagctctactctgtaaacagtgatacattgaattgaacgtgctacggttatgatggtaacatttgctatgcattttttaggatgaattctgtgacattaaaatttagtacacattttgactgaggattctgtaaacatttctttcacaagttatctaggcaaaattcgaactttttctaacgcatcgaagaagtgcatatgctttcgattcctggggaattccggtattttccatcaaattctggtaaagcatcctgggctcctggcggttagccaagaattccatcaattgctctatacacgacgtcgtcgacgtgtaatgtaaagctacagcggttcaacttcgacggcggccccagcctcgctacactgtcgctatccattttccccgtcacgagctgccatgagcaattaagtcttcttcacttcctggttcccagtattggtcgaggcgatctgacggagggagcagccaagtcagcaagtaccgcagcaccaagcagtcgaacagcgccgaagatgccagggctcgccgcgtcggcgtccgcagctccggcgccgttctcgttggcgacctcgcgcttaaccccggttgcaagacctgctccaagtttcagaacgcaagcttgtggattgaggtgctggattgctgcaaagctgaaactccgcaaggcattgaaaaggcatcacggatggcaacttcaaagaaatctagatgctcgagggaatgataacgttccagattgcttggaggctgcatctctgactgaaaagagaagtcattggaacatgcatcttgcttatgattctggaggtgaaatggccaacacaagctctgatactttggatagttcaactgttcaggaaaaaccagtggttccgggacacatcatctctgaaatcagttctcatgttcaaaaggaagagtctgctgtgtccaaaagacgctctaacaatgaaccatctctttgcattgctgtaattggagctactggtgagctggcaagaactaaagtttttccagcattatttgctctgtattacagtggttttcttcctcggaatgttggtatatttgggtattctaggaagaaattgacagatgagggcttaagatctataattgaagccaatttgacctgccgggtggatcaccatgaaaattgtgatgacaagctaattgagttcctcaaaaagacgtattatgtagatgccggacatgacaaccaagaagggatggttagattaaattctaggatgtcacaaatagagggcattggtgctgcaaacagaatattctaccttgctgttccacaagaggcactccttgatgtagcattgccactggctgacggtgcccaaactaagcaaggctggaatagaataattatcgagaaaccatttggctttactggtttgtcctcactgcgggtaacacaatctatgctgtcaaggtttgaggagaagcaaatttacaggattgaccaccttctggggaaggatctgatcgaaaatcttactgtcttgagattttctaacttggtgtttgaacctttgtggagtcgaacttacatacggaatgtgcaggtcattttttctgaagaaacatcaaatgaaatacaagggaggtactttggaaattatgggataatccgtgacatagttcacagccacattcttcaaacaatagctctatttgctatggaaccacctgtaagtcttgatggagaggatatccgagatgaaaaggtgaaggttctcagatcaattcggaaagtgaaccttgatgatgttgttcttggtcaacttaaagatatgtctggtaaagttgacagatacacaaaatccatgataccaacctattttgctgctgctatgtacattgacaatgcacgctgggatggggtaccattttttatcaggacaggcatgggacttatgacgaatagagcagaaattcgaattcagtttcgccatgtccctggtaatatctaccgtgaacgctttggccatgacatagatctcgacacaaacgagctggttctacgcgatcaacctgaagaagcaatcctgttgaaagtcaacaacaaggtcccagggcttgggctccagctggatgcttcagaactgaacctgctttaccgggataggtacaacaccgaggtaccagattcgtatgaacatcttctactggacgtgctagatggagatagtcatttattcatgcgcagcgacgaactggctgccgcatggaatgtgctcactccgataatccatgagatagatcagaacagagtagttcctgagctctacgaggctggggacagagggcctatcaatgcttaccatctcgctgctaaacatggggtgcgatgggatgacgactggtgagtcgatacatggcaaagattctcgatgcgcaacgagattcattaccaatttttgtcgttgtatcgcagtcagatgtacaatatgccttctgtaatcggcctgatcaaggactttcaaggagacatgcctttcaaggagatatgcaaacatggtttctttcctgtcctgtagactgtagcactgttgattcaagttggaaaaagaaaaaaaggagaaaagaaaatatgcttgcgacaagccgaggccccatgtcttgtgcgtttagcatctcgtttgccacaagtatggcagtgtttggaaaatggcaatgaaaagatggcggcaatcggatcatac

SEQ ID NO: 84058 - DNA, 2064 bp, Zea Mays
gctgctgcagcctgcagcggctttccttcccccaccatcgcgtgtgagtccacggtgtgatgtcacggagcggtggcggctttcccgatccactgtgcgggagaaatccccgtgcagccttcttccagctcttcctactctttgctactcgtcttcgctgatttctgccttaattccatcccttccctgcctagaacttgctttgcttcaccccatcacagcttttggtgcctcgtcatcggcgacctaaccgccggcgaccagataaactaagccaggcccttcgctccgaaagtcgtctctcgtagagagcacttgctcacctgctcctcgccctcctctgctggcagtggacttgcgcggagtggagatccatccggacctggttcgatttcttcatctcggttgcttctctgtccagtgggtggatcactggattgtgggttgtgctaactgcaggctggcttgtcagcctatcataaggaaagtgaaaaagagacaacaaagcaatttgttgtctcattcttaggagctggcgagcactcggcatggcagatgctagttcgaggactgacacctcgactgttgtagacatggatgataagaatcaaaggattattttacgaaatttcaacttctctctgtgggacatctaatggtacaggtcttggagagatgcatttagaaaacggacagagtggagccatggtcccggcttctaattcatctgaccggtctgacagatctgacaaacctatggaccagaaggttttacgacggcttgcccaaaatcgtgaggcagcaagaaaaagccggctgaggaaaaaggcatatgtgcaacagctagagagcagtaagctaaaacttgcaagcctggagcaagaactccagaaagctcgacagcagggaatcttcatttctagttctggagatcaaactcatactatgagtggaaatggagctatgaccttcgatttagaatattctcgatggcaagaggaacaaaataagcagataaatgagctgaggactgcagtaaatgctcatgcaagtgatagtgacctccgtcttatagtcgatgggataatggcacattatgacgagatattcaggctgaagggcattgctgcaaaggctgatgtgttccatatactttcagctccttgtgaatcagcttgagcctctaactgagcagcaattgatggggctgtccaatctgcagcaatcttctcagcaggctgaggatgcattgtcacaaggaatggaagcattgcagcagtccttggcagaaacgctggctgggtcccttggtccatcaggatcttctggaaacgtggcaaactatatgggtcaaatggctatggccatgggaaaacttggcacactcgagaatttccttcgccaggctgacaatctacgacagcagaccttacatcagatgcaacgtatcctgacaatccgacaagctgctcgtgcgcttcttgcaatccatgactacttttcacgtttgcgcgcactgagttctctttggcttgctaggccacgagagtaacatcacccccgttggggtcactcgatgaactgatctgtgaatgtgggactgctggctgcaaactcgcaaagcatttgcagatgactggaggatcagtcctctctgtacaagttgtattaacatcttctggtctcatattgtgctccagtgttgtacaatttagggaaaagcttggattaacttgtaagttatcatgaatttgttattggcatattgtacaattgtattagcaataaaaatagaagtacataagtgctggaagcctggaaggatatccagaatctatattggttggaaacgagcagcagaagattgttatagattgttatgttgctttgaatattcggttgtaagtgccttttttggggtatatagaacaaagaaagattcaggagagatgtagggattcaccagaggctatcggggattgtgcttctaggagctccctggactatctctagcaagtctcatattaagctctactctgtaaacagtgatacattgaattgaac

SEQ ID NO: 84059 - DNA, 2014 bp, Zea Mays
acgtgctctgctgctgcagcctgcagcggctttccttcccccaccatcgcgtgtgagtccacggtgtgatgtcacggagcggtggcggctttcccgatccactgtgcgggagaaatccccgtgcagccttcttccagctcttcctactctttgctactcgtcttcgctgatttctgccttaattccatcccttccctgcctagaacttgctttgcttcaccccatcacagcttttggtgcctcgtcatcggcgacctaaccgccggcgaccagataaactaagccaggcccttcgctccgaaagtcgtctctcgtagagagcacttgctcacctgctcctcgccctcctctgctggcagtggacttgcgcggagtggagatccatccggacctggttcgatttcttcatctcggttgcttctctgtccagtgggtggatcactggattgtgggttgtgctaactgcaggctggcttgtcagcctatcataaggaaagtgaaaaagagacaacaaagcaatttgttgtctcattcttaggagctggcgagcactcggcatggcagatgctagttcgaggactgacacctcgactgttgtagacatggatgataagaatcaaaggttagaaaacggacagagtggagccatggtcccggcttctaattcatctgaccggtctgacagatctgacaaacctatggaccagaaggttttacgacggcttgcccaaaatcgtgaggcagcaagaaaaagccggctgaggaaaaaggcatatgtgcaacagctagagagcagtaagctaaaacttgcaagcctggagcaagaactccagaaagctcgacagcagggaatcttcatttctagttctggagatcaaactcatactatgagtggaaatggagctatgaccttcgatttagaatattctcgatggcaagaggaacaaaataagcagataaatgagctgaggactgcagtaaatgctcatgcaagtgatagtgacctccgtcttatagtcgatgggataatggcacattatgacgagatattcaggctgaagggcattgctgcaaaggctgatgtgttccatatactttcaggcatgtggaaaacatctgctgaaaggtgcttcttgtggcttgggggtttccgttcgtctgagcttctaaagcaatcttctcagcaggctgaggatgcattgtcacaaggaatggaagcattgcagcagtccttggcagaaacgctggctgggtcccttggtccatcaggatcttctggaaacgtggcaaactatatgggtcaaatggctatggccatgggaaaacttggcacactcgagaatttccttcgccaggctgacaatctacgacagcagaccttacatcagatgcaacgtatcctgacaatccgacaagctgctcgtgcgcttcttgcaatccatgactacttttcacgtttgcgcgcactgagttctctttggcttgctaggccacgagagtaacatcacccccgttggggtcactcgatgaactgatctgtgaatgtgggactgctggctgcaaactcgcaaagcatttgcagatgactggaggatcagtcctctctgtacaagttgtattaacatcttctggtctcatattgtgctccagtgttgtacaatttagggaaaagcttggattaacttgtaagttatcatgaatttgttattggcatattgtacaattgtattagcaataaaaatagaagtacataagtgctggaagcctggaaggatatccagaatctatattggttggaaacgagcagcagaagattgttatagattgttatgttgctttgaatattcggttgtaagtgccttttttggggtatatagaacaaagaaagattcaggagagatgtagggattcaccagaggctatcggggattgtgcttctaggagctccctggactatctctagcaagtctcatattaagctctactctgtaaacagtgatacattgaattgaac

SEQ ID NO: 84060 - DNA, 1797 bp, Zea Mays
gacgtgctctgctgctgcagcctgcagcggctttccttcccccaccatcgcgtgtgagtccacggtgtgatgtcacggagcggtggcggctttcccgatccactgtgcgggagaaatccccgtgcagccttcttccagctcttcctactctttgctactcgtcttcgctgatttctgccttaattccatcccttccctgcctagaacttgctttgcttcaccccatcacagcttttggtgcctcgtcatcggcgacctaaccgccggcgaccagataaactaagccaggcccttcgctccgaaagtcgtctctcgtagagagcacttgctcacctgctcctcgccctcctctgctggcagtggacttgcgcggagtggagatccatccggacctggttcgatttcttcatctcgttagaaaacggacagagtggagccatggtcccggcttctaattcatctgaccggtctgacagatctgacaaacctatggaccagaaggttttacgacggcttgcccaaaatcgtgaggcagcaagaaaaagccggctgaggaaaaaggcatatgtgcaacagctagagagcagtaagctaaaacttgcaagcctggagcaagaactccagaaagctcgacagcagggaatcttcatttctagttctggagatcaaactcatactatgagtggaaatggagctatgaccttcgatttagaatattctcgatggcaagaggaacaaaataagcagataaatgagctgaggactgcagtaaatgctcatgcaagtgatagtgacctccgtcttatagtcgatgggataatggcacattatgacgagatattcaggctgaagggcattgctgcaaaggctgatgtgttccatatactttcagctccttgtgaatcagcttgagcctctaactgagcagcaattgatggggctgtccaatctgcagcaatcttctcagcaggctgaggatgcattgtcacaaggaatggaagcattgcagcagtccttggcagaaacgctggctgggtcccttggtccatcaggatcttctggaaacgtggcaaactatatgggtcaaatggctatggccatgggaaaacttggcacactcgagaatttccttcgccaggctgacaatctacgacagcagaccttacatcagatgcaacgtatcctgacaatccgacaagctgctcgtgcgcttcttgcaatccatgactacttttcacgtttgcgcgcactgagttctctttggcttgctaggccacgagagtaacatcacccccgttggggtcactcgatgaactgatctgtgaatgtgggactgctggctgcaaactcgcaaagcatttgcagatgactggaggatcagtcctctctgtacaagttgtattaacatcttctggtctcatattgtgctccagtgttgtacaatttagggaaaagcttggattaacttgtaagttatcatgaatttgttattggcatattgtacaattgtattagcaataaaaatagaagtacataagtgctggaagcctggaaggatatccagaatctatattggttggaaacgagcagcagaagattgttatagattgttatgttgctttgaatattcggttgtaagtgccttttttggggtatatagaacaaagaaagattcaggagagatgtagggattcaccagaggctatcggggattgtgcttctaggagctccctggactatctctagcaagtctcatattaagctctactctgtaaacagtgatacattgaattgaac

SEQ ID NO: 84061 - DNA, 1026 bp, Zea Mays
gtagctactgctattactatcttttgggtgaagtgaatcagatttttgtttaaatgaactttgtaccgtttaaattactgatgcatagttttgcaaacttaaacaatatgtatcttggatttaaatgaactttgtactgcagttttaacagacatattttggcacctggtaatgcagtttctgttttactaatagcaactcctattagtatatgaatcagtgaccaaaacatgtgatttgagcaactaatgtgatgattatagttgttgtctgcagatttccccatgttaaactaatttgcagaaaacaactatatgatacctattgtttttattgttatgatttcttcttatttgttgtccaattacaaatagaaattgtgcaggatcgaaaggaacttcaacctgaaccagcgagagtatcgatacaaagactgtttgaaatcttctagaaatgacatcgaatggaacttcaagctgaacaagcgaaagcatctatacaaagactgtctgaaatcttctagaaacgacatcgaaaggaacttcaagctgaacaagcgaaagcatctatacaaagactgtctgaaatcttctagtttactgataacaactgctcagaaaaacctaaaccctatcgggaatggagacgctctcggcgaagcaggagggcacagtggacgtgaagctgaagccgacttctaaccaatccaactcgtaggcgggcgggaagcggatgtgccaactagaagagtggtctctctcggcgcttgcttgacaaacgtgtgttattaaccgttgtatataatgttattaattaatgttctttattccctgatgcttctgttgtggctcacgttctcaactttgtatctgatgatgaaagaccagatgttttcttgcagttttcgaaaaagtcttctagagacaacttaattttgattaacaacacaacacatggccatatatacatgatattgttgcactattttttcggttgcaacacacatgtatctacctaggattcttt

SEQ ID NO: 84062 - DNA, 2279 bp, Zea Mays
tcgcggttctaccgctccgctcatgcccgcggccgaaccctcccccgcatcccacagccgccgacgctcaccttccatcctccccgcagcccgcagccgccaacgctcaccttccatccccgcggatcccacgctccctcgggcgctccttccgcgcccgcccacagatctcccatcgacgtcgatgctctgcgattaagcccagctaaactcgcgcggtttggctttggcgcagcgctggagctctcgagacgctcgcttggcgccgaagcggacgaggagcagttgtcggcgtccgctgccgtgtcctcagctccgccatctccttctccagctcgacgatcctctgcttcctgctcgtgaactccagcgcggcagcgtcgagctcggcgcacagccacccgttctcggcttccacccgctctgcggtgtccctgcacctctggagctcggtcttcttggccgcgagctcggcctccaggactgcgccaaagccaaactgctactgctacaactccgccgtgctctccatggaagcttctgcgcctagatcaacagcgttcggccgctggtgcccggcgctaagctccacgccgtcatcgagcgtggcacagtgattccgtcctcgacctccccttcctctgcaacatgtccaggaccgggaactagtagtgggaggatcaccgtccaccgtcgagcgtctgcaaggcaaatcagatcaaccaccacatcggagtgaaaagtctgcgccactctgcctcacacagccaaaaaatgtatcaggtgattaagaaccatcccagctcattgaagctttatgagcagaaactgctaggaacgagtgaagtcatgaaagaagatgtccagaggatccatgacaaggtgaaccgaatcttgaacgaagagtttgctaagagcaaagactacgttcccaacaagagggattggctctcagcttactggactggctttaagtcaccagagcaaatatcacgtgttcgcaacactggagtgaagcctaaaatactgaaacgtgtaggtcaggcaattactacactgcctgaaaacttcaaaccacatagagcagtgaagaagatttttgagctgcgtgcagctatgatagagagtgctcaaggaattgattgggctgttgccgaagccctggcctttgcaacacttatagtggaaggcaatcatgttaggctaagtggacaggatgtggaaagaggaactttcagccatcagcatgcagttctgcatgatcaggaaactggagcaaagtactgcccacttgaccatgttgcaatgaattaaaatgaggagctatttattgttagcaacagagactagttggagcttcattgttgatttttgcaaataagcaagacatgcaaggagctctaaaaccaactggaatcacgaaggattttacttagttcgatgtgggagcaaaaggatatgccaaattgaatgtagtttcatcaattatgctcaattatggatgttcagaggcatccaatttcagtgtgtactgcaatacttgggtccacctgtacttggtttaagaagcgctccgcggacttccacggccgcgccgccgatctcgtccacggcctccggggcacggcgatgcccaggagacaggccctcaaggaagagcagtgcagagaagagaaaggtatctcgactattccaaagcacaagtatgcatccaaagcctgttccccaaaaggatcgaaaggaacttcaacctgaaccagcgagagtatcgatacaaagactgtttgaaatcttctagaaatgacatcgaatggaacttcaagctgaacaagcgaaagcatctatacaaagactgtctgaaatcttctagaaaaacctaaaccctatcgggaatggagacgctctcggcgaagcaggagggcacagtggacgtgaagctgaagccgacttctaaccaatccaactcgtaggcgggcgggaagcggatgtgccaactagaagagtggtctctctcggcgcttgcttgacaaacgtgtgttattaaccgttgtatataatgttattaattaatgttctttattccctgatgcttctgttgtggctcacgttctcaactttgtatctgatgatgaaagaccagatgttttcttgcagttttcgaaaaagtcttctagagacaacttaattttgattaacaacacaacacatggccatatatacatgatattgttgcactattttttcggttgcaacacacatgtatctacctaggattcttt

SEQ ID NO: 84063 - DNA, 2478 bp, Zea Mays
tcgcggttctaccgctccgctcatgcccgcggccgaaccctcccccgcatcccacagccgccgacgctcaccttccatcctccccgcagcccgcagccgccaacgctcaccttccatccccgcggatcccacgctccctcgggcgctccttccgcgcccgcccacagatctcccatcgacgtcgatgctctgcgattaagcccagctaaactcgcgcggtttggctttggcgcagcgctggagctctcgagacgctcgcttggcgccgaagcggacgaggagcagttgtcggcgtccgctgccgtgtcctcagctccgccatctccttctccagctcgacgatcctctgcttcctgctcgtgaactccagcgcggcagcgtcgagctcggcgcacagccacccgttctcggcttccacccgctctgcggtgtccctgcacctctggagctcggtcttcttggccgcgagctcggcctccaggactgcgccaaagccaaactgctactgctacaactccgccgtgctctccatggaagcttctgcgcctagatcaacagcgttcggccgctggtgcccggcgctaagctccacgccgtcatcgagcgtggcacagtgattccgtcctcgacctccccttcctctgcaacatgtccaggaccgggaactagtagtgggaggatcaccgtccaccgtcgagcgtctgcaaggcaaatcagatcaaccaccacatcggagtgaaaagtctgcgccactctgcctcacacagccaaaaaatgtatcaggtgattaagaaccatcccagctcattgaagctttatgagcagaaactgctaggaacgagtgaagtcatgaaagaagatgtccagaggatccatgacaaggtgaaccgaatcttgaacgaagagtttgctaagagcaaagactacgttcccaacaagagggattggctctcagcttactggactggctttaagtcaccagagcaaatatcacgtgttcgcaacactggagtgaagcctaaaatactgaaacgtgtaggtcaggcaattactacactgcctgaaaacttcaaaccacatagagcagtgaagaagatttttgagctgcgtgcagctatgatagagagtgctcaaggaattgattgggctgttgccgaagccctggcctttgcaacacttatagtggaaggcaatcatgttaggctaagtggacaggatgtggaaagaggaactttcagccatcagcatgcagttctgcatgatcaggaaactggagcaaagtactgcccacttgaccatgttgcaatgaattaaaatgaggagctatttattgttagcaacagagactagttggagcttcattgttgatttttgcaaataagcaagacatgcaaggagctctaaaaccaactggaatcacgaaggtaagcgaacttcagtcatttattatatgcattagagacatgttttcctatctatgacatcatttttaacttgtactatgtttttccggtcctcatggttgccaagattttacttagttcgatgtgggagcaaaaggatatgccaaattgaatgtagtttcatcaattatgctcaattatggatgttcagaggcatccaatttcagtgtgtactgcaatacttgggtccacctgtacttggtttaagaagcgctccgcggacttccacggccgcgccgccgatctcgtccacggcctccggggcacggcgatgcccaggagacaggccctcaaggaagagcagtgcagagaagagaaaggtatctcgactattccaaagcacaagtatgcatccaaagcctgttccccaaaaggatcgaaaggaacttcaacctgaaccagcgagagtatcgatacaaagactgtttgaaatcttctagaaatgacatcgaatggaacttcaagctgaacaagcgaaagcatctatacaaagactgtctgaaatcttctagaaacgacatcgaaaggaacttcaagctgaacaagcgaaagcatctatacaaagactgtctgaaatcttctagtttactgataacaactgctcagaaaaacctaaaccctatcgggaatggagacgctctcggcgaagcaggagggcacagtggacgtgaagctgaagccgacttctaaccaatccaactcgtaggcgggcgggaagcggatgtgccaactagaagagtggtctctctcggcgcttgcttgacaaacgtgtgttattaaccgttgtatataatgttattaattaatgttctttattccctgatgcttctgttgtggctcacgttctcaactttgtatctgatgatgaaagaccagatgttttcttgcagttttcgaaaaagtcttctagagacaacttaattttgattaacaacacaacacatggccatatatacatgatattgttgcactattttttcggttgcaacacacatgtatctacctaggattcttt

SEQ ID NO: 84064 - DNA, 2238 bp, Zea Mays
tcgcggttctaccgctccgctcatgcccgcggccgaaccctcccccgcatcccacagccgccgacgctcaccttccatcctccccgcagcccgcagccgccaacgctcaccttccatccccgcggatcccacgctccctcgggcgctccttccgcgcccgcccacagatctcccatcgacgtcgatgctctgcgattaagcccagctaaactcgcgcggtttggctttggcgcagcgctggagctctcgagacgctcgcttggcgccgaagcggacgaggagcagttgtcggcgtccgctgccgtgtcctcagctccgccatctccttctccagctcgacgatcctctgcttcctgctcgtgaactccagcgcggcagcgtcgagctcggcgcacagccacccgttctcggcttccacccgctctgcggtgtccctgcacctctggagctcggtcttcttggccgcgagctcggcctccaggactgcgccaaagccaaactgctactgctacaactccgccgtgctctccatggaagcttctgcgcctagatcaacagcgttcggccgctggtgcccggcgctaagctccacgccgtcatcgagcgtggcacagtgattccgtcctcgacctccccttcctctgcaacatgtccaggaccgggaactagtagtgggaggatcaccgtccaccgtcgagcgtctgcaaggcaaatcagatcaaccaccacatcggagtgaaaagtctgcgccactctgcctcacacagccaaaaaatgtatcaggtgattaagaaccatcccagctcattgaagctttatgagcagaaactgctaggaacgagtgaagtcatgaaagaagatgtccagaggatccatgacaaggtgaaccgaatcttgaacgaagagtttgctaagagcaaagactacgttcccaacaagagggattggctctcagcttactggactggctttaagtcaccagagcaaatatcacgtgttcgcaacactggagtgaagcctaaaatactgaaacgtgtaggtcaggcaattactacactgcctgaaaacttcaaaccacatagagcagtgaagaagatttttgagctgcgtgcagctatgatagagagtgctcaaggaattgattgggctgttgccgaagccctggcctttgcaacacttatagtggaaggcaatcatgttaggctaagtggacaggatgtggaaagaggaactttcagccatcagcatgcagttctgcatgatcaggaaactggagcaaagtactgcccacttgaccatgttgcaatgaattaaaatgaggagctatttattgttagcaacagagactagttggagcttcattgttgatttttgcaaataagcaagacatgcaaggagctctaaaaccaactggaatcacgaaggtttaagaagcgctccgcggacttccacggccgcgccgccgatctcgtccacggcctccggggcacggcgatgcccaggagacaggccctcaaggaagagcagtgcagagaagagaaaggtatctcgactattccaaagcacaagtatgcatccaaagcctgttccccaaaaggatcgaaaggaacttcaacctgaaccagcgagagtatcgatacaaagactgtttgaaatcttctagaaatgacatcgaatggaacttcaagctgaacaagcgaaagcatctatacaaagactgtctgaaatcttctagaaacgacatcgaaaggaacttcaagctgaacaagcgaaagcatctatacaaagactgtctgaaatcttctagtttactgataacaactgctcagaaaaacctaaaccctatcgggaatggagacgctctcggcgaagcaggagggcacagtggacgtgaagctgaagccgacttctaaccaatccaactcgtaggcgggcgggaagcggatgtgccaactagaagagtggtctctctcggcgcttgcttgacaaacgtgtgttattaaccgttgtatataatgttattaattaatgttctttattccctgatgcttctgttgtggctcacgttctcaactttgtatctgatgatgaaagaccagatgttttcttgcagttttcgaaaaagtcttctagagacaacttaattttgattaacaacacaacacatggccatatatacatgatattgttgcactattttttcggttgcaacacacatgtatctacctaggattcttt

SEQ ID NO: 84065 - DNA, 2372 bp, Zea Mays
tcgcggttctaccgctccgctcatgcccgcggccgaaccctcccccgcatcccacagccgccgacgctcaccttccatcctccccgcagcccgcagccgccaacgctcaccttccatccccgcggatcccacgctccctcgggcgctccttccgcgcccgcccacagatctcccatcgacgtcgatgctctgcgattaagcccagctaaactcgcgcggtttggctttggcgcagcgctggagctctcgagacgctcgcttggcgccgaagcggacgaggagcagttgtcggcgtccgctgccgtgtcctcagctccgccatctccttctccagctcgacgatcctctgcttcctgctcgtgaactccagcgcggcagcgtcgagctcggcgcacagccacccgttctcggcttccacccgctctgcggtgtccctgcacctctggagctcggtcttcttggccgcgagctcggcctccaggactgcgccaaagccaaactgctactgctacaactccgccgtgctctccatggaagcttctgcgcctagatcaacagcgttcggccgctggtgcccggcgctaagctccacgccgtcatcgagcgtggcacagtgattccgtcctcgacctccccttcctctgcaacatgtccaggaccgggaactagtagtgggaggatcaccgtccaccgtcgagcgtctgcaaggcaaatcagatcaaccaccacatcggagtgaaaagtctgcgccactctgcctcacacagccaaaaaatgtatcaggtgattaagaaccatcccagctcattgaagctttatgagcagaaactgctaggaacgagtgaagtcatgaaagaagatgtccagaggatccatgacaaggtgaaccgaatcttgaacgaagagtttgctaagagcaaagactacgttcccaacaagagggattggctctcagcttactggactggctttaagtcaccagagcaaatatcacgtgttcgcaacactggagtgaagcctaaaatactgaaacgtgtaggtcaggcaattactacactgcctgaaaacttcaaaccacatagagcagtgaagaagatttttgagctgcgtgcagctatgatagagagtgctcaaggaattgattgggctgttgccgaagccctggcctttgcaacacttatagtggaaggcaatcatgttaggctaagtggacaggatgtggaaagaggaactttcagccatcagcatgcagttctgcatgatcaggaaactggagcaaagtactgcccacttgaccatgttgcaatgaattaaaatgaggagctatttattgttagcaacagagactagttggagcttcattgttgatttttgcaaataagcaagacatgcaaggagctctaaaaccaactggaatcacgaagttcgatgtgggagcaaaaggatatgccaaattgaatgtagtttcatcaattatgctcaattatggatgttcagaggcatccaatttcagtgtgtactgcaatacttgggtccacctgtacttggtttaagaagcgctccgcggacttccacggccgcgccgccgatctcgtccacggcctccggggcacggcgatgcccaggagacaggccctcaaggaagagcagtgcagagaagagaaaggtatctcgactattccaaagcacaagtatgcatccaaagcctgttccccaaaagaaattgtgcaggatcgaaaggaacttcaacctgaaccagcgagagtatcgatacaaagactgtttgaaatcttctagaaatgacatcgaatggaacttcaagctgaacaagcgaaagcatctatacaaagactgtctgaaatcttctagaaacgacatcgaaaggaacttcaagctgaacaagcgaaagcatctatacaaagactgtctgaaatcttctagtttactgataacaactgctcagaaaaacctaaaccctatcgggaatggagacgctctcggcgaagcaggagggcacagtggacgtgaagctgaagccgacttctaaccaatccaactcgtaggcgggcgggaagcggatgtgccaactagaagagtggtctctctcggcgcttgcttgacaaacgtgtgttattaaccgttgtatataatgttattaattaatgttctttattccctgatgcttctgttgtggctcacgttctcaactttgtatctgatgatgaaagaccagatgttttcttgcagttttcgaaaaagtcttctagagacaacttaattttgattaacaacacaacacatggccatatatacatgatattgttgcactattttttcggttgcaacacacatgtatctacctaggattcttt

SEQ ID NO: 84066 - DNA, 2327 bp, Zea Mays
tcgcggttctaccgctccgctcatgcccgcggccgaaccctcccccgcatcccacagccgccgacgctcaccttccatcctccccgcagcccgcagccgccaacgctcaccttccatccccgcggatcccacgctccctcgggcgctccttccgcgcccgcccacagatctcccatcgacgtcgatgctctgcgattaagcccagctaaactcgcgcggtttggctttggcgcagcgctggagctctcgagacgctcgcttggcgccgaagcggacgaggagcagttgtcggcgtccgctgccgtgtcctcagctccgccatctccttctccagctcgacgatcctctgcttcctgctcgtgaactccagcgcggcagcgtcgagctcggcgcacagccacccgttctcggcttccacccgctctgcggtgtccctgcacctctggagctcggtcttcttggccgcgagctcggcctccaggactgcgccaaagccaaactgctactgctacaactccgccgtgctctccatggaagcttctgcgcctagatcaacagcgttcggccgctggtgcccggcgctaagctccacgccgtcatcgagcgtggcacagtgattccgtcctcgacctccccttcctctgcaacatgtccaggaccgggaactagtagtgggaggatcaccgtccaccgtcgagcgtctgcaaggcaaatcagatcaaccaccacatcggagtgaaaagtctgcgccactctgcctcacacagccaaaaaatgtatcaggtgattaagaaccatcccagctcattgaagctttatgagcagaaactgctaggaacgagtgaagtcatgaaagaagatgtccagaggatccatgacaaggtgaaccgaatcttgaacgaagagtttgctaagagcaaagactacgttcccaacaagagggattggctctcagcttactggactggctttaagtcaccagagcaaatatcacgtgttcgcaacactggagtgaagcctaaaatactgaaacgtgtaggtcaggcaattactacactgcctgaaaacttcaaaccacatagagcagtgaagaagatttttgagctgcgtgcagctatgatagagagtgctcaaggaattgattgggctgttgccgaagccctggcctttgcaacacttatagtggaaggcaatcatgttaggctaagtggacaggatgtggaaagaggaactttcagccatcagcatgcagttctgcatgatcaggaaactggagcaaagataaagagactagttggagcttcattgttgatttttgcaaataagcaagacatgcaaggagctctaaaaccaactggaatcacgaagattttacttagttcgatgtgggagcaaaaggatatgccaaattgaatgtagtttcatcaattatgctcaattatggatgttcagaggcatccaatttcagtgtgtactgcaatacttgggtccacctgtacttggtttaagaagcgctccgcggacttccacggccgcgccgccgatctcgtccacggcctccggggcacggcgatgcccaggagacaggccctcaaggaagagcagtgcagagaagagaaaggtatctcgactattccaaagcacaagtatgcatccaaagcctgttccccaaaagaaattgtgcaggatcgaaaggaacttcaacctgaaccagcgagagtatcgatacaaagactgtttgaaatcttctagaaatgacatcgaatggaacttcaagctgaacaagcgaaagcatctatacaaagactgtctgaaatcttctagaaacgacatcgaaaggaacttcaagctgaacaagcgaaagcatctatacaaagactgtctgaaatcttctagtttactgataacaactgctcagaaaaacctaaaccctatcgggaatggagacgctctcggcgaagcaggagggcacagtggacgtgaagctgaagccgacttctaaccaatccaactcgtaggcgggcgggaagcggatgtgccaactagaagagtggtctctctcggcgcttgcttgacaaacgtgtgttattaaccgttgtatataatgttattaattaatgttctttattccctgatgcttctgttgtggctcacgttctcaactttgtatctgatgatgaaagaccagatgttttcttgcagttttcgaaaaagtcttctagagacaacttaattttgattaacaacacaacacatggccatatatacatgatattgttgcactattttttcggttgcaacacacatgtatctacctaggattcttt

SEQ ID NO: 84067 - DNA, 2422 bp, Zea Mays
tcgcggttctaccgctccgctcatgcccgcggccgaaccctcccccgcatcccacagccgccgacgctcaccttccatcctccccgcagcccgcagccgccaacgctcaccttccatccccgcggatcccacgctccctcgggcgctccttccgcgcccgcccacagatctcccatcgacgtcgatgctctgcgattaagcccagctaaactcgcgcggtttggctttggcgcagcgctggagctctcgagacgctcgcttggcgccgaagcggacgaggagcagttgtcggcgtccgctgccgtgtcctcagctccgccatctccttctccagctcgacgatcctctgcttcctgctcgtgaactccagcgcggcagcgtcgagctcggcgcacagccacccgttctcggcttccacccgctctgcggtgtccctgcacctctggagctcggtcttcttggccgcgagctcggcctccaggactgcgccaaagccaaactgctactgctacaactccgccgtgctctccatggaagcttctgcgcctagatcaacagcgttcggccgctggtgcccggcgctaagctccacgccgtcatcgagcgtggcacagtgattccgtcctcgacctccccttcctctgcaacatgtccaggaccgggaactagtagtgggaggatcaccgtccaccgtcgagcgtctgcaaggcaaatcagatcaaccaccacatcggagtgaaaagtctgcgccactctgcctcacacagccaaaaaatgtatcaggtgattaagaaccatcccagctcattgaagctttatgagcagaaactgctaggaacgagtgaagtcatgaaagaagatgtccagaggatccatgacaaggtgaaccgaatcttgaacgaagagtttgctaagagcaaagactacgttcccaacaagagggattggctctcagcttactggactggctttaagtcaccagagcaaatatcacgtgttcgcaacactggagtgaagcctaaaatactgaaacgtgtaggtcaggcaattactacactgcctgaaaacttcaaaccacatagagcagtgaagaagatttttgagctgcgtgcagctatgatagagagtgctcaaggaattgattgggctgttgccgaagccctggcctttgcaacacttatagtggaaggcaatcatgttaggctaagtggacaggatgtggaaagaggaactttcagccatcagcatgcagttctgcatgatcaggaaactggagcaaagataaagagactagttggagcttcattgttgatttttgcaaataagcaagacatgcaaggagctctaaaaccaactggaatcacgaaggtaagcgaacttcagtcatttattatatgcattagagacatgttttcctatctatgacatcatttttaacttgtactatgtttttccggtcctcatggttgccaagattttacttagttcgatgtgggagcaaaaggatatgccaaattgaatgtagtttcatcaattatgctcaattatggatgttcagaggcatccaatttcagtgtgtactgcaatacttgggtccacctgtacttggtttaagaagcgctccgcggacttccacggccgcgccgccgatctcgtccacggcctccggggcacggcgatgcccaggagacaggccctcaaggaagagcagtgcagagaagagaaaggtatctcgactattccaaagcacaagtatgcatccaaagcctgttccccaaaaggatcgaaaggaacttcaacctgaaccagcgagagtatcgatacaaagactgtttgaaatcttctagaaatgacatcgaatggaacttcaagctgaacaagcgaaagcatctatacaaagactgtctgaaatcttctagaaacgacatcgaaaggaacttcaagctgaacaagcgaaagcatctatacaaagactgtctgaaatcttctagtttactgataacaactgctcagaaaaacctaaaccctatcgggaatggagacgctctcggcgaagcaggagggcacagtggacgtgaagctgaagccgacttctaaccaatccaactcgtaggcgggcgggaagcggatgtgccaactagaagagtggtctctctcggcgcttgcttgacaaacgtgtgttattaaccgttgtatataatgttattaattaatgttctttattccctgatgcttctgttgtggctcacgttctcaactttgtatctgatgatgaaagaccagatgttttcttgcagttttcgaaaaagtcttctagagacaacttaattttgattaacaacacaacacatggccatatatacatgatattgttgcactattttttcggttgcaacacacatgtatctacctaggattcttt

SEQ ID NO: 84068 - DNA, 2400 bp, Zea Mays
tcgcggttctaccgctccgctcatgcccgcggccgaaccctcccccgcatcccacagccgccgacgctcaccttccatcctccccgcagcccgcagccgccaacgctcaccttccatccccgcggatcccacgctccctcgggcgctccttccgcgcccgcccacagatctcccatcgacgtcgatgctctgcgattaagcccagctaaactcgcgcggtttggctttggcgcagcgctggagctctcgagacgctcgcttggcgccgaagcggacgaggagcagttgtcggcgtccgctgccgtgtcctcagctccgccatctccttctccagctcgacgatcctctgcttcctgctcgtgaactccagcgcggcagcgtcgagctcggcgcacagccacccgttctcggcttccacccgctctgcggtgtccctgcacctctggagctcggtcttcttggccgcgagctcggcctccaggactgcgccaaagccaaactgctactgctacaactccgccgtgctctccatggaagcttctgcgcctagatcaacagcgttcggccgctggtgcccggcgctaagctccacgccgtcatcgagcgtggcacagtgattccgtcctcgacctccccttcctctgcaacatgtccaggaccgggaactagtagtgggaggatcaccgtccaccgtcgagcgtctgcaaggcaaatcagatcaaccaccacatcggagtgaaaagtctgcgccactctgcctcacacagccaaaaaatgtatcaggtgattaagaaccatcccagctcattgaagctttatgagcagaaactgctaggaacgagtgaagtcatgaaagaagatgtccagaggatccatgacaaggtgaaccgaatcttgaacgaagagtttgctaagagcaaagactacgttcccaacaagagggattggctctcagcttactggactggctttaagtcaccagagcaaatatcacgtgttcgcaacactggagtgaagcctaaaatactgaaacgtgtaggtcaggcaattactacactgcctgaaaacttcaaaccacatagagcagtgaagaagatttttgagctgcgtgcagctatgatagagagtgctcaaggaattgattgggctgttgccgaagccctggcctttgcaacacttatagtggaaggcaatcatgttaggctaagtggacaggatgtggaaagaggaactttcagccatcagcatgcagttctgcatgatcaggaaactggagcaaagataaagagactagttggagcttcattgttgatttttgcaaataagcaagacatgcaaggagctctaaaaccaactggaatcacgaaggtaagcgaacttcagtcatttattatatgcattagagacatgttttcctatctatgacatcatttttaacttgtactatgtttttccggtcctcatggttgccaagattttacttagttcgatgtgggagcaaaaggatatgccaaattgaatgtagtttcatcaattatgctcaattatggatgttcagaggcatccaatttcagtgtgtactgcaatacttgggtccacctgtacttggtttaagaagcgctccgcggacttccacggccgcgccgccgatctcgtccacggcctccggggcacggcgatgcccaggagacaggccctcaaggaagagcagtgcagagaagagaaaggtatctcgactattccaaagcacaagtatgcatccaaagcctgttccccaaaaggatcgaaaggaacttcaacctgaaccagcgagagtatcgatacaaagactgtttgaaatcttctagaaatgacatcgaatggaacttcaagctgaacaagcgaaagcatctatacaaagactgtctgaaatcttctagaaacgacatcgaaaggaacttcaagctgaacaagcgaaagcatctatacaaagactgtctgaaatcttctagaaaaacctaaaccctatcgggaatggagacgctctcggcgaagcaggagggcacagtggacgtgaagctgaagccgacttctaaccaatccaactcgtaggcgggcgggaagcggatgtgccaactagaagagtggtctctctcggcgcttgcttgacaaacgtgtgttattaaccgttgtatataatgttattaattaatgttctttattccctgatgcttctgttgtggctcacgttctcaactttgtatctgatgatgaaagaccagatgttttcttgcagttttcgaaaaagtcttctagagacaacttaattttgattaacaacacaacacatggccatatatacatgatattgttgcactattttttcggttgcaacacacatgtatctacctaggattcttt

SEQ ID NO: 84069 - DNA, 1843 bp, Zea Mays
tcgcggttctaccgctccgctcatgcccgcggccgaaccctcccccgcatcccacagccgccgacgctcaccttccatcctccccgcagcccgcagccgccaacgctcaccttccatccccgcggatcccacgctccctcgggcgctccttccgcgcccgcccacagatctcccatcgacgtcgatgctctgcgattaagcccagctaaactcgcgcggtttggctttggcgcagcgctggagctctcgagacgctcgcttggcgccgaagcggacgaggagcagttgtcggcgtccgctgccgtgtcctcagctccgccatctccttctccagctcgacgatcctctgcttcctgctcgtgaactccagcgcggcagcgtcgagctcggcgcacagccacccgttctcggcttccacccgctctgcggtgtccctgcacctctggagctcggtcttcttggccgcgagctcggcctccaggactgcgccaaagccaaactgctactgctacaactccgccgtgctctccatggaaggtaatttggaagctcatcgtccggtgctggaaatccctgtgcccgtgattaagaaccatcccagctcattgaagctttatgagcagaaactgctaggaacgagtgaagtcatgaaagaagatgtccagaggatccatgacaaggtgaaccgaatcttgaacgaagagtttgctaagagcaaagactacgttcccaacaagagggattggctctcagcttactggactggctttaagtcaccagagcaaatatcacgtgttcgcaacactggagtgaagcctaaaatactgaaacgtgtaggtcaggcaattactacactgcctgaaaacttcaaaccacatagagcagtgaagaagatttttgagctgcgtgcagctatgatagagagtgctcaaggaattgattgggctgttgccgaagccctggcctttgcaacacttatagtggaaggcaatcatgttaggctaagtggacaggatgtggaaagaggaactttcagccatcagcatgcagttctgcatgatcaggaaactggagcaaagtactgcccacttgaccatgttgcaatgaattaaaatgaggagctatttattgttagcaacagagactagttggagcttcattgttgatttttgcaaataagcaagacatgcaaggagctctaaaaccaactggaatcacgaaggtaagcgaacttcagtcatttattatatgcattagagacatgttttcctatctatgacatcatttttaacttgtactatgtttttccggtcctcatggttgccaagattttacttagttcgatgtgggagcaaaaggatatgccaaattgaatgtagtttcatcaattatgctcaattatggatgttcagaggcatccaatttcagtgtgtactgcaatacttgggtccacctgtacttggtttaagaagcgctccgcggacttccacggccgcgccgccgatctcgtccacggcctccggggcacggcgatgcccaggagacaggccctcaaggaagagcagtgcagagaagagaaaggtatctcgactattccaaagcacaagtatgcatccaaagcctgttccccaaaaggatcgaaaggaacttcaacctgaaccagcgagagtatcgatacaaagactgtttgaaatcttctagaaatgacatcgaatggaacttcaagctgaacaagcgaaagcatctatacaaagactgtctgaaatcttctagaaacgacatcgaaaggaacttcaagctgaacaagcgaaagcatctatacaaagactgtctgaaatcttct

SEQ ID NO: 84070 - DNA, 1798 bp, Zea Mays
tcgcggttctaccgctccgctcatgcccgcggccgaaccctcccccgcatcccacagccgccgacgctcaccttccatcctccccgcagcccgcagccgccaacgctcaccttccatccccgcggatcccacgctccctcgggcgctccttccgcgcccgcccacagatctcccatcgacgtcgatgctctgcgattaagcccagctaaactcgcgcggtttggctttggcgcagcgctggagctctcgagacgctcgcttggcgccgaagcggacgaggagcagttgtcggcgtccgctgccgtgtcctcagctccgccatctccttctccagctcgacgatcctctgcttcctgctcgtgaactccagcgcggcagcgtcgagctcggcgcacagccacccgttctcggcttccacccgctctgcggtgtccctgcacctctggagctcggtcttcttggccgcgagctcggcctccaggactgcgccaaagccaaactgctactgctacaactccgccgtgctctccatggaagcttctgcgcctagatcaacagcgttcggccgctggtgcccggcgctaagctccacgccgtcatcgagcgtggcacagtgattccgtcctcgacctccccttcctctgcaacatgtccaggaccgggaactagtagtgggaggatcaccgtccaccgtcgagcgtctgcaaggcaaatcagatcaaccaccacatcggagtgaaaagtctgcgccactctgcctcacacagccaaaaaatgtatcaggtgattaagaaccatcccagctcattgaagctttatgagcagaaactgctaggaacgagtgaagtcatgaaagaagatgtccagaggatccatgacaaggtgaaccgaatcttgaacgaagagtttgctaagagcaaagactacgttcccaacaagagggattggctctcagcttactggactggctttaagtcaccagagcaaatatcacgtgttcgcaacactggagtgaagcctaaaatactgaaacgtgtaggtcaggcaattactacactgcctgaaaacttcaaaccacatagagcagtgaagaagatttttgagctgcgtgcagctatgatagagagtgctcaaggaattgattgggctgttgccgaagccctggcctttgcaacacttatagtggaaggcaatcatgttaggctaagtggacaggatgtggaaagaggaactttcagccatcagcatgcagttctgcatgatcaggaaactggagcaaagataaagagactagttggagcttcattgttgatttttgcaaataagcaagacatgcaaggagctctaaaaccaactggaatcacgaagtcactctctgatagctcatcgccgcctggttctcccgccggtacacaaggtttaagaagcgctccgcggacttccacggccgcgccgccgatctcgtccacggcctccggggcacggcgatgcccaggagacaggccctcaaggaagagcagtgcagagaagagaaaggtatctcgactattccaaagcacaagtatgcatccaaagcctgttccccaaaaggatcgaaaggaacttcaacctgaaccagcgagagtatcgatacaaagactgtttgaaatcttctagaaatgacatcgaatggaacttcaagctgaacaagcgaaagcatctatacaaagactgtctgaaatcttctagaaacgacatcgaaaggaacttcaagctgaacaagcgaaagcatctatacaaagactgtctgaaatcttct

SEQ ID NO: 84071 - DNA, 2052 bp, Zea Mays
atggtgaactgcctaagtgagcacaatagtgcagcgttcactatcagcactactaggcggatcccagcattgcacggttgtggcattgatgctccacacgagcttgtgctacgctatatgcctacatgccagctgccaactgtccaaaccaaagctataaataatgagccaaatgaactccaatcgtgtttaaattttgcatacacttgcacatgcccttgcatatttctgtccaacccaaaagtcctgaagaatctatattcaaaagacccaacaaaagatcgaagagaggaggaaatgaagagaaaatccaaagaaaaacttcaagatctcaatggagcacggaaatatatctcagttcatcatgaaccaccatgcgctggagctctcgagacgctcgcttggcgccgaagcggacgaggagcagttgtcggcgtccgctgccgtgtcctcagctccgccatctccttctccagctcgacgatcctctgcttcctgctcgtgaactccagcgcggcagcgtcgagctcggcgcacagccacccgttctcggcttccacccgctctgcggtgtccctgcacctctggagctcggtcttcttggccgcgagctcggcctccaggactgcgccaaagccaaactgctactgctacaactccgccgtgctctccatggaagcttctgcgcctagatcaacagcgttcggccgctggtgcccggcgctaagctccacgccgtcatcgagcgtggcacagtgattccgtcctcgacctccccttcctctgcaacatgtccaggaccgggaactagtagtgggaggatcaccgtccaccgtcgagcgtctgcaaggcaaatcagatcaaccaccacatcggagtgaaaagtctgcgccactctgcctcacacagccaaaaaatgtatcaggtgattaagaaccatcccagctcattgaagctttatgagcagaaactgctaggaacgagtgaagtcatgaaagaagatgtccagaggatccatgacaaggtgaaccgaatcttgaacgaagagtttgctaagagcaaagactacgttcccaacaagagggattggctctcagcttactggactggctttaagtcaccagagcaaatatcacgtgttcgcaacactgggtcaggcaattactacactgcctgaaaacttcaaaccacatagagcagtgaagaagatttttgagctgcgtgcagctatgatagagagtgctcaaggaattgattgggctgttgccgaagccctggcctttgcaacacttatagtggaaggcaatcatgttaggctaagtggacaggatgtggaaagaggaactttcagccatcagcatgcagttctgcatgatcaggaaactggagcaaagtactgcccacttgaccatgttgcaatgaattaaaatgaggagctatttattgttagcaacagagactagttggagcttcattgttgatttttgcaaataagcaagacatgcaaggagctctaaaaccaactggaatcacgaagattttacttagttcgatgtgggagcaaaaggatatgccaaattgaatgtagtttcatcaattatgctcaattatggatgttcagaggcatccaatttcagtgtgtactgcaatacttgggtccacctgtacttggtttaagaagcgctccgcggacttccacggccgcgccgccgatctcgtccacggcctccggggcacggcgatgcccaggagacaggccctcaaggaagagcagtgcagagaagagaaaggtatctcgactattccaaagcacaagtatgcatccaaagcctgttccccaaaaggatcgaaaggaacttcaacctgaaccagcgagagtatcgatacaaagactgtttgaaatcttctagaaatgacatcgaatggaacttcaagctgaacaagcgaaagcatctatacaaagactgtctgaaatcttctagaaacgacatcgaaaggaacttcaagctgaacaagcgaaagcatctatacaaagactgtctgaaatcttct

SEQ ID NO: 84072 - DNA, 1936 bp, Zea Mays
tcgcggttctaccgctccgctcatgcccgcggccgaaccctcccccgcatcccacagccgccgacgctcaccttccatcctccccgcagcccgcagccgccaacgctcaccttccatccccgcggatcccacgctccctcgggcgctccttccgcgcccgcccacagatctcccatcgacgtcgatgctctgcgattaagcccagctaaactcgcgcggtttggctttggcgcagcgctggagctctcgagacgctcgcttggcgccgaagcggacgaggagcagttgtcggcgtccgctgccgtgtcctcagctccgccatctccttctccagctcgacgatcctctgcttcctgctcgtgaactccagcgcggcagcgtcgagctcggcgcacagccacccgttctcggcttccacccgctctgcggtgtccctgcacctctggagctcggtcttcttggccgcgagctcggcctccaggactgcgccaaagccaaactgctactgctacaactccgccgtgctctccatggaagcttctgcgcctagatcaacagcgttcggccgctggtgcccggcgctaagctccacgccgtcatcgagcgtggcacagtgattccgtcctcgacctccccttcctctgcaacatgtccaggaccgggaactagtagtgggaggatcaccgtccaccgtcgagcgtctgcaaggcaaatcagatcaaccaccacatcggagtgaaaagtctgcgccactctgcctcacacagccaaaaaatgtatcaggtgattaagaaccatcccagctcattgaagctttatgagcagaaactgctaggaacgagtgaagtcatgaaagaagatgtccagaggatccatgacaaggtgaaccgaatcttgaacgaagagtttgctaagagcaaagactacgttcccaacaagagggattggctctcagcttactggactggctttaagtcaccagagcaaatatcacgtgttcgcaacactggagtgaagcctaaaatactgaaacgtgtaggtcaggcaattactacactgcctgaaaacttcaaaccacatagagcagtgaagaagatttttgagctgcgtgcagctatgatagagagtgctcaaggaattgattgggctgttgccgaagccctggcctttgcaacacttatagtggaaggcaatcatgttaggctaagtggacaggatgtggaaagaggaactttcagccatcagcatgcagttctgcatgatcaggaaactggagcaaagtactgcccacttgaccatgttgcaatgaattaaaatgaggagctatttattgttagcaacagagactagttggagcttcattgttgatttttgcaaataagcaagacatgcaaggagctctaaaaccaactggaatcacgaaggtttaagaagcgctccgcggacttccacggccgcgccgccgatctcgtccacggcctccggggcacggcgatgcccaggagacaggccctcaaggaagagcagtgcagagaagagaaaggtatctcgactattccaaagcacaagtatgcatccaaagcctgttccccaaaaggatcgaaaggaacttcaacctgaaccagcgagagtatcgatacaaagactgtttgaaatcttctagaaatgacatcgaatggaacttcaagctgaacaagcgaaagcatctatacaaagactgtctgaaatcttctaggtaacaacagccatgacttcgaacatattgtattctaccttttcagattttcttgtttttaatggtatcacaattattgtgctattgtgaataaaccacttgtaatgctgttttgctcagttttttcgtgttgtacataaatcattttatatttatactgcgtcacaataatttactgatgtgcaaatatgatattgcttt

SEQ ID NO: 84073 - DNA, 1956 bp, Zea Mays
tcgcggttctaccgctccgctcatgcccgcggccgaaccctcccccgcatcccacagccgccgacgctcaccttccatcctccccgcagcccgcagccgccaacgctcaccttccatccccgcggatcccacgctccctcgggcgctccttccgcgcccgcccacagatctcccatcgacgtcgatgctctgcgattaagcccagctaaactcgcgcggtttggctttggcgcagcgctggagctctcgagacgctcgcttggcgccgaagcggacgaggagcagttgtcggcgtccgctgccgtgtcctcagctccgccatctccttctccagctcgacgatcctctgcttcctgctcgtgaactccagcgcggcagcgtcgagctcggcgcacagccacccgttctcggcttccacccgctctgcggtgtccctgcacctctggagctcggtcttcttggccgcgagctcggcctccaggactgcgccaaagccaaactgctactgctacaactccgccgtgctctccatggaagcttctgcgcctagatcaacagcgttcggccgctggtgcccggcgctaagctccacgccgtcatcgagcgtggcacagtgattccgtcctcgacctccccttcctctgcaacatgtccaggaccgggaactagtagtgggaggatcaccgtccaccgtcgagcgtctgcaaggcaaatcagatcaaccaccacatcggagtgaaaagtctgcgccactctgcctcacacagccaaaaaatgtatcaggtgattaagaaccatcccagctcattgaagctttatgagcagaaactgctaggaacgagtgaagtcatgaaagaagatgtccagaggatccatgacaaggtgaaccgaatcttgaacgaagagtttgctaagagcaaagactacgttcccaacaagagggattggctctcagcttactggactggctttaagtcaccagagcaaatatcacgtgttcgcaacactgggtcaggcaattactacactgcctgaaaacttcaaaccacatagagcagtgaagaagatttttgagctgcgtgcagctatgatagagagtgctcaaggaattgattgggctgttgccgaagccctggcctttgcaacacttatagtggaaggcaatcatgttaggctaagtggacaggatgtggaaagaggaactttcagccatcagcatgcagttctgcatgatcaggaaactggagcaaagtactgcccacttgaccatgttgcaatgaattaaaatgaggagctatttattgttagcaacagagactagttggagcttcattgttgatttttgcaaataagcaagacatgcaaggagctctaaaaccaactggaatcacgaagtcactctctgatagctcatcgccgcctggttctcccgccggtacacaaggtttaagaagcgctccgcggacttccacggccgcgccgccgatctcgtccacggcctccggggcacggcgatgcccaggagacaggccctcaaggaagagcagtgcagagaagagaaaggtatctcgactattccaaagcacaagtatgcatccaaagcctgttccccaaaaggatcgaaaggaacttcaacctgaaccagcgagagtatcgatacaaagactgtttgaaatcttctagaaatgacatcgaatggaacttcaagctgaacaagcgaaagcatctatacaaagactgtctgaaatcttctaggtaacaacagccatgacttcgaacatattgtattctaccttttcagattttcttgtttttaatggtatcacaattattgtgctattgtgaataaaccacttgtaatgctgttttgctcagttttttcgtgttgtacataaatcattttatatttatactgcgtcacaataatttactgatgtgcaaatatgatattgcttt

SEQ ID NO: 84074 - DNA, 2267 bp, Zea Mays
tcgcggttctaccgctccgctcatgcccgcggccgaaccctcccccgcatcccacagccgccgacgctcaccttccatcctccccgcagcccgcagccgccaacgctcaccttccatccccgcggatcccacgctccctcgggcgctccttccgcgcccgcccacagatctcccatcgacgtcgatgctctgcgattaagcccagctaaactcgcgcggtttggctttggcgcagcgctggagctctcgagacgctcgcttggcgccgaagcggacgaggagcagttgtcggcgtccgctgccgtgtcctcagctccgccatctccttctccagctcgacgatcctctgcttcctgctcgtgaactccagcgcggcagcgtcgagctcggcgcacagccacccgttctcggcttccacccgctctgcggtgtccctgcacctctggagctcggtcttcttggccgcgagctcggcctccaggactgcgccaaagccaaactgctactgctacaactccgccgtgctctccatggaagcttctgcgcctagatcaacagcgttcggccgctggtgcccggcgctaagctccacgccgtcatcgagcgtggcacagtgattccgtcctcgacctccccttcctctgcaacatgtccaggaccgggaactagtagtgggaggatcaccgtccaccgtcgagcgtctgcaaggcaaatcagatcaaccaccacatcggagtgaaaagtctgcgccactctgcctcacacagccaaaaaatgtatcaggtgattaagaaccatcccagctcattgaagctttatgagcagaaactgctaggaacgagtgaagtcatgaaagaagatgtccagaggatccatgacaaggtgaaccgaatcttgaacgaagagtttgctaagagcaaagactacgttcccaacaagagggattggctctcagcttactggactggctttaagtcaccagagcaaatatcacgtgttcgcaacactgggtcaggcaattactacactgcctgaaaacttcaaaccacatagagcagtgaagaagatttttgagctgcgtgcagctatgatagagagtgctcaaggaattgattgggctgttgccgaagccctggcctttgcaacacttatagtggaaggcaatcatgttaggctaagtggacaggatgtggaaagaggaactttcagccatcagcatgcagttctgcatgatcaggaaactggagcaaagtactgcccacttgaccatgttgcaatgaattaaaatgaggagctatttattgttagcaacagagactagttggagcttcattgttgatttttgcaaataagcaagacatgcaaggagctctaaaaccaactggaatcacgaaggtaagcgaacttcagtcatttattatatgcattagagacatgttttcctatctatgacatcatttttaacttgtactatgtttttccggtcctcatggttgccaagattttacttagttcgatgtgggagcaaaaggatatgccaaattgaatgtagtttcatcaattatgctcaattatggatgttcagaggcatccaatttcagtgtgtactgcaatacttgggtccacctgtacttggtagatgttctgcattttgttttcttataaattagatttggcttccattatgttgttctctttcggaacagtcactctctgatagctcatcgccgcctggttctcccgccggtacacaaggtttaagaagcgctccgcggacttccacggccgcgccgccgatctcgtccacggcctccggggcacggcgatgcccaggagacaggccctcaaggaagagcagtgcagagaagagaaaggtatctcgactattccaaagcacaagtatgcatccaaagcctgttccccaaaaggatcgaaaggaacttcaacctgaaccagcgagagtatcgatacaaagactgtttgaaatcttctagaaatgacatcgaatggaacttcaagctgaacaagcgaaagcatctatacaaagactgtctgaaatcttctaggtaacaacagccatgacttcgaacatattgtattctaccttttcagattttcttgtttttaatggtatcacaattattgtgctattgtgaataaaccacttgtaatgctgttttgctcagttttttcgtgttgtacataaatcattttatatttatactgcgtcacaataatttactgatgtgcaaatatgatattgcttt

SEQ ID NO: 84075 - DNA, 2131 bp, Zea Mays
tcgcggttctaccgctccgctcatgcccgcggccgaaccctcccccgcatcccacagccgccgacgctcaccttccatcctccccgcagcccgcagccgccaacgctcaccttccatccccgcggatcccacgctccctcgggcgctccttccgcgcccgcccacagatctcccatcgacgtcgatgctctgcgattaagcccagctaaactcgcgcggtttggctttggcgcagcgctggagctctcgagacgctcgcttggcgccgaagcggacgaggagcagttgtcggcgtccgctgccgtgtcctcagctccgccatctccttctccagctcgacgatcctctgcttcctgctcgtgaactccagcgcggcagcgtcgagctcggcgcacagccacccgttctcggcttccacccgctctgcggtgtccctgcacctctggagctcggtcttcttggccgcgagctcggcctccaggactgcgccaaagccaaactgctactgctacaactccgccgtgctctccatggaagcttctgcgcctagatcaacagcgttcggccgctggtgcccggcgctaagctccacgccgtcatcgagcgtggcacagtgattccgtcctcgacctccccttcctctgcaacatgtccaggaccgggaactagtagtgggaggatcaccgtccaccgtcgagcgtctgcaaggcaaatcagatcaaccaccacatcggagtgaaaagtctgcgccactctgcctcacacagccaaaaaatgtatcaggtgattaagaaccatcccagctcattgaagctttatgagcagaaactgctaggaacgagtgaagtcatgaaagaagatgtccagaggatccatgacaaggtgaaccgaatcttgaacgaagagtttgctaagagcaaagactacgttcccaacaagagggattggctctcagcttactggactggctttaagtcaccagagcaaatatcacgtgttcgcaacactggagtgaagcctaaaatactgaaacgtgtaggtcaggcaattactacactgcctgaaaacttcaaaccacatagagcagtgaagaagatttttgagctgcgtgcagctatgatagagagtgctcaaggaattgattgggctgttgccgaagccctggcctttgcaacacttatagtggaaggcaatcatgttaggctaagtggacaggatgtggaaagaggaactttcagccatcagcatgcagttctgcatgatcaggaaactggagcaaagataaagagactagttggagcttcattgttgatttttgcaaataagcaagacatgcaaggagctctaaaaccaactggaatcacgaaggtaagcgaacttcagtcatttattatatgcattagagacatgttttcctatctatgacatcatttttaacttgtactatgtttttccggtcctcatggttgccaagattttacttagttcgatgtgggagcaaaaggatatgccaaattgaatgtagtttcatcaattatgctcaattatggatgttcagaggcatccaatttcagtgtgtactgcaatacttgggtccacctgtacttggtttaagaagcgctccgcggacttccacggccgcgccgccgatctcgtccacggcctccggggcacggcgatgcccaggagacaggccctcaaggaagagcagtgcagagaagagaaaggtatctcgactattccaaagcacaagtatgcatccaaagcctgttccccaaaagaaattgtgcaggatcgaaaggaacttcaacctgaaccagcgagagtatcgatacaaagactgtttgaaatcttctagaaatgacatcgaatggaacttcaagctgaacaagcgaaagcatctatacaaagactgtctgaaatcttctaggtaacaacagccatgacttcgaacatattgtattctaccttttcagattttcttgtttttaatggtatcacaattattgtgctattgtgaataaaccacttgtaatgctgttttgctcagttttttcgtgttgtacataaatcattttatatttatactgcgtcacaataatttactgatgtgcaaatatgatattgcttt

SEQ ID NO: 84076 - DNA, 1985 bp, Zea Mays
tcgcggttctaccgctccgctcatgcccgcggccgaaccctcccccgcatcccacagccgccgacgctcaccttccatcctccccgcagcccgcagccgccaacgctcaccttccatccccgcggatcccacgctccctcgggcgctccttccgcgcccgcccacagatctcccatcgacgtcgatgctctgcgattaagcccagctaaactcgcgcggtttggctttggcgcagcgctggagctctcgagacgctcgcttggcgccgaagcggacgaggagcagttgtcggcgtccgctgccgtgtcctcagctccgccatctccttctccagctcgacgatcctctgcttcctgctcgtgaactccagcgcggcagcgtcgagctcggcgcacagccacccgttctcggcttccacccgctctgcggtgtccctgcacctctggagctcggtcttcttggccgcgagctcggcctccaggactgcgccaaagccaaactgctactgctacaactccgccgtgctctccatggaagcttctgcgcctagatcaacagcgttcggccgctggtgcccggcgctaagctccacgccgtcatcgagcgtggcacagtgattccgtcctcgacctccccttcctctgcaacatgtccaggaccgggaactagtagtgggaggatcaccgtccaccgtcgagcgtctgcaaggcaaatcagatcaaccaccacatcggagtgaaaagtctgcgccactctgcctcacacagccaaaaaatgtatcaggtgattaagaaccatcccagctcattgaagctttatgagcagaaactgctaggaacgagtgaagtcatgaaagaagatgtccagaggatccatgacaaggtgaaccgaatcttgaacgaagagtttgctaagagcaaagactacgttcccaacaagagggattggctctcagcttactggactggctttaagtcaccagagcaaatatcacgtgttcgcaacactggagtgaagcctaaaatactgaaacgtgtaggtcaggcaattactacactgcctgaaaacttcaaaccacatagagcagtgaagaagatttttgagctgcgtgcagctatgatagagagtgctcaaggaattgattgggctgttgccgaagccctggcctttgcaacacttatagtggaaggcaatcatgttaggctaagtggacaggatgtggaaagaggaactttcagccatcagcatgcagttctgcatgatcaggaaactggagcaaagtactgcccacttgaccatgttgcaatgaattaaaatgaggagctatttattgttagcaacagagactagttggagcttcattgttgatttttgcaaataagcaagacatgcaaggagctctaaaaccaactggaatcacgaagtcactctctgatagctcatcgccgcctggttctcccgccggtacacaaggtttaagaagcgctccgcggacttccacggccgcgccgccgatctcgtccacggcctccggggcacggcgatgcccaggagacaggccctcaaggaagagcagtgcagagaagagaaaggtatctcgactattccaaagcacaagtatgcatccaaagcctgttccccaaaaggatcgaaaggaacttcaacctgaaccagcgagagtatcgatacaaagactgtttgaaatcttctagaaatgacatcgaatggaacttcaagctgaacaagcgaaagcatctatacaaagactgtctgaaatcttctaggtaacaacagccatgacttcgaacatattgtattctaccttttcagattttcttgtttttaatggtatcacaattattgtgctattgtgaataaaccacttgtaatgctgttttgctcagttttttcgtgttgtacataaatcattttatatttatactgcgtcacaataatttactgatgtgcaaatatgatattgcttt

SEQ ID NO: 84077 - DNA, 1923 bp, Zea Mays
tcgcggttctaccgctccgctcatgcccgcggccgaaccctcccccgcatcccacagccgccgacgctcaccttccatcctccccgcagcccgcagccgccaacgctcaccttccatccccgcggatcccacgctccctcgggcgctccttccgcgcccgcccacagatctcccatcgacgtcgatgctctgcgattaagcccagctaaactcgcgcggtttggctttggcgcagcgctggagctctcgagacgctcgcttggcgccgaagcggacgaggagcagttgtcggcgtccgctgccgtgtcctcagctccgccatctccttctccagctcgacgatcctctgcttcctgctcgtgaactccagcgcggcagcgtcgagctcggcgcacagccacccgttctcggcttccacccgctctgcggtgtccctgcacctctggagctcggtcttcttggccgcgagctcggcctccaggactgcgccaaagccaaactgctactgctacaactccgccgtgctctccatggaagatcaacagcgttcggccgctggtgcccggcgctaagctccacgccgtcatcgagcgtggcacagtgattccgtcctcgacctccccttcctctgcaacatgtccaggaccgggaactagtagtgggaggatcaccgtccaccgtcgagcgtctgcaaggcaaatcagatcaaccaccacatcggagtgaaaagtctgcgccactctgcctcacacagccaaaaaatgtatcaggtgattaagaaccatcccagctcattgaagctttatgagcagaaactgctaggaacgagtgaagtcatgaaagaagatgtccagaggatccatgacaaggtgaaccgaatcttgaacgaagagtttgctaagagcaaagactacgttcccaacaagagggattggctctcagcttactggactggctttaagtcaccagagcaaatatcacgtgttcgcaacactggagtgaagcctaaaatactgaaacgtgtaggtcaggcaattactacactgcctgaaaacttcaaaccacatagagcagtgaagaagatttttgagctgcgtgcagctatgatagagagtgctcaaggaattgattgggctgttgccgaagccctggcctttgcaacacttatagtggaaggcaatcatgttaggctaagtggacaggatgtggaaagaggaactttcagccatcagcatgcagttctgcatgatcaggaaactggagcaaagtactgcccacttgaccatgttgcaatgaattaaaatgaggagctatttattgttagcaacagagactagttggagcttcattgttgatttttgcaaataagcaagacatgcaaggagctctaaaaccaactggaatcacgaaggtttaagaagcgctccgcggacttccacggccgcgccgccgatctcgtccacggcctccggggcacggcgatgcccaggagacaggccctcaaggaagagcagtgcagagaagagaaaggtatctcgactattccaaagcacaagtatgcatccaaagcctgttccccaaaaggatcgaaaggaacttcaacctgaaccagcgagagtatcgatacaaagactgtttgaaatcttctagaaatgacatcgaatggaacttcaagctgaacaagcgaaagcatctatacaaagactgtctgaaatcttctaggtaacaacagccatgacttcgaacatattgtattctaccttttcagattttcttgtttttaatggtatcacaattattgtgctattgtgaataaaccacttgtaatgctgttttgctcagttttttcgtgttgtacataaatcattttatatttatactgcgtcacaataatttactgatgtgcaaatatgatattgcttt

SEQ ID NO: 84078 - DNA, 1947 bp, Zea Mays
tcgcggttctaccgctccgctcatgcccgcggccgaaccctcccccgcatcccacagccgccgacgctcaccttccatcctccccgcagcccgcagccgccaacgctcaccttccatccccgcggatcccacgctccctcgggcgctccttccgcgcccgcccacagatctcccatcgacgtcgatgctctgcgattaagcccagctaaactcgcgcggtttggctttggcgcagcgctggagctctcgagacgctcgcttggcgccgaagcggacgaggagcagttgtcggcgtccgctgccgtgtcctcagctccgccatctccttctccagctcgacgatcctctgcttcctgctcgtgaactccagcgcggcagcgtcgagctcggcgcacagccacccgttctcggcttccacccgctctgcggtgtccctgcacctctggagctcggtcttcttggccgcgagctcggcctccaggactgcgccaaagccaaactgctactgctacaactccgccgtgctctccatggaagcttctgcgcctagatcaacagcgttcggccgctggtgcccggcgctaagctccacgccgtcatcgagcgtggcacagtgattccgtcctcgacctccccttcctctgcaacatgtccaggaccgggaactagtagtgggaggatcaccgtccaccgtcgagcgtctgcaaggcaaatcagatcaaccaccacatcggagtgaaaagtctgcgccactctgcctcacacagccaaaaaatgtatcaggtgattaagaaccatcccagctcattgaagctttatgagcagaaactgctaggaacgagtgaagtcatgaaagaagatgtccagaggatccatgacaaggtgaaccgaatcttgaacgaagagtttgctaagagcaaagactacgttcccaacaagagggattggctctcagcttactggactggctttaagtcaccagagcaaatatcacgtgttcgcaacactggagtgaagcctaaaatactgaaacgtgtaggtcaggcaattactacactgcctgaaaacttcaaaccacatagagcagtgaagaagatttttgagctgcgtgcagctatgatagagagtgctcaaggaattgattgggctgttgccgaagccctggcctttgcaacacttatagtggaaggcaatcatgttaggctaagtggacaggatgtggaaagaggaactttcagccatcagcatgcagttctgcatgatcaggaaactggagcaaagtactgcccacttgaccatgttgcaatgaattaaaatgaggagctatttattgttagcaacagagactagttggagcttcattgttgatttttgcaaataagcaagacatgcaaggagctctaaaaccaactggaatcacgaaggtttaagaagcgctccgcggacttccacggccgcgccgccgatctcgtccacggcctccggggcacggcgatgcccaggagacaggccctcaaggaagagcagtgcagagaagagaaaggtatctcgactattccaaagcacaagtatgcatccaaagcctgttccccaaaagaaattgtgcaggatcgaaaggaacttcaacctgaaccagcgagagtatcgatacaaagactgtttgaaatcttctagaaatgacatcgaatggaacttcaagctgaacaagcgaaagcatctatacaaagactgtctgaaatcttctaggtaacaacagccatgacttcgaacatattgtattctaccttttcagattttcttgtttttaatggtatcacaattattgtgctattgtgaataaaccacttgtaatgctgttttgctcagttttttcgtgttgtacataaatcattttatatttatactgcgtcacaataatttactgatgtgcaaatatgatattgcttt

SEQ ID NO: 84079 - DNA, 2094 bp, Zea Mays
tcgcggttctaccgctccgctcatgcccgcggccgaaccctcccccgcatcccacagccgccgacgctcaccttccatcctccccgcagcccgcagccgccaacgctcaccttccatccccgcggatcccacgctccctcgggcgctccttccgcgcccgcccacagatctcccatcgacgtcgatgctctgcgattaagcccagctaaactcgcgcggtttggctttggcgcagcgctggagctctcgagacgctcgcttggcgccgaagcggacgaggagcagttgtcggcgtccgctgccgtgtcctcagctccgccatctccttctccagctcgacgatcctctgcttcctgctcgtgaactccagcgcggcagcgtcgagctcggcgcacagccacccgttctcggcttccacccgctctgcggtgtccctgcacctctggagctcggtcttcttggccgcgagctcggcctccaggactgcgccaaagccaaactgctactgctacaactccgccgtgctctccatggaaggtaatttggaagctcatcgtccggtgctggaaatccctgtgcccgtgattaagaaccatcccagctcattgaagctttatgagcagaaactgctaggaacgagtgaagtcatgaaagaagatgtccagaggatccatgacaaggtgaaccgaatcttgaacgaagagtttgctaagagcaaagactacgttcccaacaagagggattggctctcagcttactggactggctttaagtcaccagagcaaatatcacgtgttcgcaacactggagtgaagcctaaaatactgaaacgtgtaggtcaggcaattactacactgcctgaaaacttcaaaccacatagagcagtgaagaagatttttgagctgcgtgcagctatgatagagagtgctcaaggaattgattgggctgttgccgaagccctggcctttgcaacacttatagtggaaggcaatcatgttaggctaagtggacaggatgtggaaagaggaactttcagccatcagcatgcagttctgcatgatcaggaaactggagcaaagtactgcccacttgaccatgttgcaatgaattaaaatgaggagctatttattgttagcaacagagactagttggagcttcattgttgatttttgcaaataagcaagacatgcaaggagctctaaaaccaactggaatcacgaaggtaagcgaacttcagtcatttattatatgcattagagacatgttttcctatctatgacatcatttttaacttgtactatgtttttccggtcctcatggttgccaagattttacttagttcgatgtgggagcaaaaggatatgccaaattgaatgtagtttcatcaattatgctcaattatggatgttcagaggcatccaatttcagtgtgtactgcaatacttgggtccacctgtacttggtagatgttctgcattttgttttcttataaattagatttggcttccattatgttgttctctttcggaacagtcactctctgatagctcatcgccgcctggttctcccgccggtacacaaggtttaagaagcgctccgcggacttccacggccgcgccgccgatctcgtccacggcctccggggcacggcgatgcccaggagacaggccctcaaggaagagcagtgcagagaagagaaaggtatctcgactattccaaagcacaagtatgcatccaaagcctgttccccaaaaggatcgaaaggaacttcaacctgaaccagcgagagtatcgatacaaagactgtttgaaatcttctagaaatgacatcgaatggaacttcaagctgaacaagcgaaagcatctatacaaagactgtctgaaatcttctaggtaacaacagccatgacttcgaacatattgtattctaccttttcagattttcttgtttttaatggtatcacaattattgtgctattgtgaataaaccacttgtaatgctgttttgctcagttttttcgtgttgtacataaatcattttatatttatactgcgtcacaataatttactgatgtgcaaatatgatattgcttt

SEQ ID NO: 84080 - DNA, 2016 bp, Zea Mays
tcgcggttctaccgctccgctcatgcccgcggccgaaccctcccccgcatcccacagccgccgacgctcaccttccatcctccccgcagcccgcagccgccaacgctcaccttccatccccgcggatcccacgctccctcgggcgctccttccgcgcccgcccacagatctcccatcgacgtcgatgctctgcgattaagcccagctaaactcgcgcggtttggctttggcgcagcgctggagctctcgagacgctcgcttggcgccgaagcggacgaggagcagttgtcggcgtccgctgccgtgtcctcagctccgccatctccttctccagctcgacgatcctctgcttcctgctcgtgaactccagcgcggcagcgtcgagctcggcgcacagccacccgttctcggcttccacccgctctgcggtgtccctgcacctctggagctcggtcttcttggccgcgagctcggcctccaggactgcgccaaagccaaactgctactgctacaactccgccgtgctctccatggaagcttctgcgcctagatcaacagcgttcggccgctggtgcccggcgctaagctccacgccgtcatcgagcgtggcacagtgattccgtcctcgacctccccttcctctgcaacatgtccaggaccgggaactagtagtgggaggatcaccgtccaccgtcgagcgtctgcaaggcaaatcagatcaaccaccacatcggagtgaaaagtctgcgccactctgcctcacacagccaaaaaatgtatcaggtgattaagaaccatcccagctcattgaagctttatgagcagaaactgctaggaacgagtgaagtcatgaaagaagatgtccagaggatccatgacaaggtgaaccgaatcttgaacgaagagtttgctaagagcaaagactacgttcccaacaagagggattggctctcagcttactggactggctttaagtcaccagagcaaatatcacgtgttcgcaacactggagtgaagcctaaaatactgaaacgtgtaggtcaggcaattactacactgcctgaaaacttcaaaccacatagagcagtgaagaagatttttgagctgcgtgcagctatgatagagagtgctcaaggaattgattgggctgttgccgaagccctggcctttgcaacacttatagtggaaggcaatcatgttaggctaagtggacaggatgtggaaagaggaactttcagccatcagcatgcagttctgcatgatcaggaaactggagcaaagtactgcccacttgaccatgttgcaatgaattaaaatgaggagctatttattgttagcaacagagactagttggagcttcattgttgatttttgcaaataagcaagacatgcaaggagctctaaaaccaactggaatcacgaagattttacttagttcgatgtgggagcaaaaggatatgccaaattgaatgtagtttcatcaattatgctcaattatggatgttcagaggcatccaatttcagtgtgtactgcaatacttgggtccacctgtacttggtttaagaagcgctccgcggacttccacggccgcgccgccgatctcgtccacggcctccggggcacggcgatgcccaggagacaggccctcaaggaagagcagtgcagagaagagaaaggatcgaaaggaacttcaacctgaaccagcgagagtatcgatacaaagactgtttgaaatcttctagaaatgacatcgaatggaacttcaagctgaacaagcgaaagcatctatacaaagactgtctgaaatcttctaggtaacaacagccatgacttcgaacatattgtattctaccttttcagattttcttgtttttaatggtatcacaattattgtgctattgtgaataaaccacttgtaatgctgttttgctcagttttttcgtgttgtacataaatcattttatatttatactgcgtcacaataatttactgatgtgcaaatatgatattgcttt

SEQ ID NO: 84081 - DNA, 1168 bp, Zea Mays
acaaaaattacagcgttgacacagaactgtgaaaaacaagtgcatatagtacccctgtacctccactgcaacgggctgctgatgtaaccccagtgttcaaccagatattgatggatgaacaagaagaatacgatggcccccctcaaaaagaaattcctgctttaattgtctggacccttggaggaaagaatgtatatgttgaaggatcatgggataactggaaatcaagaaaagccatgcaaaaatctgggaaagatcattctcttttgctggtactcccagcaggagtttaccgatacagatttgttgtagatggagaaaggagatgtcttcctgatctcccctgtgaaatcgatgcaatgggcaatgcggttaaccttcttgatgttaatgattatgtccctgaaagtgttgagagcgtggcagagtttgagccacctccttctccagactctagctacagtttccaggcacctgaggacaaggacttcgccaaggagcctcctgttcttccatctcaactccatctcggtgttcttaactcacagaactcggaagaaagctgtgcgcggccgcagcacatagtcctcaatcacctcttcatagagaagggctggggcgcccaccctctggtgtctctcggcctaacccacaggttcgagtccaaatatgtaacagtcgtcctgtacaaacccatcgaacgatagcaatagcccgcgcctgaagagcggaagttgacaactcactgtgggagcagcgatgaacagcgccgaagtggtacatgcttgtaaaagcggttgaggtccaggagtatttttttcccgtgcccttagcttgcacaacctgtggtactctggtggttagctgtacatgctgcgctgtcatgatggttggtttgctgttacagagagccaaggcgtccttgattccgaagtacacgtacgtttgtcgtcgtcgttcctccccccatcccatcccaggaatgaaatgtttgtaggtgtcactgaaaaccgtggaaatccacagaaatgctaggagacagagattagaccatgtgattcctagatttttgtttgttttttttttggctggtcaagaactcaagacgatgttgttgttatgaaatgaactcaagaaaaaatacaagtgggatgctgtgggttgtctt

SEQ ID NO: 84082 - DNA, 1436 bp, Zea Mays
acgagccccgcagccccgtccctctcttcttctcccccgccccctttttcctagcggcacggcaccaggcccgccctggtggcatcttcgtaatttcgcgcctcttctccgccacggcggctgggggtgagaggaggtatgggaaacgccagcggccgcgacgaggacgccgcggctgttgacggcgacggcgccgacgtggaggacggcggaggggactcgtcggagcgcgacttcccatcgtacggtagcggaggagccaaccacgtgcggcgcgcgtgctcagtgggcgtcgtagggggcggcgccgccgccggatcgccacccgggagccccggtcactcgctctcgccgcggatgttcgtgccccagatattgatggatgaacaagaagaatacgatggcccccctcaaaaagaaattcctgctttaattgtctggacccttggaggaaagaatgtatatgttgaaggatcatgggataactggaaatcaagaaaagccatgcaaaaatctgggaaagatcattctcttttgctggtactcccagcaggagtttaccgatacagatttgttgtagatggagaaaggagatgtcttcctgatctcccctgtgaaatcgatgcaatgggcaatgcggttaaccttcttgatgttaatgattatgtccctgaaagtgttgagagcgtggcagagtttgagccacctccttctccagactctagctacagtttccaggcacctgaggacaaggacttcgccaaggagcctcctgttcttccatctcaactccatctcggtgttcttaactcacagaactcggaagaaagctgtgcgcggccgcagcacatagtcctcaatcacctcttcatagagaagggctggggcgcccaccctctggtgtctctcggcctaacccacaggttcgagtccaaatatgtaacagtcgtcctgtacaaacccatcgaacgatagcaatagcccgcgcctgaagagcggaagttgacaactcactgtgggagcagcgatgaacagcgccgaagtggtacatgcttgtaaaagcggttgaggtccaggagtatttttttcccgtgcccttagcttgcacaacctgtggtactctggtggttagctgtacatgctgcgctgtcatgatggttggtttgctgttacagagagccaaggcgtccttgattccgaagtacacgtacgtttgtcgtcgtcgttcctccccccatcccatcccaggaatgaaatgtttgtaggtgtcactgaaaaccgtggaaatccacagaaatgctaggagacagagattagaccatgtgattcctagatttttgtttgttttttttttggctggtcaagaactcaagacgatgttgttgttatgaaatgaactcaagaaaaaatacaagtgggatgctgtgggttgtctt

SEQ ID NO: 84083 - DNA, 994 bp, Zea Mays
atggggatgcgaaagtaccccagccggcaccgtgtccactgccgcaagctgccggcactgtacgatgtaaagatcttcagcctgagattattcagagacaaatgttacattgagatttttcctgttgttgagaaatctataatagtgcgatctgatgacgaagaacgtaagagggatgagaggaacagaaaacaaagagaatactatgcacgaagaaaggttgatgaaaccacagaagaaagagatgcaagaaataaaatgatgcgtgattatcgcgcgaggaagaaggctgagacaggtccgtccgatgaacatgagcgtcatcgggaggagaggaatagaaaacaacgagaataccgtgcaagaagaaaggctgaagaaaccaacgaagaaagggaggcgaggaataaaagaatgtgtgattatcgagcgatgaagaaggctgacacagtactatactcgcctagacagacacaggcttatgctactggatcttcgatcgtaatacaaaccaacacacagatggcagagccggtaacgcctgttgttgcgaggggctctttgcaccaactgccaacatcagtggaaccattttcaaccaactcacaggtgacagagccggtaacgcctgttgttgcgaggggctctttgcaccaactgccaatatcagtggaaccattttcaaccatttctcaaccttcaacctataatcaatccgcaattactgcatctaccatgggcaatctcataatgaaccgagcgaggtacatcaatatggatgatgcagatagagaaattctactgcataagcgacgtgaatacaaaaggttgagacaatgtgtacaagacgacacgataactgacactctatcaggtgctccattatcaatccatacacagcaacatattgttcatgacacacctacccatgaacctgaattgagagattataatactgtattaattgagcctacacaaccaagcctagaaggcc

SEQ ID NO: 84084 - DNA, 447 bp, Zea Mays
cttggccatcatgaccttgacgaactcctcgtagttgatctggccatcgccatcaacgtcggcctcgcggatcatctcgtcgacctcctcgtcggtcagcttctcgcctaggttggtcatcacgtggcggagctccgcggcagagatgaagccgttctggtccttgtcgaacaccctgaacgcctccttgagctcctcctcggagtcggtgtccttcatcttgcgggccatgaggttgaggaactcggggaagtcgatcgtgccattgccgtcggcatccacctcattgatcatgtcctggagttcagcctccgttgggttctgacccagtgaacgcatgacagttccaagctccttggttgtgatgcaacctgtccagtgcacagcggagagcaatttcaggtcaatttatatgtaacattaacacagcagtgaggtcaaatgatt

SEQ ID NO: 84085 - DNA, 3471 bp, Zea Mays
caggcctccacaacaaagctagggtttgcctcccccaccctcctggcctcctcccgctttccctcatcctcgtgcgaacctcgcgagccaaggaccgctcgtcgtctcttgtctcgccgtcgccatgggtacggagcggaagcggaaggtgagtcttttcgacgtggtcgacgagacctccgtctccggcaagctgggccgcgccgcctccaacggcgccgccgccactgcggcggggaccaatccgtctgtcaaccggtggaacggccggccctacacggcacggtacttcgagatcctcgagaagcgccgcacactgcccgtgtggcagcagaaggaggagttcctccgccgcctccgcgacaaccagaccctcatcctcgtcggcgaaacgggaagcggaaagacaactcagattccacaatttgttcttgagactgaaggcttgggtaaccgttccatggttgcctgcactcagcctcggagggtcgcggcaatgtcagtctccaggcgtgtggcagaggagatggatgttactattggggaagaagtgggttacagtattcggtttgaagattgcagcagccacaaaactgttctcaaatatttgacagatggtatgcttctgagagaagcaatggcagacccacttttagagaagtacaaggtgattgttcttgatgaggctcatgagaggactttggcaacagatgttttgtttgggcttctgaaggaggttctaaaaaatagaccggatttgaagcttgttgttatgagtgctactctcgaagcagagaaattccagggttactttagtgatgcaccgttgatgaaggtgcctgggagacttcatccagttgagatattttacacccaagaaccagagagggactatctagaggctgctatcaggacagttgtgcaaatacatatgtgtgaacctgctggtgatatccttgtattccttactggagaagaggagattgaggacgcatgtcggaaaatcaataaggaaatcaataatatgggagatcaggttggcccagttaaagtcgtgcctttatactctacactgcccccagccatgcagcagaagatttttgaacctgctcctgccccattgaaggaacgaggtcctcctggaaggaaaattgttgtgtccaccaacattgctgaaacatccttaactatagatggcatagtttatgtgatagacccggggttttctaaacagaaagtttacaacccaagaataagggtggaatccctcctggtgtcaccaatttctaaggcaagtgctcatcagagagctggtcgtgctggacgaacgcaacctgggaagtgctttaggctatacacagagaagagctttaatgaggatttgcaaccacagacatacccagaaattcttcggtcgaacctggcaaatacagttcttaccttgaagaaacttggaattgatgatttagtgcattttgactttatggatcctccagcaccagaaactctaatgagggccttagaagttttgaactatttggctgcactagatgatgaaggtaatctaacacagttaggtgagatgatgagtgagtttcccctggatccacaaatgtcaaagatgcttgtcatcagtccaaagtacaactgttcgaatgagatcttatcaatatctgccatgctgtcaggtatgttaattatcactaaaggttaataaattgcatttctacaagttatcttctctatatttttgtctggagtactccctccatcccaaaatgtgtcattctcacttgtcatgccactttagctttgatcaaatatatataagaaagtattaagatttatggtgcataattagtatcatcagatgaatccttgattatatatttatgataaacttgtttggagatattaatgttgctaattttttctacaaatatagttaaactcaagtaacttcgaccagcacgcatcccgtagtgacacttgttttgagatagagtactttccttgtcagttctgttcaagcgaaataccacatttgtaatatagcatgtgagcttgcatgcatactactgcatgtgcgcttggcatcatttattcattttcttgtgcatttctttaatgtgctgtcatcagcaactgtcattcacctggcttcttgagctattggtcgaaatgatcatacagtttaggctgatgcagataattgctgtttgttgagttattctgacaaagcaaatggtacagtctcgcctctttgcatctgctgactaccgtggacttcgtctgttattaccatattctttctctagcacccaattgcttcctccggcctagggaagctcaaaaggctgctgatgaggccaaggctcgatttggccatattgatggggaccatctgacgcttctgaatgtataccatgcatacaagcaaaacaatgaagatccccagtggtgttatgagaactttatcaattccagagcactcaagtctgcagacaatgtcagacaacagcttgttcgcatcatgactagattcaacctcaagatgtgcagcacggatttcaatagccgtgagtactacgtcaatatcaggaaaaccctgcttgcagggtatttcatgcaggtcgctcacctggaacgaactggacattacctgactgtaaaagataaccaggtcgtccatcttcatccctccaattgcatggaccataagccagagtgggtcatctacaatgaatacgtcttgactaccaggaatttcatccgcacagtcaccgatatccgtggggaatggctaattgatattgcgccgcattactatgacctgagcaatttcccgtcatgtgaggccaagcgtgttcttgagaggctgtataacaagcgggagagggaaagagctgcaaatagaggctgaagttgatacttccacaaacctggtgcttcataattccacagcaggttatcacagatggcggacccgtttgtcatatgcatgatgtcttccacagcctgttgcctagtgtttcatcagcatgatcattatgcagacagcctcgagaaatcccttggcagctcaattagttatgatgcagattaattttgtgccattctccttatttttgtatgcgtaagatatttatattttgcgtttctatgtgattaactggttatccttcggttggaatgaaattccactgattttggtttattagcttagctggggttatgtatgcctataatatgcttacttccggttgcaggaggaagggttgaacgaggttggcaccgaagaaaatttggtgtccctttttatttatagatagatagtttctgtgtggtacgccaaggataaggcgatctgaaattggattgcgtctatctaatgtgtaacaaaatggaaacttttttggtgggtgcaatgtagcacttgcctatctgacacttgtgcacgttcgatctcca

SEQ ID NO: 84086 - DNA, 2889 bp, Zea Mays
caggcctccacaacaaagctagggtttgcctcccccaccctcctggcctcctcccgctttccctcatcctcgtgcgaacctcgcgagccaaggaccgctcgtcgtctcttgtctcgccgtcgccatgggtacggagcggaagcggaaggtgagtcttttcgacgtggtcgacgagacctccgtctccggcaagctgggccgcgccgcctccaacggcgccgccgccactgcggcggggaccaatccgtctgtcaaccggtggaacggccggccctacacggcacggtacttcgagatcctcgagaagcgccgcacactgcccgtgtggcagcagaaggaggagttcctccgccgcctccgcgacaaccagaccctcatcctcgtcggcgaaacgggaagcggaaagacaactcagattccacaatttgttcttgagactgaaggcttgggtaaccgttccatggttgcctgcactcagcctcggagggtcgcggcaatgtcagtctccaggcgtgtggcagaggagatggatgttactattggggaagaagtgggttacagtattcggtttgaagattgcagcagccacaaaactgttctcaagtattctgatctaatcctgttgtgttgaacactattgcttcctatcagatatttgacagatggtatgcttctgagagaagcaatggcagacccacttttagagaagtacaaggtgattgttcttgatgaggctcatgagaggactttggcaacagatgttttgtttgggcttctgaaggaggttctaaaaaatagaccggatttgaagcttgttgttatgagtgctactctcgaagcagagaaattccagggttactttagtgatgcaccgttgatgaaggtgcctgggagacttcatccagttgagatattttacacccaagaaccagagagggactatctagaggctgctatcaggacagttgtgcaaatacatatgtgtgaacctgctggtgatatccttgtattccttactggagaagaggagattgaggacgcatgtcggaaaatcaataaggaaatcaataatatgggagatcaggttggcccagttaaagtcgtgcctttatactctacactgcccccagccatgcagcagaagatttttgaacctgctcctgccccattgaaggaacgaggtcctcctggaaggaaaattgttgtgtccaccaacattgctgaaacatccttaactatagatggcatagtttatgtgatagacccggggttttctaaacagaaagtttacaacccaagaataagggtggaatccctcctggtgtcaccaatttctaaggcaagtgctcatcagagagctggtcgtgctggacgaacgcaacctgggaagtgctttaggctatacacagagaagagctttaatgaggatttgcaaccacagacatacccagaaattcttcggtcgaacctggcaaatacagttcttaccttgaagaaacttggaattgatgatttagtgcattttgactttatggatcctccagcaccagaaactctaatgagggccttagaagttttgaactatttggctgcactagatgatgaaggtaatctaacacagttaggtgagatgatgagtgagtttcccctggatccacaaatgtcaaagatgcttgtcatcagtccaaagtacaactgttcgaatgagatcttatcaatatctgccatgctgtcagcacccaattgcttcctccggcctagggaagctcaaaaggctgctgatgaggccaaggctcgatttggccatattgatggggaccatctgacgcttctgaatgtataccatgcatacaagcaaaacaatgaagatccccagtggtgttatgagaactttatcaattccagagcactcaagtctgcagacaatgtcagacaacagcttgttcgcatcatgactagattcaacctcaagatgtgcagcacggatttcaatagccgtgagtactacgtcaatatcaggaaaaccctgcttgcagggtatttcatgcaggtcgctcacctggaacgaactggacattacctgactgtaaaagataaccaggtcgtccatcttcatccctccaattgcatggaccataagccagagtgggtcatctacaatgaatacgtcttgactaccaggaatttcatccgcacagtcaccgatatccgtggggaatggctaattgatattgcgccgcattactatgacctgagcaatttcccgtcatgtgaggccaagcgtgttcttgagaggctgtataacaagcgggagagggaaagagctgcaaatagaggctgaagttgatacttccacaaacctggtgcttcataattccacagcaggttatcacagatggcggacccgtttgtcatatgcatgatgtcttccacagcctgttgcctagtgtttcatcagcatgatcattatgcagacagcctcgagaaatcccttggcagctcaattagttatgatgcagattaattttgtgccattctccttatttttgtatgcgtaagatatttatattttgcgtttctatgtgattaactggttatccttcggttggaatgaaattccactgattttggtttattagcttagctggggttatgtatgcctataatatgcttacttccggttgcaggaggaagggttgaacgaggttggcaccgaagaaaatttggtgtccctttttatttatagatagatagtttctgtgtggtacgccaaggataaggcgatctgaaattggattgcgtctatctaatgtgtaacaaaatggaaacttttttggtgggtgcaatgtagcacttgcctatctgacacttgtgcacgttcgatctcca

SEQ ID NO: 84087 - DNA, 2999 bp, Zea Mays
caggcctccacaacaaagctagggtttgcctcccccaccctcctggcctcctcccgctttccctcatcctcgtgcgaacctcgcgagccaaggaccgctcgtcgtctcttgtctcgccgtcgccatgggtacggagcggaagcggaaggtgagtcttttcgacgtggtcgacgagacctccgtctccggcaagctgggccgcgccgcctccaacggcgccgccgccactgcggcggggaccaatccgtctgtcaaccggtggaacggccggccctacacggcacggtacttcgagatcctcgagaagcgccgcacactgcccgtgtggcagcagaaggaggagttcctccgccgcctccgcgacaaccagaccctcatcctcgtcggcgaaacgggaagcggaaagacaactcagattccacaatttgttcttgagactgaaggcttgggtaaccgttccatggttgcctgcactcagcctcggagggtcgcggcaatgtcagtctccaggcgtgtggcagaggagatggatgttactattggggaagaagtgggttacagtattcggtttgaagattgcagcagccacaaaactgttctcaagtattctgatctaatcctgttgtgttgaacactattgcttcctatcagatatttgacagatggtatgcttctgagagaagcaatggcagacccacttttagagaagtacaaggtgattgttcttgatgaggctcatgagaggactttggcaacagatgttttgtttgggcttctgaaggaggttctaaaaaatagaccggatttgaagcttgttgttatgagtgctactctcgaagcagagaaattccagggttactttagtgatgcaccgttgatgaaggtgcctgggagacttcatccagttgagatattttacacccaagaaccagagagggactatctagaggctgctatcaggacagttgtgcaaatacatatgtgtgaacctgctggtgatatccttgtattccttactggagaagaggagattgaggacgcatgtcggaaaatcaataaggaaatcaataatatgggagatcaggttggcccagttaaagtcgtgcctttatactctacactgcccccagccatgcagcagaagatttttgaacctgctcctgccccattgaaggaacgaggtcctcctggaaggaaaattgttgtgtccaccaacattgctgaaacatccttaactatagatggcatagtttatgtgatagacccggggttttctaaacagaaagtttacaacccaagaataagggtggaatccctcctggtgtcaccaatttctaaggcaagtgctcatcagagagctggtcgtgctggacgaacgcaacctgggaagtgctttaggctatacacagagaagagctttaatgaggatttgcaaccacagacatacccagaaattcttcggtcgaacctggcaaatacagttcttaccttgaagaaacttggaattgatgatttagtgcattttgactttatggatcctccagcaccagaaactctaatgagggccttagaagttttgaactatttggctgcactagatgatgaaggtaatctaacacagttaggtgagatgatgagtgagtttcccctggatccacaaatgtcaaagatgcttgtcatcagtccaaagtacaactgttcgaatgagatcttatcaatatctgccatgctgtcagataattgctgtttgttgagttattctgacaaagcaaatggtacagtctcgcctctttgcatctgctgactaccgtggacttcgtctgttattaccatattctttctctagcacccaattgcttcctccggcctagggaagctcaaaaggctgctgatgaggccaaggctcgatttggccatattgatggggaccatctgacgcttctgaatgtataccatgcatacaagcaaaacaatgaagatccccagtggtgttatgagaactttatcaattccagagcactcaagtctgcagacaatgtcagacaacagcttgttcgcatcatgactagattcaacctcaagatgtgcagcacggatttcaatagccgtgagtactacgtcaatatcaggaaaaccctgcttgcagggtatttcatgcaggtcgctcacctggaacgaactggacattacctgactgtaaaagataaccaggtcgtccatcttcatccctccaattgcatggaccataagccagagtgggtcatctacaatgaatacgtcttgactaccaggaatttcatccgcacagtcaccgatatccgtggggaatggctaattgatattgcgccgcattactatgacctgagcaatttcccgtcatgtgaggccaagcgtgttcttgagaggctgtataacaagcgggagagggaaagagctgcaaatagaggctgaagttgatacttccacaaacctggtgcttcataattccacagcaggttatcacagatggcggacccgtttgtcatatgcatgatgtcttccacagcctgttgcctagtgtttcatcagcatgatcattatgcagacagcctcgagaaatcccttggcagctcaattagttatgatgcagattaattttgtgccattctccttatttttgtatgcgtaagatatttatattttgcgtttctatgtgattaactggttatccttcggttggaatgaaattccactgattttggtttattagcttagctggggttatgtatgcctataatatgcttacttccggttgcaggaggaagggttgaacgaggttggcaccgaagaaaatttggtgtccctttttatttatagatagatagtttctgtgtggtacgccaaggataaggcgatctgaaattggattgcgtctatctaatgtgtaacaaaatggaaacttttttggtgggtgcaatgtagcacttgcctatctgacacttgtgcacgttcgatctcca

SEQ ID NO: 84088 - DNA, 2951 bp, Zea Mays
caggcctccacaacaaagctagggtttgcctcccccaccctcctggcctcctcccgctttccctcatcctcgtgcgaacctcgcgagccaaggaccgctcgtcgtctcttgtctcgccgtcgccatgggtacggagcggaagcggaaggtgagtcttttcgacgtggtcgacgagacctccgtctccggcaagctgggccgcgccgcctccaacggcgccgccgccactgcggcggggaccaatccgtctgtcaaccggtggaacggccggccctacacggcacggtacttcgagatcctcgagaagcgccgcacactgcccgtgtggcagcagaaggaggagttcctccgccgcctccgcgacaaccagaccctcatcctcgtcggcgaaacgggaagcggaaagacaactcagattccacaatttgttcttgagactgaaggcttgggtaaccgttccatggttgcctgcactcagcctcggagggtcgcggcaatgtcagtctccaggcgtgtggcagaggagatggatgttactattggggaagaagtgggttacagtattcggtttgaagattgcagcagccacaaaactgttctcaaatatttgacagatggtatgcttctgagagaagcaatggcagacccacttttagagaagtacaaggtgattgttcttgatgaggctcatgagaggactttggcaacagatgttttgtttgggcttctgaaggaggttctaaaaaatagaccggatttgaagcttgttgttatgagtgctactctcgaagcagagaaattccagggttactttagtgatgcaccgttgatgaaggtgcctgggagacttcatccagttgagatattttacacccaagaaccagagagggactatctagaggctgctatcaggacagttgtgcaaatacatatgtgtgaacctgctggtgatatccttgtattccttactggagaagaggagattgaggacgcatgtcggaaaatcaataaggaaatcaataatatgggagatcaggttggcccagttaaagtcgtgcctttatactctacactgcccccagccatgcagcagaagatttttgaacctgctcctgccccattgaaggaacgaggtcctcctggaaggaaaattgttgtgtccaccaacattgctgaaacatccttaactatagatggcatagtttatgtgatagacccggggttttctaaacagaaagtttacaacccaagaataagggtggaatccctcctggtgtcaccaatttctaaggcaagtgctcatcagagagctggtcgtgctggacgaacgcaacctgggaagtgctttaggctatacacagagaagagctttaatgaggatttgcaaccacagacatacccagaaattcttcggtcgaacctggcaaatacagttcttaccttgaagaaacttggaattgatgatttagtgcattttgactttatggatcctccagcaccagaaactctaatgagggccttagaagttttgaactatttggctgcactagatgatgaaggtaatctaacacagttaggtgagatgatgagtgagtttcccctggatccacaaatgtcaaagatgcttgtcatcagtccaaagtacaactgttcgaatgagatcttatcaatatctgccatgctgtcagataattgctgtttgttgagttattctgacaaagcaaatggtacagtctcgcctctttgcatctgctgactaccgtggacttcgtctgttattaccatattctttctctagcacccaattgcttcctccggcctagggaagctcaaaaggctgctgatgaggccaaggctcgatttggccatattgatggggaccatctgacgcttctgaatgtataccatgcatacaagcaaaacaatgaagatccccagtggtgttatgagaactttatcaattccagagcactcaagtctgcagacaatgtcagacaacagcttgttcgcatcatgactagattcaacctcaagatgtgcagcacggatttcaatagccgtgagtactacgtcaatatcaggaaaaccctgcttgcagggtatttcatgcaggtcgctcacctggaacgaactggacattacctgactgtaaaagataaccaggtcgtccatcttcatccctccaattgcatggaccataagccagagtgggtcatctacaatgaatacgtcttgactaccaggaatttcatccgcacagtcaccgatatccgtggggaatggctaattgatattgcgccgcattactatgacctgagcaatttcccgtcatgtgaggccaagcgtgttcttgagaggctgtataacaagcgggagagggaaagagctgcaaatagaggctgaagttgatacttccacaaacctggtgcttcataattccacagcaggttatcacagatggcggacccgtttgtcatatgcatgatgtcttccacagcctgttgcctagtgtttcatcagcatgatcattatgcagacagcctcgagaaatcccttggcagctcaattagttatgatgcagattaattttgtgccattctccttatttttgtatgcgtaagatatttatattttgcgtttctatgtgattaactggttatccttcggttggaatgaaattccactgattttggtttattagcttagctggggttatgtatgcctataatatgcttacttccggttgcaggaggaagggttgaacgaggttggcaccgaagaaaatttggtgtccctttttatttatagatagatagtttctgtgtggtacgccaaggataaggcgatctgaaattggattgcgtctatctaatgtgtaacaaaatggaaacttttttggtgggtgcaatgtagcacttgcctatctgacacttgtgcacgttcgatctcca

SEQ ID NO: 84089 - DNA, 3169 bp, Zea Mays
caggcctccacaacaaagctagggtttgcctcccccaccctcctggcctcctcccgctttccctcatcctcgtgcgaacctcgcgagccaaggaccgctcgtcgtctcttgtctcgccgtcgccatgggtacggagcggaagcggaaggtgagtcttttcgacgtggtcgacgagacctccgtctccggcaagctgggccgcgccgcctccaacggcgccgccgccactgcggcggggaccaatccgtctgtcaaccggtggaacggccggccctacacggcacggtacttcgagatcctcgagaagcgccgcacactgcccgtgtggcagcagaaggaggagttcctccgccgcctccgcgacaaccagaccctcatcctcgtcggcgaaacgggaagcggaaagacaactcagattccacaatttgttcttgagactgaaggcttgggtaaccgttccatggttgcctgcactcagcctcggagggtcgcggcaatgtcagtctccaggcgtgtggcagaggagatggatgttactattggggaagaagtgggttacagtattcggtttgaagattgcagcagccacaaaactgttctcaaatatttgacagatggtatgcttctgagagaagcaatggcagacccacttttagagaagtacaaggtgattgttcttgatgaggctcatgagaggactttggcaacagatgttttgtttgggcttctgaaggaggttctaaaaaatagaccggatttgaagcttgttgttatgagtgctactctcgaagcagagaaattccagggttactttagtgatgcaccgttgatgaaggtgcctgggagacttcatccagttgagatattttacacccaagaaccagagagggactatctagaggctgctatcaggacagttgtgcaaatacatatgtgtgaacctgctggtgatatccttgtattccttactggagaagaggagattgaggacgcatgtcggaaaatcaataaggaaatcaataatatgggagatcaggttggcccagttaaagtcgtgcctttatactctacactgcccccagccatgcagcagaagatttttgaacctgctcctgccccattgaaggaacgaggtcctcctggaaggaaaattgttgtgtccaccaacattgctgaaacatccttaactatagatggcatagtttatgtgatagacccggggttttctaaacagaaagtttacaacccaagaataagggtggaatccctcctggtgtcaccaatttctaaggcaagtgctcatcagagagctggtcgtgctggacgaacgcaacctgggaagtgctttaggctatacacagagaagagctttaatgaggatttgcaaccacagacatacccagaaattcttcggtcgaacctggcaaatacagttcttaccttgaagaaacttggaattgatgatttagtgcattttgactttatggatcctccagcaccagaaactctaatgagggccttagaagttttgaactatttggctgcactagatgatgaaggtaatctaacacagttaggtgagatgatgagtgagtttcccctggatccacaaatgtcaaagatgcttgtcatcagtccaaagtacaactgttcgaatgagatcttatcaatatctgccatgctgtcaggtatgttaattatcactaaaggttaataaattgcatttctacaagttatcttctctatatttttgtctggagtactccctccatcccaaaatgtgtcattctcacttgtcatgccactttagctttgatcaaatatatataagaaagtattaagatttatggtgcataattagtatcatcagatgaatccttgattatatatttatgataaacttgtttggagatattaatgttgctaattttttctacaaatatagttaaactcaagtaacttcgaccagcacgcatcccgtagtgacacttgttttgagatagagtactttccttgtcagttctgttcaagcgaaataccacatttgtaatatagcatgtgagcttgcatgcatactactgcatgtgcgcttggcatcatttattcattttcttgtgcatttctttaatgtgctgtcatcagcaactgtcattcacctggcttcttgagctattggtcgaaatgatcatacagtttaggctgatgcagataattgctgtttgttgagttattctgacaaagcaaatggtacagtctcgcctctttgcatctgctgactaccgtggacttcgtctgttattaccatattctttctctagcacccaattgcttcctccggcctagggaagctcaaaaggctgctgatgaggccaaggctcgatttggccatattgatggggaccatctgacgcttctgaatgtataccatgcatacaagcaaaacaatgaagatccccagtggtgttatgagaactttatcaattccagagcactcaagtctgcagacaatgtcagacaacagcttgttcgcatcatgactagattcaacctcaagatgtgcagcacggatttcaatagccgtgagtactacgtcaatatcaggaaaaccctgcttgcagggtatttcatgcaggtcgctcacctggaacgaactggacattacctgactgtaaaagataaccaggtcgtccatcttcatccctccaattgcatggaccataagccagagtgggtcatctacaatgaatacgtcttgactaccaggaatttcatccgcacagtcaccgatatccgtggggaatggctaattgatattgcgccgcattactatgacctgagcaatttcccgtcatgtgaggccaagcgtgttcttgagaggctgtataacaagcgggagagggaaagagctgcaaatagaggctgaagttgatacttccacaaacctggtgcttcataattccacagcaggaggaagggttgaacgaggttggcaccgaagaaaatttggtgtccctttttatttatagatagatagtttctgtgtggtacgccaaggataaggcgatctgaaattggattgcgtctatctaatgtgtaacaaaatggaaacttttttggtgggtgcaatgtagcacttgcctatctgacacttgtgcacgttcgatctcca

SEQ ID NO: 84090 - DNA, 2649 bp, Zea Mays
caggcctccacaacaaagctagggtttgcctcccccaccctcctggcctcctcccgctttccctcatcctcgtgcgaacctcgcgagccaaggaccgctcgtcgtctcttgtctcgccgtcgccatgggtacggagcggaagcggaaggtgagtcttttcgacgtggtcgacgagacctccgtctccggcaagctgggccgcgccgcctccaacggcgccgccgccactgcggcggggaccaatccgtctgtcaaccggtggaacggccggccctacacggcacggtacttcgagatcctcgagaagcgccgcacactgcccgtgtggcagcagaaggaggagttcctccgccgcctccgcgacaaccagaccctcatcctcgtcggcgaaacgggaagcggaaagacaactcagattccacaatttgttcttgagactgaaggcttgggtaaccgttccatggttgcctgcactcagcctcggagggtcgcggcaatgtcagtctccaggcgtgtggcagaggagatggatgttactattggggaagaagtgggttacagtattcggtttgaagattgcagcagccacaaaactgttctcaaatatttgacagatggtatgcttctgagagaagcaatggcagacccacttttagagaagtacaaggtgattgttcttgatgaggctcatgagaggactttggcaacagatgttttgtttgggcttctgaaggaggttctaaaaaatagaccggatttgaagcttgttgttatgagtgctactctcgaagcagagaaattccagggttactttagtgatgcaccgttgatgaaggtgcctgggagacttcatccagttgagatattttacacccaagaaccagagagggactatctagaggctgctatcaggacagttgtgcaaatacatatgtgtgaacctgctggtgatatccttgtattccttactggagaagaggagattgaggacgcatgtcggaaaatcaataaggaaatcaataatatgggagatcaggttggcccagttaaagtcgtgcctttatactctacactgcccccagccatgcagcagaagatttttgaacctgctcctgccccattgaaggaacgaggtcctcctggaaggaaaattgttgtgtccaccaacattgctgaaacatccttaactatagatggcatagtttatgtgatagacccggggttttctaaacagaaagtttacaacccaagaataagggtggaatccctcctggtgtcaccaatttctaaggcaagtgctcatcagagagctggtcgtgctggacgaacgcaacctgggaagtgctttaggctatacacagagaagagctttaatgaggatttgcaaccacagacatacccagaaattcttcggtcgaacctggcaaatacagttcttaccttgaagaaacttggaattgatgatttagtgcattttgactttatggatcctccagcaccagaaactctaatgagggccttagaagttttgaactatttggctgcactagatgatgaaggtaatctaacacagttaggtgagatgatgagtgagtttcccctggatccacaaatgtcaaagatgcttgtcatcagtccaaagtacaactgttcgaatgagatcttatcaatatctgccatgctgtcagataattgctgtttgttgagttattctgacaaagcaaatggtacagtctcgcctctttgcatctgctgactaccgtggacttcgtctgttattaccatattctttctctagcacccaattgcttcctccggcctagggaagctcaaaaggctgctgatgaggccaaggctcgatttggccatattgatggggaccatctgacgcttctgaatgtataccatgcatacaagcaaaacaatgaagatccccagtggtgttatgagaactttatcaattccagagcactcaagtctgcagacaatgtcagacaacagcttgttcgcatcatgactagattcaacctcaagatgtgcagcacggatttcaatagccgtgagtactacgtcaatatcaggaaaaccctgcttgcagggtatttcatgcaggtcgctcacctggaacgaactggacattacctgactgtaaaagataaccaggtcgtccatcttcatccctccaattgcatggaccataagccagagtgggtcatctacaatgaatacgtcttgactaccaggaatttcatccgcacagtcaccgatatccgtggggaatggctaattgatattgcgccgcattactatgacctgagcaatttcccgtcatgtgaggccaagcgtgttcttgagaggctgtataacaagcgggagagggaaagagctgcaaatagaggctgaagttgatacttccacaaacctggtgcttcataattccacagcaggaggaagggttgaacgaggttggcaccgaagaaaatttggtgtccctttttatttatagatagatagtttctgtgtggtacgccaaggataaggcgatctgaaattggattgcgtctatctaatgtgtaacaaaatggaaacttttttggtgggtgcaatgtagcacttgcctatctgacacttgtgcacgttcgatctcca

SEQ ID NO: 84091 - DNA, 3214 bp, Zea Mays
caggcctccacaacaaagctagggtttgcctcccccaccctcctggcctcctcccgctttccctcatcctcgtgcgaacctcgcgagccaaggaccgctcgtcgtctcttgtctcgccgtcgccatgggtacggagcggaagcggaaggtgagtcttttcgacgtggtcgacgagacctccgtctccggcaagctgggccgcgccgcctccaacggcgccgccgccactgcggcggggaccaatccgtctgtcaaccggtggaacggccggccctacacggcacggtacttcgagatcctcgagaagcgccgcacactgcccgtgtggcagcagaaggaggagttcctccgccgcctccgcgacaaccagaccctcatcctcgtcggcgaaacgggaagcggaaagacaactcagattccacaatttgttcttgagactgaaggcttgggtaaccgttccatggttgcctgcactcagcctcggagggtcgcggcaatgtcagtctccaggcgtgtggcagaggagatggatgttactattggggaagaagtgggttacagtattcggtttgaagattgcagcagccacaaaactgttctcaaatatttgacagatggtatgcttctgagagaagcaatggcagacccacttttagagaagtacaaggtgattgttcttgatgaggctcatgagaggactttggcaacagatgttttgtttgggcttctgaaggaggttctaaaaaatagaccggatttgaagcttgttgttatgagtgctactctcgaagcagagaaattccagggttactttagtgatgcaccgttgatgaaggtgcctgggagacttcatccagttgagatattttacacccaagaaccagagagggactatctagaggctgctatcaggacagttgtgcaaatacatatgtgtgaacctgctggtgatatccttgtattccttactggagaagaggagattgaggacgcatgtcggaaaatcaataaggaaatcaataatatgggagatcaggttggcccagttaaagtcgtgcctttatactctacactgcccccagccatgcagcagaagatttttgaacctgctcctgccccattgaaggaacgaggtcctcctggaaggaaaattgttgtgtccaccaacattgctgaaacatccttaactatagatggcatagtttatgtgatagacccggggttttctaaacagaaagtttacaacccaagaataagggtggaatccctcctggtgtcaccaatttctaaggcaagtgctcatcagagagctggtcgtgctggacgaacgcaacctgggaagtgctttaggctatacacagagaagagctttaatgaggatttgcaaccacagacatacccagaaattcttcggtcgaacctggcaaatacagttcttaccttgaagaaacttggaattgatgatttagtgcattttgactttatggatcctccagcaccagaaactctaatgagggccttagaagttttgaactatttggctgcactagatgatgaaggtaatctaacacagttaggtgagatgatgagtgagtttcccctggatccacaaatgtcaaagatgcttgtcatcagtccaaagtacaactgttcgaatgagatcttatcaatatctgccatgctgtcagttaaactcaagtaacttcgaccagcacgcatcccgtagtgacacttgttttgagatagagtactttccttgtcagttctgttcaagcgaaataccacatttgtaatatagcatgtgagcttgcatgcatactactgcatgtgcgcttggcatcatttattcattttcttgtgcatttctttaatgtgctgtcatcagcaactgtcattcacctggcttcttgagctattggtcgaaatgatcatacagtttaggctgatgcagataattgctgtttgttgagttattctgacaaagcaaatggtacagtctcgcctctttgcatctgctgactaccgtggacttcgtctgttattaccatattctttctctagcacccaattgcttcctccggcctagggaagctcaaaaggctgctgatgaggccaaggctcgatttggccatattgatggggaccatctgacgcttctgaatgtataccatgcatacaagcaaaacaatgaagatccccagtggtgttatgagaactttatcaattccagagcactcaagtctgcagacaatgtcagacaacagcttgttcgcatcatgactagattcaacctcaagatgtgcagcacggatttcaatagccgtgagtactacgtcaatatcaggaaaaccctgcttgcagggtatttcatgcaggtcgctcacctggaacgaactggacattacctgactgtaaaagataaccaggtcgtccatcttcatccctccaattgcatggaccataagccagagtgggtcatctacaatgaatacgtcttgactaccaggaatttcatccgcacagtcaccgatatccgtggggaatggctaattgatattgcgccgcattactatgacctgagcaatttcccgtcatgtgaggccaagcgtgttcttgagaggctgtataacaagcgggagagggaaagagctgcaaatagaggctgaagttgatacttccacaaacctggtgcttcataattccacagcaggttatcacagatggcggacccgtttgtcatatgcatgatgtcttccacagcctgttgcctagtgtttcatcagcatgatcattatgcagacagcctcgagaaatcccttggcagctcaattagttatgatgcagattaattttgtgccattctccttatttttgtatgcgtaagatatttatattttgcgtttctatgtgattaactggttatccttcggttggaatgaaattccactgattttggtttattagcttagctggggttatgtatgcctataatatgcttacttccggttgcaggaggaagggttgaacgaggttggcaccgaagaaaatttggtgtccctttttatttatagatagatagtttctgtgtggtacgccaaggataaggcgatctgaaattggattgcgtctatctaatgtgtaacaaaatggaaacttttttggtgggtgcaatgtagcacttgcctatctgacacttgtgcacgttcgatctcca

SEQ ID NO: 84092 - DNA, 2938 bp, Zea Mays
aaaacccccaaatatagatcgagcggaccctccaggcctccacaacaaagctagggtttgcctcccccaccctcctggcctcctcccgctttccctcatcctcgtgcgaacctcgcgagccaaggaccgctcgtcgtctcttgtctcgccgtcgccatgggtacggagcggaagcggaaggtgagtcttttcgacgtggtcgacgagacctccgtctccggcaagctgggccgcgccgcctccaacggcgccgccgccactgcggcggggaccaatccgtctgtcaaccggtggaacggccggccctacacggcacggtacttcgagatcctcgagaagcgccgcacactgcccgtgtggcagcagaaggaggagttcctccgccgcctccgcgacaaccagaccctcatcctcgtcggcgaaacgggaagcggaaagacaactcagattccacaatttgttcttgagactgaaggcttgggtaaccgttccatggttgcctgcactcagcctcggagggtcgcggcaatgtcagtctccaggcgtgtggcagaggagatggatgttactattggggaagaagtgggttacagtattcggtttgaagattgcagcagccacaaaactgttctcaaatatttgacagatggtatgcttctgagagaagcaatggcagacccacttttagagaagtacaaggtgattgttcttgatgaggctcatgagaggactttggcaacagatgttttgtttgggcttctgaaggaggttctaaaaaatagaccggatttgaagcttgttgttatgagtgctactctcgaagcagagaaattccagggttactttagtgatgcaccgttgatgaaggtgcctgggagacttcatccagttgagatattttacacccaagaaccagagagggactatctagaggctgctatcaggacagttgtgcaaatacatatgtgtgaacctgctggtgatatccttgtattccttactggagaagaggagattgaggacgcatgtcggaaaatcaataaggaaatcaataatatgggagatcaggttggcccagttaaagtcgtgcctttatactctacactgcccccagccatgcagcagaagatttttgaacctgctcctgccccattgaaggaacgaggtcctcctggaaggaaaattgttgtgtccaccaacattgctgaaacatccttaactatagatggcatagtttatgtgatagacccggggttttctaaacagaaagtttacaacccaagaataagggtggaatccctcctggtgtcaccaatttctaaggcaagtgctcatcagagagctggtcgtgctggacgaacgcaacctgggaagtgctttaggctatacacagagaagagctttaatgaggatttgcaaccacagacatacccagaaattcttcggtcgaacctggcaaatacagttcttaccttgaagaaacttggaattgatgatttagtgcattttgactttatggatcctccagcaccagaaactctaatgagggccttagaagttttgaactatttggctgcactagatgatgaaggtaatctaacacagttaggtgagatgatgagtgagtttcccctggatccacaaatgtcaaagatgcttgtcatcagtccaaagtacaactgttcgaatgagatcttatcaatatctgccatgctgtcagtctcgcctctttgcatctgctgactaccgtggacttcgtctgttattaccatattctttctctagcacccaattgcttcctccggcctagggaagctcaaaaggctgctgatgaggccaaggctcgatttggccatattgatggggaccatctgacgcttctgaatgtataccatgcatacaagcaaaacaatgaagatccccagtggtgttatgagaactttatcaattccagagcactcaagtctgcagacaatgtcagacaacagcttgttcgcatcatgactagattcaacctcaagatgtgcagcacggatttcaatagccgtgagtactacgtcaatatcaggaaaaccctgcttgcagggtatttcatgcaggtcgctcacctggaacgaactggacattacctgactgtaaaagataaccaggtcgtccatcttcatccctccaattgcatggaccataagccagagtgggtcatctacaatgaatacgtcttgactaccaggaatttcatccgcacagtcaccgatatccgtggggaatggctaattgatattgcgccgcattactatgacctgagcaatttcccgtcatgtgaggccaagcgtgttcttgagaggctgtataacaagcgggagagggaaagagctgcaaatagaggctgaagttgatacttccacaaacctggtgcttcataattccacagcaggttatcacagatggcggacccgtttgtcatatgcatgatgtcttccacagcctgttgcctagtgtttcatcagcatgatcattatgcagacagcctcgagaaatcccttggcagctcaattagttatgatgcagattaattttgtgccattctccttatttttgtatgcgtaagatatttatattttgcgtttctatgtgattaactggttatccttcggttggaatgaaattccactgattttggtttattagcttagctggggttatgtatgcctataatatgcttacttccggttgcaggaggaagggttgaacgaggttggcaccgaagaaaatttggtgtccctttttatttatagatagatagtttctgtgtggtacgccaaggataaggcgatctgaaattggattgcgtctatctaatgtgtaacaaaatggaaacttttttggtgggtgcaatgtagcacttgcctatctgacacttgtgcacgttcgatctcca

SEQ ID NO: 84093 - DNA, 3041 bp, Zea Mays
tcgaaatcgaactctcgtaataacgaaattctaaatttctcaatttgatctatgcaaaacccccaaatatagatcgagcggaccctccaggcctccacaacaaagctagggtttgcctcccccaccctcctggcctcctcccgctttccctcatcctcgtgcgaacctcgcgagccaaggaccgctcgtcgtctcttgtctcgccgtcgccatgggtacggagcggaagcggaaggtgagtcttttcgacgtggtcgacgagacctccgtctccggcaagctgggccgcgccgcctccaacggcgccgccgccactgcggcggggaccaatccgtctgtcaaccggtggaacggccggccctacacggcacggtacttcgagatcctcgagaagcgccgcacactgcccgtgtggcagcagaaggaggagttcctccgccgcctccgcgacaaccagaccctcatcctcgtcggcgaaacgggaagcggaaagacaactcagattccacaatttgttcttgagactgaaggcttgggtaaccgttccatggttgcctgcactcagcctcggagggtcgcggcaatgtcagtctccaggcgtgtggcagaggagatggatgttactattggggaagaagtgggttacagtattcggtttgaagattgcagcagccacaaaactgttctcaagtattctgatctaatcctgttgtgttgaacactattgcttcctatcagatatttgacagatggtatgcttctgagagaagcaatggcagacccacttttagagaagtacaaggtgattgttcttgatgaggctcatgagaggactttggcaacagatgttttgtttgggcttctgaaggaggttctaaaaaatagaccggatttgaagcttgttgttatgagtgctactctcgaagcagagaaattccagggttactttagtgatgcaccgttgatgaaggtgcctgggagacttcatccagttgagatattttacacccaagaaccagagagggactatctagaggctgctatcaggacagttgtgcaaatacatatgtgtgaacctgctggtgatatccttgtattccttactggagaagaggagattgaggacgcatgtcggaaaatcaataaggaaatcaataatatgggagatcaggttggcccagttaaagtcgtgcctttatactctacactgcccccagccatgcagcagaagatttttgaacctgctcctgccccattgaaggaacgaggtcctcctggaaggaaaattgttgtgtccaccaacattgctgaaacatccttaactatagatggcatagtttatgtgatagacccggggttttctaaacagaaagtttacaacccaagaataagggtggaatccctcctggtgtcaccaatttctaaggcaagtgctcatcagagagctggtcgtgctggacgaacgcaacctgggaagtgctttaggctatacacagagaagagctttaatgaggatttgcaaccacagacatacccagaaattcttcggtcgaacctggcaaatacagttcttaccttgaagaaacttggaattgatgatttagtgcattttgactttatggatcctccagcaccagaaactctaatgagggccttagaagttttgaactatttggctgcactagatgatgaaggtaatctaacacagttaggtgagatgatgagtgagtttcccctggatccacaaatgtcaaagatgcttgtcatcagtccaaagtacaactgttcgaatgagatcttatcaatatctgccatgctgtcagtctcgcctctttgcatctgctgactaccgtggacttcgtctgttattaccatattctttctctagcacccaattgcttcctccggcctagggaagctcaaaaggctgctgatgaggccaaggctcgatttggccatattgatggggaccatctgacgcttctgaatgtataccatgcatacaagcaaaacaatgaagatccccagtggtgttatgagaactttatcaattccagagcactcaagtctgcagacaatgtcagacaacagcttgttcgcatcatgactagattcaacctcaagatgtgcagcacggatttcaatagccgtgagtactacgtcaatatcaggaaaaccctgcttgcagggtatttcatgcaggtcgctcacctggaacgaactggacattacctgactgtaaaagataaccaggtcgtccatcttcatccctccaattgcatggaccataagccagagtgggtcatctacaatgaatacgtcttgactaccaggaatttcatccgcacagtcaccgatatccgtggggaatggctaattgatattgcgccgcattactatgacctgagcaatttcccgtcatgtgaggccaagcgtgttcttgagaggctgtataacaagcgggagagggaaagagctgcaaatagaggctgaagttgatacttccacaaacctggtgcttcataattccacagcaggttatcacagatggcggacccgtttgtcatatgcatgatgtcttccacagcctgttgcctagtgtttcatcagcatgatcattatgcagacagcctcgagaaatcccttggcagctcaattagttatgatgcagattaattttgtgccattctccttatttttgtatgcgtaagatatttatattttgcgtttctatgtgattaactggttatccttcggttggaatgaaattccactgattttggtttattagcttagctggggttatgtatgcctataatatgcttacttccggttgcaggaggaagggttgaacgaggttggcaccgaagaaaatttggtgtccctttttatttatagatagatagtttctgtgtggtacgccaaggataaggcgatctgaaattggattgcgtctatctaatgtgtaacaaaatggaaacttttttggtgggtgcaatgtagcacttgcctatctgacacttgtgcacgttcgatctcca

SEQ ID NO: 84094 - DNA, 2110 bp, Zea Mays
ggtgtccatttgtggtttttatgcccagccatctccgcccactccccgcactcccaccgtatcctcccctgcgtagggtttaaccactcgcagcagccgccgtgactcgagaatcatgtcagcgccgccgtcgctcaagaccccggcaaccgccgtagcggtctctcggcgctcggtcgccaccccgagagccaccgggcttcgcggcgcctgtgctcccccgactcggcgcctccggtgctcagcctccgccgccgtggccggggcttccaccgagatggctgatgctccgctggactgggcagagaggtcgctggaggagttacacagcttgccggaccacgacacgttctgcttgatggcgctctcgccgctggacgggcggtacgatcgcttcgtcaaggagctgatgccctttttcagcgagttcggcctaatcagataccgcgttctcatcgagatcaagtggctactgaaactttctcaaattcctgagatcactgaggtgcctcagttcagcaaggaagctcagtccttgttgaatgccattattgagaatttttgcatagatgatgcaaaagaagttaagaaaatcgagaaagtaaccaaccatgacgtgaaagccgtggagtactttctgaagcaaaggtgcagctcaaatccagagattgcaaaggtgtcggaattcttccattttggttgtacctctgaagatattaacaatctatcacatgcattggctttgaaagagggggtaaataaagttatgttccctgccatgatcgatctatgcagagcaatgtgttccttggcaacacaaaattcaggctaccctatgttggctcgaactcatgggcagccagcatcaccaacaactgtgggaaaggagatggcaaacttcgcggccagattatctgatataggaaagagtttctcagaggtgaagatactagggaaatttgctggcgctgttggcaattacaatgctgatgtggttgcatatcctgaagttgactggcctaaggtggcagaagagtttgttagatccttgggtttgcagtttaatccctatgttactcagattgagcctcatgactacatatcaaagctcttcaatctattcacccagtttaacaatgtgttgactgattttgatagagacatgtggtcctatatatcattaggctacttcaagcagataccaaaggctggtgaagttggttcttccactatgcctcataaaatcaaccccattgattttgaaaatagtgatggcaatttatgtcaagcgaattctatattgtctggtataagcatgaaactaccaatatcccggttgcagcgtgacctaacagactcgactgttttgagaaacctgggtatgggattaggtcattctctattggcttacaaagctaccatgcgtggaatcagcaaggttcaggctagaactactatgctgaattggtgcctttacagttgaatgaatcacgtttagctgaagacctggagcaaacttgggaggtccttgctgagccaatacagacagtgatgcgaagatatgggatacctgaaccttatgagaagctgaaggaactgacgagaggccaagctgtcaccaaggacagcatgcagcaattcattaatggtctagacataccggaggaggttcgatcgaagctttcgaagctaaccccgcattcctacactgggctagcggaggatttggccagagacatcgagaagtgggttgatcttgaatctggatttcagatcaagtgagctcccatttgacaacaatggagaaaataaataacagacgggaaccctaggaaacgagaatccaatgctggaaccaaggtgccgtttggttcacaaatttgtaacgtaatgggtaacgaataacgttaaatcatgtttgttttagtccaactgtaatcgaatactacactaaaaattgataccagcctattcaaatttgttaccgccagtaatcgaacgtaaaccattaccatttgcgttacatttcttgaaccaaacagcacccaaatgcgaattactgctacaataaacatcctacaagtaatggtcggtcggagcgttatgtttc

SEQ ID NO: 84095 - DNA, 2071 bp, Zea Mays
ggtgtccatttgtggtttttatgcccagccatctccgcccactccccgcactcccaccgtatcctcccctgcgtagggtttaaccactcgcagcagccgccgtgactcgagaatcatgtcagcgccgccgtcgctcaagaccccggcaaccgccgtagcggtctctcggcgctcggtcgccaccccgagagccaccgggcttcgcggcgcctgtgctcccccgactcggcgcctccggtgctcagcctccgccgccgtggccggggcttccaccgagatggctgatgctccgctggactgggcagagaggtcgctggaggagttacacagcttgccggaccacgacacgttctgcttgatggcgctctcgccgctggacgggcggtacgatcgcttcgtcaaggagctgatgccctttttcagcgagttcggcctaatcagataccgcgttctcatcgagatcaagtggctactgaaactttctcaaattcctgagatcactgaggtgcctcagttcagcaaggaagctcagtccttgttgaatgccattattgagaatttttgcatagatgatgcaaaagaagttaagaaaatcgagaaagtaaccaaccatgacgtgaaagccgtggagtactttctgaagcaaaggtgcagctcaaatccagagattgcaaaggtgtcggaattcttccattttggttgtacctctgaagatattaacaatctatcacatgcattggctttgaaagagggggtaaataaagttatgttccctgccatgatcgatctatgcagagcaatgtgttccttggcaacacaaaattcaggctaccctatgttggctcgaactcatgggcagcatcaccaacaactgtgggaaaggagatggcaaacttcgcggccagattatctgatataggaaagagtttctcagaggtgaagatactagggaaatttgctggcgctgttggcaattacaatgctgatgtggttgcatatcctgaagttgactggcctaaggtggcagaagagtttgttagatccttgggtttgcagtttaatccctatgttactcagattgagcctcatgactacatatcaaagctcttcaatctattcacccagtttaacaatgtgttgactgattttgatagagacatgtggtcctatatatcattaggctacttcaagcagataccaaaggctggtgaagttggttcttccactatgcctcataaaatcaaccccattgattttgaaaatagtgatggcaatttatgtcaagcgaattctatattgtctggtataagcatgaaactaccaatatcccggttgcagcgtgacctaacagactcgactgttttgagaaacctgggtatgggattaggtcattctctattggcttacaaagctaccatgcgtggaatcagcaaggttcagttgaatgaatcacgtttagctgaagacctggagcaaacttgggaggtccttgctgagccaatacagacagtgatgcgaagatatgggatacctgaaccttatgagaagctgaaggaactgacgagaggccaagctgtcaccaaggacagcatgcagcaattcattaatggtctagacataccggaggaggttcgatcgaagctttcgaagctaaccccgcattcctacactgggctagcggaggatttggccagagacatcgagaagtgggttgatcttgaatctggatttcagatcaagtgagctcccatttgacaacaatggagaaaataaataacagacgggaaccctaggaaacgagaatccaatgctggaaccaaggtgccgtttggttcacaaatttgtaacgtaatgggtaacgaataacgttaaatcatgtttgttttagtccaactgtaatcgaatactacactaaaaattgataccagcctattcaaatttgttaccgccagtaatcgaacgtaaaccattaccatttgcgttacatttcttgaaccaaacagcacccaaatgcgaattactgctacaataaacatcctacaagtaatggtcggtcggagcgttatgtttc

SEQ ID NO: 84096 - DNA, 2539 bp, Zea Mays
ggtgtccatttgtggtttttatgcccagccatctccgcccactccccgcactcccaccgtatcctcccctgcgtagggtttaaccactcgcagcagccgccgtgactcgagaatcatgtcagcgccgccgtcgctcaagaccccggcaaccgccgtagcggtctctcggcgctcggtcgccaccccgagagccaccgggcttcgcggcgcctgtgctcccccgactcggcgcctccggtgctcagcctccgccgccgtggccggggcttccaccgagatggctgatgctccgctggactgggcagagaggtcgctggaggagttacacagcttgccggaccacgacacgttctgcttgatggcgctctcgccgctggacgggcggtacgatcgcttcgtcaaggagctgatgccctttttcagcgagttcggcctaatcagataccgcgttctcatcgagatcaagtggctactgaaactttctcaaattcctgagatcactgaggtgcctcagttcagcaaggaagctcagtccttgttgaatgccattattgagaatttttgcatagatgatgcaaaagaagttaagaaaatcgagaaagtaaccaaccatgacgtgaaagccgtggagtactttctgaagcaaaggtgcagctcaaatccagagattgcaaaggtgtcggaattcttccattttggttgtacctctgaagatattaacaatctatcacatgcattggctttgaaagagggggtaaataaagttatgttccctgccatgatcgatctatgcagagcaatgtgttccttggcaacacaaaattcaggctaccctatgttggctcgaactcatgggcagccagcatcaccaacaactgtgggaaaggagatggcaaacttcgcggccagattatctgatataggaaagagtttctcagaggtgaagatactagggaaatttgctggcgctgttggcaattacaatgctgatgtggttgcatatcctgaagttgactggcctaaggtggcagaagagtttgttagatccttgggtttgcagtttaatccctatgttactcagattgagcctcatgactacatatcaaagctcttcaatctattcacccagtttaacaatgtgttgactgattttgatagagacatgtggtcctatatatcattaggctacttcaagcagataccaaaggctggtgaagttggttcttccactatgcctcataaaatcaaccccattgattttgaaaatagtgatggcaatttatgtcaagcgaattctatattgtctggtataagcatgaaactaccaatatcccggttgcagcgtgacctaacagactcgactgttttgagaaacctgggtatgggattaggtcattctctattggcttacaaagctaccatgcgtggaatcagcaaggttcaggtaggtgacccagagcttgtcctttgtctcgttacagatgatatagttggttacagatgatatattcgtatcttcaatatagttgatgcatacttaatttttagcttatggttattaaatacttgcagaatgcttgatgatcaaagcagatagatgtacctcaccacttgctcttttcataagtgttggcctaacaggggaaaaatacactataaattagtggtgactgctaggcgtaggtatttacccaactaaaagatcacaccactcaaaccagctgaggattactgacttggtaggataaggaagttcctttgtgcagtgctcgactgcacacacttgcattcttggacaattgcatgggaatgtcagacgtttgctcttctttactattgacctgaaacatgcgttgtatgtaattatgatcaggctagaactactatgctgaattggtgcctttacagttgaatgaatcacgtttagctgaagacctggagcaaacttgggaggtccttgctgagccaatacagacagtgatgcgaagatatgggatacctgaaccttatgagaagctgaaggaactgacgagaggccaagctgtcaccaaggacagcatgcagcaattcattaatggtctagacataccggaggaggttcgatcgaagctttcgaagctaaccccgcattcctacactgggctagcggaggatttggccagagacatcgagaagtgggttgatcttgaatctggatttcagatcaagtgagctcccatttgacaacaatggagaaaataaataacagacgggaaccctaggaaacgagaatccaatgctggaaccaaggtgccgtttggttcacaaatttgtaacgtaatgggtaacgaataacgttaaatcatgtttgttttagtccaactgtaatcgaatactacactaaaaattgataccagcctattcaaatttgttaccgccagtaatcgaacgtaaaccattaccatttgcgttacatttcttgaaccaaacagcacccaaatgcgaattactgctacaataaacatcctacaagtaatggtcggtcggagcgttatgtttc

SEQ ID NO: 84097 - DNA, 2177 bp, Zea Mays
cgtgtcctctcccccgcgcttcccttcaacgccgcctccctaaagatccaccgcttctctgccctctgctcgtcgattcggcgcctcctctccttcacgcgcccacgctgtcgtcgcctcctcctcactgttgtccatgccgctgtagccgcctacggccatggccgctggagccagcgactatttgacggtggagtaccactccagagactcccctctttcccctccgacgacgagagagccaccggcggcagcggcgtcctcgtacaccacggtgggcacggtgggcgatcttctcatgaagtggtggtagtgcctcgtggacgtcgacggagacgcggcgtgcctgcccctcgtcctcctgctccttgtcttctccgccgccccgtctccggctgacggctgcgatcgctgcgtgcgccggtccaaggccacctattaccaggcctcctcgctcgccctcaacggtggggtcgtccaactggcggttcatggcgcgggaccatgggccggcgtggagcacgacgcaggcgccgccggggccgctgcagttccggctggtggtgacaggttgctatgacggcaagtgggtgtgggcggagttggaggtgctgccgcgccggtgggaggccggccgcgtctacgacgccggggtgcaggtctccgacgtctcgcgggaagggtgctacctctgcgacacgcacaagtggcagtgacgcgcgcacgagctggattgtacagttttttgttttggtcgggaatgggacgaaagatatgaaatgatgatgagcggagccggagagccgaatcaaatctattaatcggtggcgctggaagggtgctgccgtcgattcctctaccggtggcactggaacacaagtaaccggcagttgccgaccattaccaagatctctaaagggcttagattaattagataatccagcataagcacaaaacgttaatctcaaatctattagcagatataatattgtttgtgtgacattgtactgttttgtttcttaaacaaacgtcattctacaaattttgcatctgtccctgtagggcgcccgtaagggcgccgcctgttctagtatgactaatggtcgatcccgtagtaaaaagctgtctccaatcccaggctacctgaacctacgaagagccgactcaaccgctagtacagtccacacatgacacaacgacaccaactgtcctcaatccagcagccctcgagtctcgtccccgcacatcagcagagagacgccactaccaccaccgcaagcgacgacggggagatgtttctgcgacggatcctgaccggcggaggtggcctggcggcgctgagggcggcgcgcgccgtgaaggagacgacggggatcgtcggccttgaggtggcgcccaacgcgcgggaggttctcatcgggctctacacgcgtacgctcaaggagatcgaggccgtccccaaagacgagggctaccgcaaggccgttgagtccttcaccaatcaccgcctccagatctgccaggaggaggacgactggaagcgcatcgaggaccgaatcggatgcgggcaagtcgaggagctcatcgaggaggccgaggacgagctcaagctcatcgccaaaatgattgttcgttttaatgtgattctttgtttgaatgaatggcagaatgggatccgtggggtgtccctgatgactacgaatgtgaggtgattgaagacgacaccccaattcctaagcatgttcctcagcaccggcccgttgctcttcctgaggagttcttcaagacactagatgccgtcaaatcagatcccgccctccaaggcgatgctcctcctcaagtgaaggcgtaaagatgagtcttcccggttatgtcttatgtcatttcacactttgctgcgctgggtagggactagtttcttgtgccatttgccagcaatgtgcttgttccgagcagaataaatttctggcgagtaccatcgaagagtgactttgaacgaagtgattcgacacagtaaatttgttgttgtccatgaatacttgctctgaacatcgcttgccgatgaaatattgaatgctaggtagagttcattgcctggtgctgccggcaccggagacgcaacggccatgggagccgtggctagcgtaacctggctcgccataaaatatcgttatgct

SEQ ID NO: 84098 - DNA, 2549 bp, Zea Mays
gaacgtgtcctctcccccgcgcttcccttcaacgccgcctccctaaagatccaccgcttctctgccctctgctcgtcgattcggcgcctcctctccttcacgcgcccacgctgtcgtcgcctcctcctcactgttgtccatgccgctgtagccgcctacggccatggccgctggagccagcgactatttgacggtggagtaccactccagagactcccctctttcccctccgacgacgagagagccaccggcggcagcggcgtcctcgtacaccacggtgggcacggtgggcgatcttctcatgaagtggtggtagtgcctcgtggacgtcgacggagacgcggcgtgcctgcccctcgtcctcctgctccttgtcttctccgccgccccgtctccggctgacggctgcgatcgctgcgtgcgccggtccaaggccacctattaccaggcctcctcgctcgccctcaacgccgggtcgtgcggggtacggctccttggccgcgtccttcaacggcggcctgctcgccgcagccagccccgagctgtacaggggcgccgtcggctgcggcgcctgcttccaggtgcggtgcagggacagcgagctgtgcatgtgacggaccaggcgcggacgtcaaaccgcacgaccctggtgctgagcgccgcggcgtacgcggccatggccagcgccggcaaggccgcacgcctcagggaccggcgcgttgtcgatgtcgagtacaagagggtaccttgcgggtacatgaaggaccgcaacctatcgatacgcgtggaggagaagagccggccgccaagcaacctatccatcaggttcctgtaccagggcggccagaccgacaccgtcgccgtcgacatcgccactgtggggtcgtccaactggcggttcatggcgcgggaccatgggccggcgtggagcacgacgcaggcgccgccggggccgctgcagttccggctggtggtgacaggttgctatgacggcaagtgggtgtgggcggagttggaggtgctgccgcgccggtgggaggccggccgcgtctacgacgccggggtgcaggtctccgacgtctcgcgggaagggtgctacctctgcgacacgcacaagtggcagtgacgcgcgcacgagctggattgtacagttttttgttttggtcgggaatgggacgaaagatatgaaatgatgatgagcggagccggagagccgaatcaaatctattaatcggtggcgctggaagggtgctgccgtcgattcctctaccggtggcactggaacacaagtaaccggcagttgccgaccattaccaagatctctaaagggcttagattaattagataatccagcataagcacaaaacgttaatctcaaatctattagcagatataatattgtttgtgtgacattgtactgttttgtttcttaaacaaacgtcattctacaaattttgcatctgtccctgtagggcgcccgtaagggcgccgcctgttctagtatgactaatggtcgatcccgtagtaaaaagctgtctccaatcccaggctacctgaacctacgaagagccgactcaaccgctagtacagtccacacatgacacaacgacaccaactgtcctcaatccagcagccctcgagtctcgtccccgcacatcagcagagagacgccactaccaccaccgcaagcgacgacggggagatgtttctgcgacggatcctgaccggcggaggtggcctggcggcgctgagggcggcgcgcgccgtgaaggagacgacggggatcgtcggccttgaggtggcgcccaacgcgcgggaggttctcatcgggctctacacgcgtacgctcaaggagatcgaggccgtccccaaagacgagggctaccgcaaggccgttgagtccttcaccaatcaccgcctccagatctgccaggaggaggacgactggaagcgcatcgaggaccgaatcggatgcgggcaagtcgaggagctcatcgaggaggccgaggacgagctcaagctcatcgccaaaatgattgaatgggatccgtggggtgtccctgatgactacgaatgtgaggtgattgaagacgacaccccaattcctaagcatgttcctcagcaccggcccgttgctcttcctgaggagttcttcaagacactagatgccgtcaaatcagatcccgccctccaaggcgatgctcctcctcaagtgaaggcgtaaagatgagtcttcccggttatgtcttatgtcatttcacactttgctgcgctgggtagggactagtttcttgtgccatttgccagcaatgtgcttgttccgagcagaataaatttctggcgagtaccatcgaagagtgactttgaacgaagtgattcgacacagtaaatttgttgttgtccatgaatacttgctctgaacatcgcttgccgatgaaatattgaatgctaggtagagttcattgcctggtgctgccggcaccggagacgcaacggccatgggagccgtggctagcgtaacctggctcgccataaaatatcgttatgct

SEQ ID NO: 84099 - DNA, 2058 bp, Zea Mays
ccaacagaagatacatgaattttgttttatgatctatacttgctagtgactataggacttttgcaatttttgccgcaagttaaggcctttgtctgagggtttgaaaaccgaaaaataaaaactcgaaatagcctaataccagaaccagtatgggctggatcagctcacacagacaatctcgtagtggcatgggcctaacttaccacacggtggttagcccactgctctaataagtcggtaagttcgaacgaaggactcgaagccacgtgtaacaacagcccaacacatcctgattccaccaaccccttgttcatttcctttcctccagttcctcgtcttctacgcagacccccgttgaagcctagggtttagcggctacacttctcttctagctagttggcgaccaccgtttacgctaaaccacccgcgcggccgatggacgtcgactcggacccggccgcctcgagcaagcccacgcagcaatttcaagaagaagcctgtgattatcatcgtcatcggcatggccgggacggggaagacgaccttgatgcaccggctggtatgcgatacacaagcatcaaataagaggggctacgtcgtcaacctggaccctgcagtgatgaccctgccattcggtgccaacattgatattcgtgacactgtgcggtataaggatgtgatgaaggagtacagccttggtcccaatggcggcatcctcacctcgcttaacttgtttgccaccaagttcgatgaggttgtatctgtcattgaaagacgtgcagaacaattggattatgtactggtggacactcctggtcagattgagatcttcacttggtcagcttcaggagctatcattacggaagcttttgcatcgacgtttccaacagttgtagcatatgttgttgacactccgagatcaacaaaccctgttacttttatgagcaacatgctttatgcctgtagtattctctacaaaactcgccttcctctagtcctgacattcaacaaggttgatgttgccaagcatgagtttgccattgaatggatgcaggactttgaggcatttcagacagctgtggaatctgacaaatcatactccgctacatatacccgaagcctctctctggttcttgacgaattctacaataatttgcgctctgttggagtatctgcgatttctggttctggagtcaatacattttttgaagctatagaagccagcgccaaggaatacatggaaacctacagggctgatcttgacaagaggattgctgaaaaggaaagattggaggaagagcgcaggaaggagaatatggaaaaattgcagaaagatatgatgaaatccaaaggacaaactgtggtgctcaccactggtttgaaggaaaaaaattctgtttcagacatgatggatggtgctgatgaggaggaagaagaggaagcattggaagattttgggttttctgaggatgatgaagacgaagacgaaggagaagatgaggaggtggctcattttggcttttgaggggatccaatagttacttgttggtgtgtcttactgagagtccatatggggctacttgctgaagtggaatgaagaactgtcaatatcagtaggttgttgactttgctattagtctactcttttaaattctggtgccccactgctggctatttatgctatatatttgggacctcatgtcaaagtttatctcgtcgctgagctgtactaatcatattaattgtacgtgcgagtaagaagttgatgggtcaagttgtgtgtgtaatcggttgtgccacaacctgtacctaatccttcgcttcgcttaccacttaccaacatcccaccagtctttttgctgatgaactcggaaggaaagagtcacgaggatatgagtatggtagaaattctagagtacgaataatactatgtttaaggggaagcgaatatgtttggtataaatgtaatctacaatcgaactggctatcactcgactttttatgtggtggcggcatcactgtcacttcaatgaaatgcatgagttaacacatcaagcc

SEQ ID NO: 84100 - DNA, 1126 bp, Zea Mays
ccaacagaagatacatgaattttgttttatgatctatacttgctagtgactataggacttttgcaatttttgccgcaagttaaggcctttgtctgagggtttgaaaaccgaaaaataaaaactcgaaatagcctaataccagaaccagtatgggctggatcagctcacacagacaatctcgtagtggcatgggcctaacttaccacacggtggttagcccactgctctaataagtcggtaagttcgaacgaaggactcgaagccacgtgtaacaacagcccaacacatcctgattccaccaaccccttgttcatttcctttcctccagttcctcgtcttctacgcagacccccgttgaagcctagggtttagcggctacacttctcttctagctagttggcgaccaccgtttacgctaaaccacccgcgcggccgatggacgtcgactcggacccggccgcctcgagcaagcccacgcagatggacctcgaggaccagacggacacaaaggggaagggaaaggcggaggaggggaacgggaagggcgaggagctcgcggactccatcggtagcctctctatcggcccggggcgcaccaatttcaagaagaagcctgtgattatcatcgtcatcggcatggccgggacggggaagacgaccttgatgcaccggctggtatgcgatacacaagcatcaaataagaggggctacgtcgtcaacctggaccctgcagtgatgaccctgccattcggtgccaacattgatattcgtgacactgtgcggtataaggatgtgatgaaggagtacagccttggtcccaatggcggcatcctcacctcgcttaacttgtttgccaccaagttcgatgaggttgattgctataattttttcatcactctactgccaattcctgctgttttggtagcttttcatagtactgctggccagttagtcttttcatcactctactgccaattcctgctgttttgatagcttttcatagtactgctggccagttagtctgtttattagttctatctgttatctctccacctctaagttaacaagcattcgaagtggaaacttgtaccccattcatcttcaggtatgcctgttgtttagccct

SEQ ID NO: 84101 - DNA, 1535 bp, Zea Mays
gtgcgtaggaggaggagcatatatatcctcgtgctgtgccgtccacgccattggccggcccgcccccgagaacagctagctgaactgaaggccgcccgccgtcctcttttagtttagctagcctgcaagcttgctaccttaccggccccgtccaatccaaagctccactgcacccgcccgtcacgaatttcctgcaaagtggtttcctttcctttttttctcgtctgaaagagaaaccggcaggccggaagaggccaaactgaaacggaaaccacggaggcggaggaggaggagatgcctagcccaccacgtgggcggataatgccggggcccacctgtgcccaactataaaatctttggcggggggcggctgcggctcgacgctttctcgcgcatgacgtggcctggaacgcaaagatctccgtccctgtcgcgtcctcttccgagtcactggatcttccctaggctccgaactagggccgcggcagggccaggcgaaaaccgaattttatcggcgcgtcgtatgcgcttggagtataaccaggcatgatggatgaatggagctaaatgttcatgagaaagtgttaataaaagtaaataataactagagattgattttaaaagatgtctttgtacaccctttctctgatagtacttatatctataactctttgtaactgtttccttgggtggattggtactttggaagcgcaaatccggacctcgcccccactctcactttccctctgtatttgggcggcatcttcaacttagtcttcgatctcctcggctccttacctccttctggctggaccggtggtgttcctatatttgagatctctctctctctctctctctctctctctctcttctctcactctactcagcctaacctcttggtatatggagtgagttttcgaccatagtcttgattggcgtcttcgccctcgcttcactaacgtgaccttcgcagagcttgctcttctgccacaggttcgcctttcgggctgcaatgacgacagaaggatgcttcactcggggaggctcctctcctcaaaaggcttctatgaacacatgcttaacacccggaagaacctgcgcaggaagaatatcctgcctgatgggaagtgttcacgctgtggcggtaatgtggaagacaggttgcacgtcttcgtttcttgttccagggccagcatctcctggagattggcgggctttaggattaatggcgttgaaggattccccctctttcctcctatcatccctcatgacgccatctttagaatatccttggcactattctctagaggctgtgggagaataggaacaatctcatcttcgaaaatgaggaaccccgtgtacgtgtgatcctagctagggttgtcaatgatctttctatatggcgccaccgtttctctgctcttgccaaaggttttattagtcgctggtgcgcacatgtaaactctgaaaaccttgtacctcgcttaagcattcttctcgaatgcgtcttttattctataaatgacaggtttcat

SEQ ID NO: 84102 - DNA, 1545 bp, Zea Mays
gtgcgtaggaggaggagcatatatatcctcgtgctgtgccgtccacgccattggccggcccgcccccgagaacagctagctgaactgaaggccgcccgccgtcctcttttagtttagctagcctgcaagcttgctaccttaccggccccgtccaatccaaagctccactgcacccgcccgtcacgaatttcctgcaaagtggtttcctttcctttttttctcgtctgaaagagaaaccggcaggccggaaggtcggtaatgaggccaaactgaaacggaaaccacggaggcggaggaggaggagatgcctagcccaccacgtgggcggataatgccggggcccacctgtgcccaactataaaatctttggcggggggcggctgcggctcgacgctttctcgcgcatgacgtggcctggaacgcaaagatctccgtccctgtcgcgtcctcttccgagtcactggatcttccctaggctccgaactagggccgcggcagggccaggcgaaaaccgaattttatcggcgcgtcgtatgcgcttggagtataaccaggcatgatggatgaatggagctaaatgttcatgagaaagtgttaataaaagtaaataataactagagattgattttaaaagatgtctttgtacaccctttctctgatagtacttatatctataactctttgtaactgtttccttgggtggattggtactttggaagcgcaaatccggacctcgcccccactctcactttccctctgtatttgggcggcatcttcaacttagtcttcgatctcctcggctccttacctccttctggctggaccggtggtgttcctatatttgagatctctctctctctctctctctctctctctctcttctctcactctactcagcctaacctcttggtatatggagtgagttttcgaccatagtcttgattggcgtcttcgccctcgcttcactaacgtgaccttcgcagagcttgctcttctgccacaggttcgcctttcgggctgcaatgacgacagaaggatgcttcactcggggaggctcctctcctcaaaaggcttctatgaacacatgcttaacacccggaagaacctgcgcaggaagaatatcctgcctgatgggaagtgttcacgctgtggcggtaatgtggaagacaggttgcacgtcttcgtttcttgttccagggccagcatctcctggagattggcgggctttaggattaatggcgttgaaggattccccctctttcctcctatcatccctcatgacgccatctttagaatatccttggcactattctctagaggctgtgggagaataggaacaatctcatcttcgaaaatgaggaaccccgtgtacgtgtgatcctagctagggttgtcaatgatctttctatatggcgccaccgtttctctgctcttgccaaaggttttattagtcgctggtgcgcacatgtaaactctgaaaaccttgtacctcgcttaagcattcttctcgaatgcgtcttttattctataaatgacaggtttcat

SEQ ID NO: 84103 - DNA, 1398 bp, Zea Mays
atggccgccctcatttccgctctcctcttcgccgccctgctcgtggctgcccagtacatgctccgcttgctccactccttcctgtgggtccctctccgcttggaacgccgcttccggcggcagggaattcggtggccaccacgaagcctggtctccggtaacgtagctgactaccgcgacttgctagccgccgccaggtccccgcccctctcctccttccgccacgacggcgtcgtcgcccgcgccacgccgcagtacgcgctggtgatctccgacccggagctcgtgaaggccgtgatgactgactccacgggggcctttgataaggcggcctcgggcggcaacaacccgctcgccaggcagctcatcggcgaggggctcgtcgggctctccggggagacgcgggcgcgccaccgccgcgtgatttcgccgacgtttaacatggagagggtgaaggcttggataccaggaatagcagctgtgacatcatctgttctggataagtgggaggccgaaggtgggagccgcactgaatttgagatcgatgtccataaagcattccacgctttgagtgcggatgtcatttcctgtgggcatttggaagcagctacgaggaggggaaacggattttccagttgcaggaggaacagatgcaacttgctcttcttgcaatgaggactgtttatattcctggcttcaggtttgtaccaacaaagaagaaccgaaaaaaggcagaggttaaactaggaaatccaatgctccttgcgcaaattgatcgaaatcaatggaacaaaatgtgaggactcaaaaaatttgctggggttaatgctatcagcgaacctgttgacatgggcaacacttcttcttgcgttgcatcaagagtggcaggtcaaggcccgtgatgaggtccttaaagtgtgcggaaagcatgagcaccctaatgcagaaaacctgagcgatctcaagattgtaactatggtgttaaaagaaaccctcaggctgtatcctccaactacatttatcaatcggactgccaccaggaatatcaagctgggtaaactagacatcccgactggcacacggctggacttccctatcattcacatccatcgtgaccatgaagtctggggcatggatgcagaggagtttaatccatcaaggtttgcagatggcagcagctatcacctaggtgcttacttcccctttaggatcggccctacaatttgcgttggccagaatcttgcaatggtcgaggctaaggtggcgcttgcaatgacccttcagcggtttgcgttcaccgtttcggcgtcttatgctcatgcaccgatgttggtgttcaccctccagcctcagttcggtgctcaggttcttgtccagaagatatgagccttctatgtg

SEQ ID NO: 84104 - DNA, 1109 bp, Zea Mays
atggggagggcgccgaggggtgtgtggaacatggagcttctggggcttgccgtcttggtggttcttgcggtggtcgccgagacgcggtccttggagaagcagaatctgtgcggtgggtgtggggttggtggcgggggaggatatggcggaggcggtggcggtggcggtgaccttgggcttggtggtggccttgggcacggtgtaggggttggaattgggattggaggagggaatggtgggggtgcaggtggtggaggcggcctcggtggtggagctggaggtggcttaggcggaggcggagggcttggtggcggtggaggaggtggttatggcggaggtgctggcggaggcggcggccttgggggtggttccggtggaggtctcggcggtggtgaaggcggaggaggcgggcttggtggtggtgccggtggaggcggtggtcttggtggcggaggaggagctggtgggggagcaggtgcgggtggcggctctggcggaggcgccggtgcaggaggtggcgctggaggcggctatggcggaggtgccggtgcaggaggtggcgccggaggcggctacggcggaggagctggtggtggtgccggtggtggctacggcggaggcgctggtggaggctacggtggtggtgcaggtgctggctctggcggcggcggtggttatggtgctggtggcggaggtggaggtggcatcggcggcggtgtctgaatcagcgtctcacatgcatgcatggtggtgcaagctgcaagcagaagcaagtgctcgaactcgctcggtattcccttcgcaggggtgcgtggacgtggagtcgagctataccgatcgatatccgggatcatactctctgcgtagcgaatagcgatcatagtaataacagaataaggatgctgcaatacgtctaatcagtcatcattatacgatggtttatacggtatatatacactgcgttggtagcaagctgaaagattactttgtatcgtactattttaattatattttgtggagataaagaaattattatgagctacatggagttcatgcttgcttaatgcttgctgtatgtatgtactatgtgctacaaagtgaaaaggccg

SEQ ID NO: 84105 - DNA, 654 bp, Zea Mays
aatatggcgttaaaagattgaaagtaaggactcactttagtaagctacttctgcaaaagtataagttgatttttgctaaagcctctccttgactcctatttatccagcatacccttgagagtcttttccttagtcgggtaagacttgctgagtaattccatactcagggttttattccctgttgtttttcaggttctaactttgtgctgttgttgatggtgttaagtgccggtgggctcggccttcttataagtctaagtacttcttctatacttcttattgaggatggtcacttgagctagcatatatttcaaacttatacttttgtaatcactccgataaaataatgtaaatttttttatataacctgtaaaatttggtaataagatttccgctgcaaaaatgttgtgtgtgtgatttgtgttacttaatcccgcggttctggttgtaagtggtttatccgatgtccttgggcaatcggacggatcctgttaaattatctggtgcacatgcatagctgtctgaggtctttgagacaaggacaggtgcatgtgggcccaataacttgggaggttctgccacattcagattcggccttcctctccagcggaacacttcattcctctccagcggcacactgacgttggaatgaag

SEQ ID NO: 84106 - DNA, 824 bp, Zea Mays
gccatcggccctatccaattgcgccctggagctcgcttctttggtcgctggccgtagcctctggtgtgcccaacttcatttcctcctctccagccgtcatctcccatgaccgccgcgtcttgccatggagtttctcacgcgcttcttccctgctgcgctcctctgctcggtcgtcccaccccagcgcccttgcagccgagctcccatctcccatggttgcctgctccactgcgccgtcgcccagctactgaccatcgcgcgcgcgccggctaggagctcgcaggcgacgatggtcgcgctccccgaccttgccttggcttcctgctgcagttcgtcagcacctccttgcgccctgtccagcgtcctgctcggttcggttcctttccggcaaccaactgaagctccgccccatgacgtttggatccggtcaccgtgttcaggcagctggccgttcgtcttccactttctcttccttcgttgacctgcccgcttgctttttctctgcgttcctgtgagcgtacgtctccctgtgtgcttaccgtggaagctggccgcgccccttctcggcctcttctctccatggcgctccgccgagtgactcccctgcgcgtctctctctgctcgctcgcgcacagctcacggagcttttcctcgtcggccccagctcagtcgggtctccctggtattccagctcgtcgtcgcgtcattcgtcgtcgacctcgctaaatacgttgtcgcttggtcctgtgtcgttaggctaatcaaccatgttcgctgccgcgcgcgcttgtctctaatactgctcgcgtggtatttggatctcg

SEQ ID NO: 84107 - DNA, 2295 bp, Zea Mays
gtaatggtatagatctaaattggtgatcttttaatggtcacacacagctaaagagatcaaatggggtggcgcaaaacatcaccctgaggataaggatgatggtcagaggatgcacccacggtcatcattcaaggcatttcttgaagtggttaaaagcagaagcctgtcctgggagaatgcagaaatggacgcaatacattccttgcagctcatattgcgtgactccttcagagatgctgcagagggcactagcaactcaaaagccattgtcaatggacaacgtcaacttggggagctagaattgcgggggataaatgagcttagctctgtagcaagagagatggttcgattgatagagacagcaacagtacccatatttgcagtagatactgatggatgcataaatgggtggaatgcaaagattgccgagttgacaggcctttcagttgaggaggcaatgggcaaatctctggtaaatgatcttatcttcaaggaatgtgatgatatagtcgaaaagctactctcgcgagctttaagaggtgaggaagacaaaaatgtggagataaagctgaagacatttgggtcagagcaatctaagggtgcaatatttgttattgtcaatgcttgttccagcagagattacacacaaaatattgttggtgtctgttttgttggacaagatgttacaggacaaaaggtggtcatggataaatttatcaacatacaaggggactacaaagctattgtacacaatcctaatcctctgctacccccaattttcgcatcagatgagaacacttcttgttcagaatggaacacagccatggaaaaacttacaggatggtctagagaggaagttgtcggtaagtttcttattggagaagtgtttggaaattgttgccgactcaagggcccagatgcattgacaaagttcatggttgtcattcacaatgctatagaaggacatgattctgagaagttccctttttcatttttcgacaagaatggaaagtatgtgcaggccttattgacggccaacacaaggagcaaaatggatggtaaatctattggagccttttgtttcttgcagattgcaagcgctgaaatacagcaggcatttgagattcagagacaacaagaaaagaagtgttatgcaaggatgaaagaattggcctatatttgccaggagataaagaatcctcttagtggcatccggtttaccaactctctattgcagatgactgatttaaatgatgaccagaggcagttccttgaaactagctctgcttgtgagaaacagatgtccaagattgttaaggatgccagtctcaaaagtattgaggatggctctttggtgcttgagaaaagtgagttttctcttggagacgttatgaatgctgttgtcagccaaacaatgtcattgttgagggagagggatttacaacttattcgagatatccctgatgaaatcaaggatgcatcagcatatggtgatcaatttagaatccaacaagttttggctgacttcttgctaagcatggcacagtctgctccatccgagaatggctgggtagaaatacaagtcagaccaaatgtaaaacagaattatgacggaacagatacagagcttttcatcttcaggtttgcctgccctggtgagggcctccccgctgacattgtccaggatatgttcagcaattcccaatggtcaacccaagaaggcgtaggactaagcacatgcaggaaaatcctcaaattgatgggcggcgaggtccaatacatcagggagtcagagcggagtttcttcctcatcgtccttgagctgccccaacctcgtctagcagctggtagagaaaatcagctgatatgttaagatctgcgctgacaccacctaacttctaggtcgattaggtaacttaggtggtgtttgtttgggattataatctgcctaaattatataatcagtgttagttcaaaataaggtagattatataatctggtcagattataatcccaaacaaatagacccttagctccctgataagagggtgcctaatttacaagaagcctggaaacaaatgaatgctgccatggcaattcaatggttgagtgttgatgaggaggctgtttttcggtgcgccgctgtaagtttgggtatccatgctgtggtttcaagatcagagttcatggcagatagttatgtacacaggcggcaaatttggttcttagcttaggttgatgaccagtttcacttagtacatcttatatgtatactaggtggatgcccgtgcgttg

SEQ ID NO: 84108 - DNA, 4304 bp, Zea Mays
cgagccccgatcccctagtaccatccccatcacagccatcgtcatcggcgcatcgcctcgcgcgcaatatccttggctccacgccccccactttacatccccacttctttattggaacaattggatctataccattaaaagatccaaactttagatatataccatggaccccacgtgttattaactcatgtggacccacatgtaagtgagatagtaatggtatagatctaaattggtgatcttttaatggtatggatccaaatttttcttctttattttatcctcgtgaatcaatgagcgcagcgaggaacggtgaagcaaagctaaggtatcggacgaacacatagggggcgagcgagccgactgacgagcacaagaccggcggacggggccgcctaatccagtgagagctcccccaagcgccatggcgtcggacagtcgcccccccaagcgctccccctccgcgcgacgcgtggcgccgcgtcacgcgcaccaccaccactcgcagtcgtcgggcgggagcacgtcccgcgcaggcgcgggaggaggtggcgggggcgctgcggccacggagtcggtctccaaggccgtcgctcagtacaacctagacgcgcggctccacgcggtgttcgagcagtcgggcgcgtcgggccgcagcttcgactactcccagtcgctgcgcgcgccgcccacgccgtcctccgagcagcagatcgccgcctacctctcacgcatccagcgcggcggccacatccagcccttgggctgcacgctcgccgtcgccgacgactcctccttccgcctcctcgccttctctgagaacgccgccgacctgctcgacctgtcgccgcaccactccgttccctcgctcgactccgtggcgctgccccctgtttcccttggtgccgacgcacgcctctacttctccccctcgtccgcggtcctgctggagcgcgccttcgccgcgcgcgagatatcgctgctcaacccgctatggatccactccagggcctcctccaagccgttctacgccatcctccaccgcatcgacgtcggcgtcgtcatcgacctcgagcccgcacgcaccgaggaccccgctctctccatcgccggcgcagtccagtcccagaaactcgcggtccgcgccatctcccgcctccaggcgctacccggcggggacgtcaagctcctatgcgacacagtcgtggagcatgttcgcgagctcactggttacgaccgtgtcatggtgtacaagttccatgaagacgagcacggggaagttgtcgcagagagccggcgcgataaccttgagccttacctcggattgcattatcccgccacagatatcccccaggcgtcgcggttcctgttccagcagaaccgcgtgcgaatgatcgcagactgccatgccatcccggtgagagtcatacaagatcctgggctgtcgcagcagctgtgtttggtaggctccacgctacgcgctccgcacgggtgccatgcacagtacatggcgaacatggggtcaattgcgtcgcttgttatggcagtcatcattagcagtggtggtgacgacgagcgaacaggtcggggtgccatctcctcatcaatgaagttgtgggggttagtggtgtgccaccatacatcaccacggtgtatcccttttccattgaggtatgcttgcgagtttctcatgcaggcatttgggctgcagctcaacatggagttgcagcttgcgcaccagctgtcagagaagcacattttgcgaactcagacgctattgtgtgacatgctactgcgagattcaccagctggcatcatcacgcagagccccagcgtcatggaccttgtgaagtgcgatggggctgcactgtattatcgtgggaagtactacccattgggtgtcactcccaccgagtctcagattaaggatattatcgagtggttgacggtgtgtcatggggactcaacagggctcagcacagatagccttgctgatgcaggctaccttggtgctgttgcattaggggatgctgtgtgtggaatggcggtggcttatataacaccaagtgattacttgttttggtttaggtcacacacagctaaagagatcaaatggggtggcgcaaaacatcaccctgaggataaggatgatggtcagaggatgcacccacggtcatcattcaaggcatttcttgaagtggttaaaagcagaagcctgtcctgggagaatgcagaaatggacgcaatacattccttgcagctcatattgcgtgactccttcagagatgctgcagagggcactagcaactcaaaagccattgtcaatggacaacgtcaacttggggagctagaattgcgggggataaatgagcttagctctgtagcaagagagatggttcgattgatagagacagcaacagtacccatatttgcagtagatactgatggatgcataaatgggtggaatgcaaagattgccgagttgacaggcctttcagttgaggaggcaatgggcaaatctctggtaaatgatcttatcttcaaggaatgtgatgatatagtcgaaaagctactctcgcgagctttaagaggtgaggaagacaaaaatgtggagataaagctgaagacatttgggtcagagcaatctaagggtgcaatatttgttattgtcaatgcttgttccagcagagattacacacaaaatattgttggtgtctgttttgttggacaagatgttacaggacaaaaggtggtcatggataaatttatcaacatacaaggggactacaaagctattgtacacaatcctaatcctctgctacccccaattttcgcatcagatgagaacacttcttgttcagaatggaacacagccatggaaaaacttacaggatggtctagagaggaagttgtcggtaagtttcttattggagaagtgtttggaaattgttgccgactcaagggcccagatgcattgacaaagttcatggttgtcattcacaatgctatagaaggacatgattctgagaagttccctttttcatttttcgacaagaatggaaagtatgtgcaggccttattgacggccaacacaaggagcaaaatggatggtaaatctattggagccttttgtttcttgcagattgcaagcgctgaaatacagcaggcatttgagattcagagacaacaagaaaagaagtgttatgcaaggatgaaagaattggcctatatttgccaggagataaagaatcctcttagtggcatccggtttaccaactctctattgcagatgactgatttaaatgatgaccagaggcagttccttgaaactagctctgcttgtgagaaacagatgtccaagattgttaaggatgccagtctcaaaagtattgaggatggctctttggtgcttgagaaaagtgagttttctcttggagacgttatgaatgctgttgtcagccaaacaatgtcattgttgagggagagggatttacaacttattcgagatatccctgatgaaatcaaggatgcatcagcatatggtgatcaatttagaatccaacaagttttggctgacttcttgctaagcatggcacagtctgctccatccgagaatggctgggtagaaatacaagtcagaccaaatgtaaaacagaattatgacggaacagatacagagcttttcatcttcaggatatgttcagcaattcccaatggtcaacccaagaaggcgtaggactaagcacatgcaggaaaatcctcaaattgatgggcggcgaggtccaatacatcagggagtcagagcggagtttcttcctcatcgtccttgagctgccccaacctcgtctagcagctggtagagaaaatcagctgatatgttaagatctgcgctgacaccacctaacttctaggtcgattaggtaacttaggtggtgtttgtttgggattataatctgcctaaattatataatcagtgttagttcaaaataaggtagattatataatctggtcagattataatcccaaacaaatagacccttagctccctgataagagggtgcctaatttacaagaagcctggaaacaaatgaatgctgccatggcaattcaatggttgagtgttgatgaggaggctgtttttcggtgcgccgctgtaagtttgggtatccatgctgtggtttcaagatcagagttcatggcagatagttatgtacacaggcggcaaatttggttcttagcttaggttgatgaccagtttcacttagtacatcttatatgtatactaggtggatgcccgtgcgttg

SEQ ID NO: 84109 - DNA, 2673 bp, Zea Mays
ccctacacggcccaggccatccggaacgacgagtccgcgagaccgccacctagcaagccgaggaggcggcgccaattctaggcgtcttcctccgtcacacccggccccgcaaaccctagctcgccccggccctgcctccggctccgcccatcgctgccatgtcgaagcggccgaagcttgagggtttcagcatcccgcggccaacctcctacaacttcgagcgctctcagcccgtgcagcggctctaccgtccgaccgatgacccggacctcgacgacatcgccttctccgacgacgctccgtcagatgccccagccggcaccgcggtggatggaaaggcggagcatgacgaggagatcgacccgctcgacgccttcatggcggagatccaggaggagatccgcgcgccgcccccgccgcccaaggccgaggcgcttcgccgcgcggactccggcgacgatgaagatgaccccgttgagagctttctgcgggccaagaaggatgccgggctcacgctggccgccgacgccatgcgcgctggttatgactccgacgaggaggtctacgccgctgccaaggccgtcgacgccggcatgatggagtacgactccgatgacaatcctatagtcgtcgacaagaagacaatagagcccatacctgcactcgatcactcgaccatcgagtatgacaccttcaccaaagatttctacgaggagaagccgtcgatttcaggtatgagtgaccaagaggtagcagattatatgaaaagtttggcaattcgggtttctggttttgatgtgccaaggccaataaaaaactttgaggattgtgggtttcctgtaccgctgatgaatgctattgccaagcaagcctatcaaaaaccaactacgattcagtgccaggctttacctattgtactttcaggcagagatatcattggtattgcaaagactggttctggcaaaactgcagcttttgtgctccctatgattgttcatattatggatcagcctgagcttgagaaagaagaaggtccaataggagtcatttgtgctccaacaagagaattggcacatcagatatatctcgaagctaagaagtttgcaaagccgtacaaccttcgagttgctgctgtatatggtggtgtttccaagtttgaccagtttaaagaactgaaagcaggttgtgaagtagtcattgcaaccccagggagattaatagacttgctgaagatgaaggcattgaagatgtttagagcaacttatctggtccttgatgaagctgatcgaatgttcgatcttggatttgagccacaaatacgatccattgttggtcaaattagaccaggtcgacaaacattacttttttctgccacaatgccatacaaagtagagcgtttggcaagagaaatattgactgatcctattagagttacagttggtcaagttggtggtgctaatgaagacattaaacaagttgttaatgtaatcccttctgatgctgagaaaatgccttggcttttggagaaattacctggaatgattgatgatggagatgttcttgtattcgcttctaagaaggctagagtggatgagatagagagagagttgaatcagagaggattcaggattgcagcacttcatggtgacaaggatcaagcttctcgtatggagaccctgcagaagttcaaatctgggacctaccatgttctggttgcaactgatgttgccgcacgaggtcttgacatcaaatcgattaaaacagttgtcaactttgatatcgcaaaagagatggatatgcatattcaccgaattggaagaactggtcgtgctggtgacaaagatggcactgcatacactctgattactcagaaggaggcacgctttgccggtgaactggttcaaagtttgattgctgctggccaggatgtacccaatgaactcatggatctggctatgaaggatgtaagattcagagcaaaacgggactccaggaaaggtgggaagaaaggtggcaaaggaaaaggtggcgtcggtggtggtgctgggcgcggtcgtggtgtgcgtggagttgattttggcctcggcataggttacaatgccgaatctggttcacagcagcagtgcaccttccttggtaagaccagcactacgtggctttgtgtctgggggcaccattggaggagacacacggcctgcacagcctgcccccactttcgtaactgcatcctggccagcacaggctgccccctccgtccctgcatcccgccctgctgctggaaataacaatgaaaatgggaacccaaatcccaaaagttcacgggatcggcccagggagagaaaacgaccatcaggttgggatcgttagtccctgctaaccggtgtcttgaattgcgactccttttcctctttgttacattgatgtagtctcttgggggacatcctatataaagcatattgatgtacactgtagattacatgatgtcaggttgtgaatgggaagtgtttttagtgaagtttggcctctccgtcatcttccaactactattgtatctggccgttggttcacatttttcactggagtaaaatcgaccagttgtcctagaacttgtcactaagagcatttccactagattcctaaaaatagctctctcaactcagatttagcaagttg

SEQ ID NO: 84110 - DNA, 3265 bp, Zea Mays
cacagccctacacggcccaggccatccggaacgacgagtccgcgagaccgccacctagcaagccgaggaggcggcgccaattctaggcgtcttcctccgtcacacccggccccgcaaaccctagctcgccccggccctgcctccggctccgcccatcgctgccatgtcgaagcggccgaagcttgagggtttcagcatcccgcggccaacctcctacaacttcgagcgctctcagcccgtgcagcggctctaccgtccgaccgatgacccggacctcgacgacatcgccttctccgacgacgctccgtcagatgccccagccggcaccgcggtggatggaaaggcggagcatgacgaggagatcgacccgctcgacgccttcatggcggagatccaggaggagatccgcgcgccgcccccgccgcccaaggccgaggcgcttcgccgcgcggactccggcgacgatgaagatgaccccgttgagagctttctgcgggccaagaaggatgccgggctcacgctggccgccgacgccatgcgcgctggttatgactccgacgaggaggtctacgccgctgccaaggccgtcgacgccggcatgatggagtacgactccgatgacaatcctatagtcgtcgacaagaagacaatagagcccatacctgcactcgatcactcgaccatcgagtatgacaccttcaccaaagatttctacgaggagaagccgtcgatttcaggagagctgcgtatctttatattaaaagaagatagaaaagagggggggggggttggaacctccgagtacaacccactccacacccacactagctagactagagttacatttgtgcctgagcactaaacggacaacgaccgatgaaagccaacctatctatcaggttgtagggctgacaagagggaaatccctcgagccccgaccaatgactacaaaaaagcctcttcttcagcaaggagcagggccctcgccaaattaggcacagcaccttcaagcacacacaagttccgatgctttcacaaagtccaagcaccaaggataactagggaatggaatccactttggacccgatcatggacttggaaactttctctatgccaccaagcatctaggctatcatcagtctgagcacattagcctagcacccacttgtgttgaaatctttctctataacccgagttatgatgtattgaaaccttttttcttataggtatgagtgaccaagaggtagcagattatatgaaaagtttggcaattcgggtttctggttttgatgtgccaaggccaataaaaaactttgaggattgtgggtttcctgtaccgctgatgaatgctattgccaagcaagcctatcaaaaaccaactacgattcagtgccaggctttacctattgtactttcaggcagagatatcattggtattgcaaagactggttctggcaaaactgcagcttttgtgctccctatgattgttcatattatggatcagcctgagcttgagaaagaagaaggtccaataggagtcatttgtgctccaacaagagaattggcacatcagatatatctcgaagctaagaagtttgcaaagccgtacaaccttcgagttgctgctgtatatggtggtgtttccaagtttgaccagtttaaagaactgaaagcaggttgtgaagtagtcattgcaaccccagggagattaatagacttgctgaagatgaaggcattgaagatgtttagagcaacttatctggtccttgatgaagctgatcgaatgttcgatcttggatttgagccacaaatacgatccattgttggtcaaattagaccaggtcgacaaacattacttttttctgccacaatgccatacaaagtagagcgtttggcaagagaaatattgactgatcctattagagttacagttggtcaagttggtggtgctaatgaagacattaaacaagttgttaatgtaatcccttctgatgctgagaaaatgccttggcttttggagaaattacctggaatgattgatgatggagatgttcttgtattcgcttctaagaaggctagagtggatgagatagagagagagttgaatcagagaggattcaggattgcagcacttcatggtgacaaggatcaagcttctcgtatggagaccctgcagaagttcaaatctgggacctaccatgttctggttgcaactgatgttgccgcacgaggtcttgacatcaaatcgattaaaacagttgtcaactttgatatcgcaaaagagatggatatgcatattcaccgaattggaagaactggtcgtgctggtgacaaagatggcactgcatacactctgattactcagaaggaggcacgctttgccggtgaactggttcaaagtttgattgctgctggccaggatgtacccaatgaactcatggatctggctatgaaggatgtaagattcagagcaaaacgggactccaggaaaggtgggaagaaaggtggcaaaggaaaaggtggcgtcggtggtggtgctgggcgcggtcgtggtgtgcgtggagttgattttggcctcggcataggttacaatgccgaatctggttcacaggtgcctgctccaagatctgctgctataaattcgttgaagacaggggtgatgcaacaatttaagagcagctttgtgtctggatcttcaaacacgccaagcagcagtgcaccttccttggtaagaccagcactacgtggctttgtgtctgggggcaccattggaggagacacacggcctgcacagcctgcccccactttcgtaactgcatcctggccagcacaggctgccccctccgtccctgcatcccgccctgctgctggaaataacaatgaaaatgggaacccaaatcccaaaagttcacgggatcggcccagggagagaaaacgaccatcaggttgggatcgttagtccctgctaaccggtgtcttgaattgcgactccttttcctctttgttacattgatgtagtctcttgggggacatcctatataaagcatattgatgtacactgtagattacatgatgtcaggttgtgaatgggaagtgtttttagtgaagtttggcctctccgtcatcttccaactactattgtatctggccgttggttcacatttttcactggagtaaaatcgaccagttgtcctagaacttgtcactaagagcatttccactagattcctaaaaatagctctctcaactcagatttagcaagttg

SEQ ID NO: 84111 - DNA, 1803 bp, Zea Mays
gcaaatcatcagatggtgactatatgggaatgtatttggttacccaatgtggaatggtttattttcatgattttgtgttaacagaagttttaacctttaagggtctgtttggttgggctgtggctgtgaaaaaagttgctgtgggctgtgagctgtgaaaaaagctgctgtaggctgtaagctgttaaaaaggtaaaaaccgtttggtggaaaccactaaaagtcattaaaaattcttcgatatatgttttcacagttccatccgaaaagccactaaaagcaggtccagaggtgttttcagatttgcactacgagaaagtcagcttttagaaaaagctgcttcctggatctagccctttggttggcttttggcttttagggaggcaaaagccaaagccaaaagtcaaaccaaacacaccctaagtactgaactaagcaaatcttgttgcagtccgcacagctttggtagccttgattgccttcatgccgacgaacccaggtggggcattgggctcactggattacaaaccagaagacagacgagcacttgctataaaatcacgtgaggtgccgccgaaatttggctccccacaacgtcagaaactaattgatgagatccatgagcaaatgctcaacaaggtagatgaaggtggcaacacatccaagtccatgtcaggctcgtcgagtggccatcctgtgcctgaagctgaatcgctggctgcagaaaacacgggtgaagcatcagcagttgaggttgccaaccatcaagtgcctgaagcgagccgtagagaaagcattccaagagttccttcgtctctgcagaatgctgctattgcaacccagaagccaaagcatgacaggctattgaccttggccgcacttgggttgactcttgctattatggcactagtgatcaagaagttcttaaaaatcaatggcttgggcggtttcattgagggcaagttctgagtaggattgtgcataagttggatgtacgagatgactcattcctcgtactcagcatatgctataagctatataaccccgtaagatttgtaattgtttagttatagatgaaatcaaaatggaacggtactatcaataccccattgtatatgtacactggattgaaaattgctgagtatttaagcatctgatgtatatattgtgctacagcatgcactttgtttggctgccgtttaggactgtttagggttaggagaccagaatcgtcaattcccaattttccctcgagggcacatgattaagaaattcatgaaacctggtgttgcagaacctgagttggcactcggaacagtggtgaataggcatggttttccaaacataactgattccatccgtattttttttccttttaagggcatgtacgaatatgagctcttcgattttcaaaatataaaagacagcatatttgaatatcgtatgctaaactttaatataatgctaaaactagccggttgcccgttcgttgcgacggtccacaacaatatttatataaattatccactaaaaagatcttaagattttttattggttgtctccgctccccgcataatatttttgatttgactaactgatgttgttgtttattttatccaatatgtcttggtacaacacgaccaatgaaggcaacgattagaataaagttcacaacgactgactgaacgaaccgagattatagaatgacataattccaccatacagagaccaaataagaggaagtttgtgagctcaagtttctaaaataaatcacatgaacttaaacttataaaaaaagataga

SEQ ID NO: 84112 - DNA, 576 bp, Zea Mays
tctgtggtggggagtggaattcagggggacactgcagggagagcatgctgcccctcaatgacacccgtgctaggccggtgcctgagagaaacttgatcttggaacaggtcacgaagcaaatgaagactcctgtgacagttctgaacgttactaatctgtctggggtcaggatagatggtcacccatctgtatatggccggaagacggtaggtttaaccgcgtcgagcgtccagcaggactgcagccactggtgccttcctggagtcccagatacatggaatgaactgttattctaccatctactgtcgccgcaagaaaaggatgtaacaagttagcgactgaattatttgcccgctctttttttttgttgggtcgggatatttattagtcttgccttgtaaatgttaatttagtttgaaaagagggcgcaagtgcacaatcagccaatcacgtttgtctcggaagtctgcagccaataatgtgacatgcaaataccctactatcaggctctctagtaacactactaatgaatcatcaaatactttcaggaataaagtgtacatttgagtgtttgac

SEQ ID NO: 84113 - DNA, 2474 bp, Zea Mays
atgccgactgccttgactgtcttcgaatgtccaaggaaagtggtttggctggggagtgggggcagacaattacacttactccacaacacccgaagttcccgttccgtttccgttacacagactcccgactccaactccttcattcacctttattattacacggaagccgcaagcacggctagccattgccgcactagccgtcccattgcttcctccccgccgcacagagcaatggagaggcagaggagctcctcctcctcctccccgtatcagtttcttagtcccaagagcctcctcctactgtccttcgcctcctcctccctcctcttctccttcctcttcgcgctcttcgccatccgccacggccgccccctcaacctcccattcaccacgcccaacacctcatactcattcgccatgcccaacacctcatcctcgttcgccatgcccaacacctccaccgcggcccttgcaccgttgccgcctcctgggaacggtgggggttccatgggcggcgcggtggcgctggcagcagaggccggttatgcggtccgtgggcacgggagtggagattcagtggcggatggagcccgccgcgcggttaccggagacctgtccgctcggggcgtgggcccgccaatggaggtggaaggagcggttactggaggaggaaatggtggagcaccggcgactggtaaggttttggaggcgcaagaggttgcaggagctgggaataactctactggaacctcggatttggctatgcatgctaaagaaaaagaagtaaccggtgtgggaggagatgccgacaagttggggaaatttcctgttcggaaggaaaacttggccgagggtagcaggcaacacgttggttgggaaacaaagacgcagctaaatgctggcagtgcttcttcgtcacaggaagtagatgcgtcaatggtgagaccggagggagcagagtctttgacagccgtcaatttgtccatggatgatgaagctgcaatgcaggtgagaggtgaatccgtcgtgcaagacgatgttgtggttgtgggggataagcgctattcctctgtacaagcagcagcttatgcttctgagcaagtggagcagctggaaagctcgcatctttcagcggggaacaatagttccttggcagctccagctccagccaatcaaaataagcaagatcctaatctgattgaggaagaagcggtcacgagcaaaatggattctacacgaagcgataccaaacgttgtgatgtttatgatggaagttgggtgtttgatgacgagacctatccactctacacgagtgactcatgcccttttatagacgaaggattcagctgtggagcaaatgggagaacggatcaaagatacatgaagtggaggtggcgacctaaccattgcaatataccaaggtttgatgctaggaaaatgcttgagacgctgcgaggaaagcgactggtgtttgtcggggactccatcaacaggaaccagtgggagtccatgatgtgcttgctgagaacggctgtcccagatcctggaaggattcatgaaacccgtggccgcaggatcactaaagagaagggtgactacaacttcaagttcttggactacaactgtagtgtggagtatcatgtgacgcacttcttggtgcacgaaagcaaggcgagaattgggcagaagcgcatgaagacgctacggatcgataccatccatcggagctcatcgagatggaaaggtgctgacgtgcttgtgttcaacactgcccattggtggtcacatcacaaaacacagtctggagtgaactattatcaagagggagatcatgtccatccccatctcgatgcctctaccgctttccaaagagcactaaccacctgggcatcctgggtcgacagtcacatcaatccacagctaactcgagtgttcttccgaagctcatccccgtcacatttcagtggtggggagtggaattcagggggacactgcagggagagcatgctgcccctcaatgacacccgtgctaggccggtgcctgagagaaacttgatcttggaacaggatagatggtcacccatctgtatatggccggaagacggtaggtttaaccgcgtcgagcgtccagcaggactgcagccactggtgccttcctggagtcccagatacatggaatgaactgttattctaccatctactgtcgccgcaagaaaaggatgtaacaagttagcgactgaattatttgcccgctctttttttttgttgggtcgggatatttattagtcttgccttgtaaatgttaatttagtttgaaaagagggcgcaagtgcacaatcagccaatcacgtttgtctcggaagtctgcagccaataatgtgacatgcaaataccctactatcaggctctctagtaacactactaatgaatcatcaaatactttcaggaataaagtgtacatttgagtgtttgac

SEQ ID NO: 84114 - DNA, 1551 bp, Zea Mays
atcgcccagaaccgcgctagtactgacaaatccccaagattccgttccaaagccgcgcccggtgctgctggtctggccaaaaccactccctacctaaactgctcgttttgtttcattttggtcaaacaaaccaaggaagccctctgctctgcctcgcactcgcacacaccgtgcaccaccggccggccgggtcgtctcgtctcgtctccactgtccagcctccgccccctgcacctcgccatgtgctgccgccgccaacgcggccccgacgggacgcccgtcgacggcggccgccgccgccgcaggggctgcggggccgtgctcgccgtgctggccctggcggccgccgcggtggtcgcgttcctggagagcacggccggcggggtctcgtacacgggggacggctggctgcacgagtgcgccaagtgggacgccgagggcggccggttcctggcgtccaccttcttcggcggcggcgtggcggaggtgcgcgccggcgagggcgaggagcgggtggtcgtggcggaccccgacgcggccggccgggtcgcgctggggctcgcggtcgacgcgcccaggcgccgcctgctcctggtgtactgcgatcgcccaccgcgcttcggatacgccgcgctcgccgcctacgacctcggatcgtggcgccgcctcttcctcacacgcctcgacgtgccaggcgagtcaacgttccccgacgacgtcgccgccgacgaggaaggcaacgcctacgtgaccgacgccagtggaaacaagatctggaaggtcagcccgagcggcgtgctgctgggcgtcatcaagaactccacgttcgtgcagcgaccagggctgcggcacaacctcgtcggcctcaacggcatcgtgtaccacccgaacggctacctcctcgtcgtccacaccttcggcggcgacctcttcaaggtcgacccgaagacggaggccgtgcacgccgtcaaggtgcaggggtcgctgggccgaggggacgggatggagctgctctccccgacgaggctggtcgtcgccggcacgccgagtagccggctggtggagagctccgacgactgggagaccgcgcgcgtcaccgggcagtacgtcgggccggtccaccgggtcgggtcgtcggcgacggtgaaggacggggacgtgtacatcaaccacattgtcgggtttgggctcggcaagaagaagacgcatgtccttgcgagggcggtgttctcgccgttggccgcagagagttgacggcggccggccggaccctccgtcgcgggatcaccaatcgctttttgcttaaacggcagttcatagttccactcaactccatgagagttacaggctatatatacgtatttcggtgtgattctgtgatatatagatgcttatgcttttgtattgacacgttgctcgaagctgcacgcttcttctgtttgatgcaagcaaaacatgtactacatggtttcgatcaattttcagttcgtattccacaactgccgttttagccactacatcaaccacggcagcttttgcagctaaacaaag

SEQ ID NO: 84115 - DNA, 2984 bp, Zea Mays
gctttgccttccccgcgtcaaacaaatcttgggttccaagcgagcgaataccttctcgagctaagacgattcgaggcacgagcgaagatgccgcagcggcatttcctatataacaaagccggtacaaaatctgcccccacattgatccacgtcaacatgttttgtcccagccgcaagatgctgcatcaacggccacggatgcagctcatccacaccagcgttctctgtgtctgttcgattcctccggcgtccggagcattctagaattgacgaaggtggctgtgccgagttctccacaccgctggagacttccaggtgcttcaggaaaccgagggggcgttgagataggtaaaaaaaaggaactccggcgaggtcgcccccggtagtggccggtgatgagttcgctcgggctccggctccggcttcggcgacctggagcgaggagttcggagatgcagtcttccagcgctcaagcagttttcgacttcgtctcaccgcttcccgcaggtacgaactgttctcttccgctggctctgagcacgaggtggatgtgttccgggaggtggtacagccccgatgcacgacgaggtgctttttgtgagcgtcacaaacagcacctatggtgcccccacgggcgggacgaatgctgtaattgcttcctcgaatgaatgctgaagttttagaataagcgaagggaagaataatacagaggaaagaatcaaagtgcagaatctatattcatccgatggtggcttcttgggatgaatatatattctttcctttaaactctcatgtttattctttacttggatgagtgctgaagttatagaataagcaaaggaaagaatctaaaatacaccatcgtggaatatagattctttcctttgattgaataatacatattctttagccacaattgttttaggtcctcaacacattgcattttagggtgtgatcttgtcaaagtctgcttcggttccaaaaactgaagttatgcaccagtttcagattatgcagttatagagcgatgataggccagttgatttcgggccacatttgtctacagacatactgctcctgactcattcagtcagctaagtataacaacgaatataataactaattatatttgtttcatataacccttccacgttataatctttaatatgtatccactcaaactttgtggtcctcaacacattgcattttagggtgtatttaatgtagtagaatccatacctcacattttggcaacttacacttatgccacttggtgctccaccgatcatagtgccgcttgcggcttagggtgcatttcgtggattccgggatacaatgacaccattgtatgctgtgtgtatgtctttgccacttcattttgacaaaatattgtaacacataacactattttttcccatctagaattgcttacaccttgctatttaaacggatattattttgttgtaaataacttttgtttttttattcaagctactcaatgtaattgattcgaaatgtgagcttcataaatcttaggaagccattgccttttgctgctatggtatattgctttctaagatgcgtgtagctgttataactcataattattctttttaagactcctgagaggaaatttgtgacaaaaatatctgctctggaaatttgtaatgagattgtgaatggccttctacaatctgactctgctccccttcggttattagatgatcctgaggtttgtttacaactttgtcagttattacaatgccccaagaaaacattgatcttgcagtgaactaaatgaaaatattttctgtttgacagaaatgaaccattgtggagaagttgcaagaagaaattgcttaggacaactaacatctgaggcatccaagcaggatttgtgaagcaagctagctgcacatgaggtccagaaaaagcaagagaaggaagaggaagaggagaagctaattctgcagaaggctaaggagttggatgcctttgaccagcagaatcatggacctgttccccagtaccatgatcgcagtggttcgcaagacaagaatgggtttcatggagcaaataatgtgaaggtcacttcttttgaagacgaagcccttcgcaatatgaaggcattctggctcccttcagctactcctgaagctacggtcaaggtagacgtgccctccatccacactgtttgcccggaggggcaggagaagctcaagttgaaatcgctcttccctatctcgttcacggaagaaactgctgatcagaagagcagtaaggcagtggaaaaaaagagctacatgtgccctagttgcaagtccactatcacaaataccatgtcccttgtggcggtcagcacctgtggccatgtcttctgcaagaaatgttatgacaagtttctagtgaaggataaagcttgcttggagtgcagcaaaccattcagggagaggaatctggttccattggagaaaggaggaaccgggtttgctgcacatgatgaacgcctagaggcaagatatttcaagcatttgggtagtggctctgggttaggactagtgaagcctgcaccaaaaacttactaaccttgaataattatagccgttgttgtattgtttaccttggtgtcatgaaattatataacctagaaatgagaactccatcaagttcccaattgccgctgtaacttctatatacatgtatgcagatgttgattttaggtatctttaagaccttaacgacaccactacattaaacggttgccatgtatttgtttatgttgacctatcaacagtcttgttggttaacaaagaatattgaaaactaaagcctacaaaaagaatatgattaaagattttaatactcttctcgttttaaattaatagacgttttgaatattctaaatatattatttttattatatatctagatatagtttatttttaagtttatagaaaaatctatgcattagaaaagataaaata

SEQ ID NO: 84116 - DNA, 2159 bp, Zea Mays
gctttgccttccccgcgtcaaacaaatcttgggttccaagcgagcgaataccttctcgagctaagacgattcgaggcacgagcgaagatgccgcagcggcatttcctatataacaaagccggtacaaaatctgcccccacattgatccacgtcaacatgttttgtcccagccgcaagatgctgcatcaacggccacggatgcagctcatccacaccagcgttctctgtgtctgttcgattcctccggcgtccggagcattctagaattgacgaaggtggctgtgccgagttctccacaccgctggagacttccaggtgcttcaggaaaccgagggggcgttgagataggtaaaaaaaaggaactccggcgaggtcgcccccggtagtggccggtgatgagttcgctcgggctccggctccggcttcggcgacctggagcgaggagttcggagatgcagtcttccagcgctcaagcagttttcgacttcgtctcaccgcttcccgcagactcctgagaggaaatttgtgacaaaaatatctgctctggaaatttgtaatgagattgtgaatggccttctacaatctgactctgctccccttcggttattagatgatcctgagaaatgaaccattgtggagaagttgcaagaagaaattgcttaggacaactaacatctgaggcatccaagcaggatttgtgaaggtaactactagattctgtcaaaaaagaagaaatgaatagtgctaatcacttaacaacctttcgaatagttgcagagcaaatacacaggctgcagagactgcacaacctgtataatctttataatgttctgtgccattcttttgagttatttttttattcagtccatgcgaaaaatgaaccataaaaacattgtgaagctcaaagaggtcataagagagaatggttttttagtttatggtatagacaattcatagcccactaaagtttatagtatttgttgtgatttgaggaacgcggtctattatctgatgaaaagcagagggaagcccttctcagagactgaaatccaaaactggtgctttcaaatatttcaagcaagctagctgcacatgaggtccagaaaaagcaagagaaggaagaggaagaggagaagctaattctgcagaaggctaaggagttggatgcctttgaccagcagaatcatggacctgttccccagtaccatgatcgcagtggttcgcaagacaagaatgggtttcatggagcaaataatgtgaaggtcacttcttttgaagacgaagcccttcgcaatatgaaggcattctggctcccttcagctactcctgaagctacggtcaaggtagacgtgccctccatccacactgtttgcccggaggggcaggagaagctcaagttgaaatcgctcttccctatctcgttcacggaagaaactgctgatcagaagagcagtaaggcagtggaaaaaaagagctacatgtgccctagttgcaagtccactatcacaaataccatgtcccttgtggcggtcagcacctgtggccatgtcttctgcaagaaatgttatgacaagtttctagtgaaggataaagcttgcttggagtgcagcaaaccattcagggagaggaatctggttccattggagaaaggaggaaccgggtttgctgcacatgatgaacgcctagaggcaagatatttcaagcatttgggtagtggctctgggttaggactagtgaagcctgcaccaaaaacttactaaccttgaataattatagccgttgttgtattgtttaccttggtgtcatgaaattatataacctagaaatgagaactccatcaagttcccaattgccgctgtaacttctatatacatgtatgcagatgttgattttaggtatctttaagaccttaacgacaccactacattaaacggttgccatgtatttgtttatgttgacctatcaacagtcttgttggttaacaaagaatattgaaaactaaagcctacaaaaagaatatgattaaagattttaatactcttctcgttttaaattaatagacgttttgaatattctaaatatattatttttattatatatctagatatagtttatttttaagtttatagaaaaatctatgcattagaaaagataaaata

SEQ ID NO: 84117 - DNA, 3161 bp, Zea Mays
gctttgccttccccgcgtcaaacaaatcttgggttccaagcgagcgaataccttctcgagctaagacgattcgaggcacgagcgaagatgccgcagcggcatttcctatataacaaagccggtacaaaatctgcccccacattgatccacgtcaacatgttttgtcccagccgcaagatgctgcatcaacggccacggatgcagctcatccacaccagcgttctctgtgtctgttcgattcctccggcgtccggagcattctagaattgacgaaggtggctgtgccgagttctccacaccgctggagacttccaggtgcttcaggaaaccgagggggcgttgagataggtaaaaaaaaggaactccggcgaggtcgcccccggtagtggccggtgatgagttcgctcgggctccggctccggcttcggcgacctggagcgaggagttcggagatgcagtcttccagcgctcaagcagttttcgacttcgtctcaccgcttcccgcaggtacgaactgttctcttccgctggctctgagcacgaggtggatgtgttccgggaggtggtacagccccgatgcacgacgaggtgctttttgtgagcgtcacaaacagcacctatggtgcccccacgggcgggacgaatgctgtaattgcttcctcgaatgaatgctgaagttttagaataagcgaagggaagaataatacagaggaaagaatcaaagtgcagaatctatattcatccgatggtggcttcttgggatgaatatatattctttcctttaaactctcatgtttattctttacttggatgagtgctgaagttatagaataagcaaaggaaagaatctaaaatacaccatcgtggaatatagattctttcctttgattgaataatacatattctttagccacaattgttttaggtcctcaacacattgcattttagggtgtgatcttgtcaaagtctgcttcggttccaaaaactgaagttatgcaccagtttcagattatgcagttatagagcgatgataggccagttgatttcgggccacatttgtctacagacatactgctcctgactcattcagtcagctaagtataacaacgaatataataactaattatatttgtttcatataacccttccacgttataatctttaatatgtatccactcaaactttgtggtcctcaacacattgcattttagggtgtatttaatgtagtagaatccatacctcacattttggcaacttacacttatgccacttggtgctccaccgatcatagtgccgcttgcggcttagggtgcatttcgtggattccgggatacaatgacaccattgtatgctgtgtgtatgtctttgccacttcattttgacaaaatattgtaacacataacactattttttcccatctagaattgcttacaccttgctatttaaacggatattattttgttgtaaataacttttgtttttttattcaagctactcaatgtaattgattcgaaatgtgagcttcataaatcttaggaagccattgccttttgctgctatggtatattgctttctaagatgcgtgtagctgttataactcataattattctttttaagactcctgagaggaaatttgtgacaaaaatatctgctctggaaatttgtaatgagattgtgaatggccttctacaatctgactctgctccccttcggttattagatgatcctgagaaatgaaccattgtggagaagttgcaagaagaaattgcttaggacaactaacatctgaggcatccaagcaggatttgtgaagcaacgaacacaacgcgcgccaaggcgcgcataagttactagttcgaaaaacaacaacgacctcgccttcttcacgtacgaggagaagcggaagctcgggtacggcacgcagcgggagcgcctgggaaaggactccatcaagcccttcgacgcctgctgcctctgcctcaagccgctcatcggcccgctctgctgccccaagggccacacattctgtaaggagtgcatcctcgagtgcctcctctaccagaagaaggacatcaagcgcaagctagctgcacatgaggtccagaaaaagcaagagaaggaagaggaagaggagaagctaattctgcagaaggctaaggagttggatgcctttgaccagcagaatcatggacctgttccccagtaccatgatcgcagtggttcgcaagacaagaatgggtttcatggagcaaataatgtgaaggtcacttcttttgaagacgaagcccttcgcaatatgaaggcattctggctcccttcagctactcctgaagctacggtcaaggtagacgtgccctccatccacactgtttgcccggaggggcaggagaagctcaagttgaaatcgctcttccctatctcgttcacggaagaaactgctgatcagaagagcagtaaggcagtggaaaaaaagagctacatgtgccctagttgcaagtccactatcacaaataccatgtcccttgtggcggtcagcacctgtggccatgtcttctgcaagaaatgttatgacaagtttctagtgaaggataaagcttgcttggagtgcagcaaaccattcagggagaggaatctggttccattggagaaaggaggaaccgggtttgctgcacatgatgaacgcctagaggcaagatatttcaagcatttgggtagtggctctgggttaggactagtgaagcctgcaccaaaaacttactaaccttgaataattatagccgttgttgtattgtttaccttggtgtcatgaaattatataacctagaaatgagaactccatcaagttcccaattgccgctgtaacttctatatacatgtatgcagatgttgattttaggtatctttaagaccttaacgacaccactacattaaacggttgccatgtatttgtttatgttgacctatcaacagtcttgttggttaacaaagaatattgaaaactaaagcctacaaaaagaatatgattaaagattttaatactcttctcgttttaaattaatagacgttttgaatattctaaatatattatttttattatatatctagatatagtttatttttaagtttatagaaaaatctatgcattagaaaagataaaata

SEQ ID NO: 84118 - DNA, 2726 bp, Zea Mays
gctttgccttccccgcgtcaaacaaatcttgggttccaagcgagcgaataccttctcgagctaagacgattcgaggcacgagcgaagatgccgcagcggcatttcctatataacaaagccggtacaaaatctgcccccacattgatccacgtcaacatgttttgtcccagccgcaagatgctgcatcaacggccacggatgcagctcatccacaccagcgttctctgtgtctgttcgattcctccggcgtccggagcattctagaattgacgaaggtggctgtgccgagttctccacaccgctggagacttccaggtgcttcaggaaaccgagggggcgttgagataggtaaaaaaaaggaactccggcgaggtcgcccccggtagtggccggtgatgagttcgctcgggctccggctccggcttcggcgacctggagcgaggagttcggagatgcagtcttccagcgctcaagcagttttcgacttcgtctcaccgcttcccgcagaaatgaaccattgtggagaagttgcaagaagaaattgcttaggacaactaacatctgaggcatccaagcaggatttgtgaaggtaactactagattctgtcaaaaaagaagaaatgaatagtgctaatcacttaacaacctttcgaatagttgcagagcaaatacacaggctgcagagactgcacaacctgtataatctttataatgttctgtgccattcttttgagttatttttttattcagtccatgcgaaaaatgaaccataaaaacattgtgaagctcaaagaggtcataagagagaatggttttttagtttatggtatagacaattcatagcccactaaagtttatagtatttgttgtgatttgaggaacgcggtctattatctgatgaaaagcagagggaagcccttctcagagactgaaatccaaaactggtgctttcaaatatttcaaggtctgagtcacatgcattagcgtagatatttccactgcgaccttaatctgcaaccttaatcctagtgtatggttttgcatttgttttttacgttcaatgttccaatggtttatctatggttcctgtttgttgtgaaacaaattactagccccaaccatttttacatgatatttcaaacaagaaaatagttctacacgtagttcaatatttatgtctaacatatcatgtgtatttggcagaaggaactatcacttacgagcccagaaatagctgccttgcaatttttctatatgaattgcatcttaaatttgcttgaagtatacaaaaataataatgcacctgtataacagcaacgaagaattgcatcttaaatttgcttgaagtatacaaaaataataatgcacctgtataacagcaacgaacacaacgcgcgccaaggcgcgcataagttactagttcgaaaaacaacaacgacctcgccttcttcacgtacgaggagaagcggaagctcgggtacggcacgcagcgggagcgcctgggaaaggactccatcaagcccttcgacgcctgctgcctctgcctcaagccgctcatcggcccgctctgctgccccaagggccacacattctgtaaggagtgcatcctcgagtgcctcctctaccagaagaaggacatcaagcgcaagctagctgcacatgaggtccagaaaaagcaagagaaggaagaggaagaggagaagctaattctgcagaaggctaaggagttggatgcctttgaccagcagaatcatggacctgttccccagtaccatgatcgcagtggttcgcaagacaagaatgggtttcatggagcaaataatgtgaaggtcacttcttttgaagacgaagcccttcgcaatatgaaggcattctggctcccttcagctactcctgaagctacggtcaaggtagacgtgccctccatccacactgtttgcccggaggggcaggagaagctcaagttgaaatcgctcttccctatctcgttcacggaagaaactgctgatcagaagagcagtaaggcagtggaaaaaaagagctacatgtgccctagttgcaagtccactatcacaaataccatgtcccttgtggcggtcagcacctgtggccatgtcttctgcaagaaatgttatgacaagtttctagtgaaggataaagcttgcttggagtgcagcaaaccattcagggagaggaatctggttccattggagaaaggaggaaccgggtttgctgcacatgatgaacgcctagaggcaagatatttcaagcatttgggtagtggctctgggttaggactagtgaagcctgcaccaaaaacttactaaccttgaataattatagccgttgttgtattgtttaccttggtgtcatgaaattatataacctagaaatgagaactccatcaagttcccaattgccgctgtaacttctatatacatgtatgcagatgttgattttaggtatctttaagaccttaacgacaccactacattaaacggttgccatgtatttgtttatgttgacctatcaacagtcttgttggttaacaaagaatattgaaaactaaagcctacaaaaagaatatgattaaagattttaatactcttctcgttttaaattaatagacgttttgaatattctaaatatattatttttattatatatctagatatagtttatttttaagtttatagaaaaatctatgcattagaaaagataaaata

SEQ ID NO: 84119 - DNA, 2840 bp, Zea Mays
gctttgccttccccgcgtcaaacaaatcttgggttccaagcgagcgaataccttctcgagctaagacgattcgaggcacgagcgaagatgccgcagcggcatttcctatataacaaagccggtacaaaatctgcccccacattgatccacgtcaacatgttttgtcccagccgcaagatgctgcatcaacggccacggatgcagctcatccacaccagcgttctctgtgtctgttcgattcctccggcgtccggagcattctagaattgacgaaggtggctgtgccgagttctccacaccgctggagacttccaggtgcttcaggaaaccgagggggcgttgagataggtaaaaaaaaggaactccggcgaggtcgcccccggtagtggccggtgatgagttcgctcgggctccggctccggcttcggcgacctggagcgaggagttcggagatgcagtcttccagcgctcaagcagttttcgacttcgtctcaccgcttcccgcagactcctgagaggaaatttgtgacaaaaatatctgctctggaaatttgtaatgagattgtgaatggccttctacaatctgactctgctccccttcggttattagatgatcctgagaaatgaaccattgtggagaagttgcaagaagaaattgcttaggacaactaacatctgaggcatccaagcaggatttgtgaaggtaactactagattctgtcaaaaaagaagaaatgaatagtgctaatcacttaacaacctttcgaatagttgcagagcaaatacacaggctgcagagactgcacaacctgtataatctttataatgttctgtgccattcttttgagttatttttttattcagtccatgcgaaaaatgaaccataaaaacattgtgaagctcaaagaggtcataagagagaatggttttttagtttatggtatagacaattcatagcccactaaagtttatagtatttgttgtgatttgaggaacgcggtctattatctgatgaaaagcagagggaagcccttctcagagactgaaatccaaaactggtgctttcaaatatttcaaggtctgagtcacatgcattagcgtagatatttccactgcgaccttaatctgcaaccttaatcctagtgtatggttttgcatttgttttttacgttcaatgttccaatggtttatctatggttcctgtttgttgtgaaacaaattactagccccaaccatttttacatgatatttcaaacaagaaaatagttctacacgtagttcaatatttatgtctaacatatcatgtgtatttggcagaaggaactatcacttacgagcccagaaatagctgccttgcaatttttctatatgaattgcatcttaaatttgcttgaagtatacaaaaataataatgcacctgtataacagcaacgaagaattgcatcttaaatttgcttgaagtatacaaaaataataatgcacctgtataacagcaacgaacacaacgcgcgccaaggcgcgcataagttactagttcgaaaaacaacaacgacctcgccttcttcacgtacgaggagaagcggaagctcgggtacggcacgcagcgggagcgcctgggaaaggactccatcaagcccttcgacgcctgctgcctctgcctcaagccgctcatcggcccgctctgctgccccaagggccacacattctgtaaggagtgcatcctcgagtgcctcctctaccagaagaaggacatcaagcgcaagctagctgcacatgaggtccagaaaaagcaagagaaggaagaggaagaggagaagctaattctgcagaaggctaaggagttggatgcctttgaccagcagaatcatggacctgttccccagtaccatgatcgcagtggttcgcaagacaagaatgggtttcatggagcaaataatgtgaaggtcacttcttttgaagacgaagcccttcgcaatatgaaggcattctggctcccttcagctactcctgaagctacggtcaaggtagacgtgccctccatccacactgtttgcccggaggggcaggagaagctcaagttgaaatcgctcttccctatctcgttcacggaagaaactgctgatcagaagagcagtaaggcagtggaaaaaaagagctacatgtgccctagttgcaagtccactatcacaaataccatgtcccttgtggcggtcagcacctgtggccatgtcttctgcaagaaatgttatgacaagtttctagtgaaggataaagcttgcttggagtgcagcaaaccattcagggagaggaatctggttccattggagaaaggaggaaccgggtttgctgcacatgatgaacgcctagaggcaagatatttcaagcatttgggtagtggctctgggttaggactagtgaagcctgcaccaaaaacttactaaccttgaataattatagccgttgttgtattgtttaccttggtgtcatgaaattatataacctagaaatgagaactccatcaagttcccaattgccgctgtaacttctatatacatgtatgcagatgttgattttaggtatctttaagaccttaacgacaccactacattaaacggttgccatgtatttgtttatgttgacctatcaacagtcttgttggttaacaaagaatattgaaaactaaagcctacaaaaagaatatgattaaagattttaatactcttctcgttttaaattaatagacgttttgaatattctaaatatattatttttattatatatctagatatagtttatttttaagtttatagaaaaatctatgcattagaaaagataaaata

SEQ ID NO: 84120 - DNA, 2425 bp, Zea Mays
gctttgccttccccgcgtcaaacaaatcttgggttccaagcgagcgaataccttctcgagctaagacgattcgaggcacgagcgaagatgccgcagcggcatttcctatataacaaagccggtacaaaatctgcccccacattgatccacgtcaacatgttttgtcccagccgcaagatgctgcatcaacggccacggatgcagctcatccacaccagcgttctctgtgtctgttcgattcctccggcgtccggagcattctagaattgacgaaggtggctgtgccgagttctccacaccgctggagacttccaggtgcttcaggaaaccgagggggcgttgagataggtaaaaaaaaggaactccggcgaggtcgcccccggtagtggccggtgatgagttcgctcgggctccggctccggcttcggcgacctggagcgaggagttcggagatgcagtcttccagcgctcaagcagttttcgacttcgtctcaccgcttcccgcagactcctgagaggaaatttgtgacaaaaatatctgctctggaaatttgtaatgagattgtgaatggccttctacaatctgactctgctccccttcggttattagatgatcctgagaaatgaaccattgtggagaagttgcaagaagaaattgcttaggacaactaacatctgaggcatccaagcaggatttgtgaaggtaactactagattctgtcaaaaaagaagaaatgaatagtgctaatcacttaacaacctttcgaatagttgcagagcaaatacacaggctgcagagactgcacaacctgtataatctttataatgttctgtgccattcttttgagttatttttttattcagtccatgcgaaaaatgaaccataaaaacattgtgaagctcaaagaggtcataagagagaatggttttttagtttatggtatagacaattcatagcccactaaagtttatagtatttgttgtgatttgaggaacgcggtctattatctgatgaaaagcagagggaagcccttctcagagactgaaatccaaaactggtgctttcaaatatttcaagcaacgaacacaacgcgcgccaaggcgcgcataagttactagttcgaaaaacaacaacgacctcgccttcttcacgtacgaggagaagcggaagctcgggtacggcacgcagcgggagcgcctgggaaaggactccatcaagcccttcgacgcctgctgcctctgcctcaagccgctcatcggcccgctctgctgccccaagggccacacattctgtaaggagtgcatcctcgagtgcctcctctaccagaagaaggacatcaagcgcaagctagctgcacatgaggtccagaaaaagcaagagaaggaagaggaagaggagaagctaattctgcagaaggctaaggagttggatgcctttgaccagcagaatcatggacctgttccccagtaccatgatcgcagtggttcgcaagacaagaatgggtttcatggagcaaataatgtgaaggtcacttcttttgaagacgaagcccttcgcaatatgaaggcattctggctcccttcagctactcctgaagctacggtcaaggtagacgtgccctccatccacactgtttgcccggaggggcaggagaagctcaagttgaaatcgctcttccctatctcgttcacggaagaaactgctgatcagaagagcagtaaggcagtggaaaaaaagagctacatgtgccctagttgcaagtccactatcacaaataccatgtcccttgtggcggtcagcacctgtggccatgtcttctgcaagaaatgttatgacaagtttctagtgaaggataaagcttgcttggagtgcagcaaaccattcagggagaggaatctggttccattggagaaaggaggaaccgggtttgctgcacatgatgaacgcctagaggcaagatatttcaagcatttgggtagtggctctgggttaggactagtgaagcctgcaccaaaaacttactaaccttgaataattatagccgttgttgtattgtttaccttggtgtcatgaaattatataacctagaaatgagaactccatcaagttcccaattgccgctgtaacttctatatacatgtatgcagatgttgattttaggtatctttaagaccttaacgacaccactacattaaacggttgccatgtatttgtttatgttgacctatcaacagtcttgttggttaacaaagaatattgaaaactaaagcctacaaaaagaatatgattaaagattttaatactcttctcgttttaaattaatagacgttttgaatattctaaatatattatttttattatatatctagatatagtttatttttaagtttatagaaaaatctatgcattagaaaagataaaata

SEQ ID NO: 84121 - DNA, 2386 bp, Zea Mays
  misc_feature (2385)..(2386): n is a, c, g, or t
cgaggagagagagagagggcagaggagagaggaggtggggtgcagtgcagtcaaagctggcatcgcatttatctctctctatccctgactccgaattgtattccccccatttctttcccactcgattcaagcccagaaaaagcttatgaaaatagagtaccccgggagagaggcgatagatttgggagctagtaatggccccatatatataacctcctccctcttcacgccatctcttgccttcgattgcccttccggcgttcctacctcctccccctccccatctcctcccaatccgtgtcctcccctcgtttggggatcgacacaggctacgcgtgggttgcgtcgattgatgcgagggaggcaatggcggtttcttctgctccggagaagaagaggaagtggctactcagctacaggaagttgacgtccaaatgccaggagggcgtgaaaccgtttggatctctgaagctcgctgtgatcgacaagtacctgcgggaggcgaggaggattcttgcggcggcgccagagggtggcggaggcggcgatgcggcggcggcactcggcctggtcgacgcggcgctggagctgtcgccgcggatggaggccgccctggagctgcgggcgcgcgcgctcctcgcgctgcgacgctacagggaggtggcggagatgctccgggattacatccccagctgcggcaagtcgtgctctggggaggacacctcgtcgtcctcttcggcgtccctcctgtccaccggctccggtgacctcggcacgatttcccgtgccaagctcctctcgcccgaccgccaccgctctgacgacgcggaacctgacgctcgccctgtccgcttcttccgctgcttcgacgtctccgagctcaagcgccgcgtccttgccggcctctccaagaacccgaacacggacacccagtggaggtacttggtcctcggccaagcttgcttccacctcgggctcatcgaggacgctatggtgctgctccagaccgggcgccgcctcgcttcggcggctttccgccgcgagagcgtgtgctggtcggacgacagcttctcgtcgtcgtccgccaccgctgccgcggctccctccgtcccgtccggcaaaacatccaagtcgagttcggcgtttttcataatcccggcgacggagtcggaggccgtgtcccagctcctggcgcacgtgaagctcctgctccggcgccgcgcggctgccatggcggcgctggacgccggcctgcctgccgaggccgtgcgccatttcaccaagatcctggaggcgcgccgcggcgtgctgccgcacccgttcgccgccgcctgcctcgtgggccgcgccgccgcgttccaggccggtggccgtccggccgacgccatcgcggactgcaaccgctcgctggctctggaccctgcctacatcccggcgctccgtgcccgcgccgacctcctccagtccgtgggcgcggtcgccgactgcctccgtgacctcgaccacctgaagctcctgtacgacgccgcgctgcgggacggcaagctcccggggccccggtggcggccgcagggcggcgtgcggtactgcgagatcgccggcgcgcaccgcaagctgacggcccgcatccaggggctgcgcggccgcgtcgccgccggggaggcgtgcaacatcgactactacctgctgctgggcgtgcggcacgggtgcccgcgctcggagctggagcgcgcgcacctgctgctctccctgaagctcaagcccgaccgtgccgtggtgttcggggagcgcctggagctcgtggacgagcaccgcgacctcgaggcggtgcgcgaccaggcgcgcatgtccgcgctgctgctgtacaggatgctgcagaagggttactcgttcgtcatgtcagccgttctggacgaggaggccgccgagaggcagagggcaaaggacgctgccgccgcggcggccgcgctggcggccaagcaggaagccgcgacgcaggagccaccacagccggtgcccgggaaatccaagaacaccgagagcggcagcggccgtccaagaagcccgccaggccgcgcgcagacggcgaaaccgaaacccaagtccaaggccaaggccaagtccgcgaccgcggcgacaatgccgaaggcaccggcagccgtgaattccacagcccccgtctaccagggggtgttctgccgcgacatggcagtggtgggaaccctgctgtcccgcggcggcgcgttcgaccgcgctctccctgtgaagtgcgaggctatgagctgctgacggggaatcctgttcccccccgtcctacacaacaccacatgacatgtgcgacgtggtgtgcaccgagacggagacaggcgcgacgtgagagtgatnn

SEQ ID NO: 84122 - DNA, 2633 bp, Zea Mays
  misc_feature (2632)..(2633): n is a, c, g, or t
gctttctctgaaagggaaagcagcgaggagagagagagagggcagaggagagaggaggtggggtgcagtgcagtcaaagctggcatcgcatttatctctctctatccctgactccgaattgtattccccccatttctttcccactcgattcaagcccagaaaaagcttatgaaaatagagtaccccgggagagaggcgatagatttgggagctagtaatggccccatatatataacctcctccctcttcacgccatctcttgccttcgattgcccttccggcgttcctacctcctccccctccccatctcctcccaatccgtgtcctcccctcgtttggggatcgacacaggctacgcgtgggttgcgtcgattgatgcgagggaggcaatggcggtttcttctgctccggagaagaagaggaagtggctactcagctacaggaagttgacgtccaaatgccaggagggcgtgaaaccgtttggatctctgaagctcgctgtgcgtgccttgtgtttgtttcgttcagcaacagcttggttccagcgcattctgtccggtggcttgtcctgttttggtttcctttgttttgtttgttcccctcccccctccccaaaaagaagagaatgatctcatctcagagtggtcaatcctgccctgttaagagggaagactactgttcttgctgcggaaaaaatctgatgtttccgttcctttctcgtcaggtgatcgacaagtacctgcgggaggcgaggaggattcttgcggcggcgccagagggtggcggaggcggcgatgcggcggcggcactcggcctggtcgacgcggcgctggagctgtcgccgcggatggaggccgccctggagctgcgggcgcgcgcgctcctcgcgctgcgacgctacagggaggtggcggagatgctccgggattacatccccagctgcggcaagtcgtgctctggggaggacacctcgtcgtcctcttcggcgtccctcctgtccaccggctccggtgacctcggcacgatttcccgtgccaagctcctctcgcccgaccgccaccgctctgacgacgcggaacctgacgctcgccctgtccgcttcttccgctgcttcgacgtctccgagctcaagcgccgcgtccttgccggcctctccaagaacccgaacacggacacccagtggaggtacttggtcctcggccaagcttgcttccacctcgggctcatcgaggacgctatggtgctgctccagaccgggcgccgcctcgcttcggcggctttccgccgcgagagcgtgtgctggtcggacgacagcttctcgtcgtcgtccgccaccgctgccgcggctccctccgtcccgtccggcaaaacatccaagtcgagttcggcgtttttcataatcccggcgacggagtcggaggccgtgtcccagctcctggcgcacgtgaagctcctgctccggcgccgcgcggctgccatggcggcgctggacgccggcctgcctgccgaggccgtgcgccatttcaccaagatcctggaggcgcgccgcggcgtgctgccgcacccgttcgccgccgcctgcctcgtgggccgcgccgccgcgttccaggccggtggccgtccggccgacgccatcgcggactgcaaccgctcgctggctctggaccctgcctacatcccggcgctccgtgcccgcgccgacctcctccagtccgtgggcgcggtcgccgactgcctccgtgacctcgaccacctgaagctcctgtacgacgccgcgctgcgggacggcaagctcccggggccccggtggcggccgcagggcggcgtgcggtactgcgagatcgccggcgcgcaccgcaagctgacggcccgcatccaggggctgcgcggccgcgtcgccgccggggaggcgtgcaacatcgactactacctgctgctgggcgtgcggcacgggtgcccgcgctcggagctggagcgcgcgcacctgctgctctccctgaagctcaagcccgaccgtgccgtggtgttcggggagcgcctggagctcgtggacgagcaccgcgacctcgaggcggtgcgcgaccaggcgcgcatgtccgcgctgctgctgtacaggatgctgcagaagggttactcgttcgtcatgtcagccgttctggacgaggaggccgccgagaggcagagggcaaaggacgctgccgccgcggcggccgcgctggcggccaagcaggaagccgcgacgcaggagccaccacagccggtgcccgggaaatccaagaacaccgagagcggcagcggccgtccaagaagcccgccaggccgcgcgcagacggcgaaaccgaaacccaagtccaaggccaaggccaagtccgcgaccgcggcgacaatgccgaaggcaccggcagccgtgaattccacagcccccgtctaccagggggtgttctgccgcgacatggcagtggtgggaaccctgctgtcccgcggcggcgcgttcgaccgcgctctccctgtgaagtgcgaggctatgagctgctgacggggaatcctgttcccccccgtcctacacaacaccacatgacatgtgcgacgtggtgtgcaccgagacggagacaggcgcgacgtgagagtgatnn

SEQ ID NO: 84123 - DNA, 1046 bp, Zea Mays
acgaccttctctaggaagttagctgccccagctaacttcctacgacctactctaggaagttatcttttagcttttgaccagtcaaacgagccgctaactttctagagtatatgtacaacctctaggaagttaagtaacttcctatgaatttactctaggaagtaatattttttatcctaatctacgaatttaacgttatctttccatcgttcatcctttcttctccaacacccgtcgctctcttctccaactcgaagatgtcggccgccaccgccctgcttcatcgaggcccaagacccaatctccgtttttgataaagaaaccaaacagcaacctagcagtcttccttcacttctctgctcccgacctcgtagcgaatcagatcggggggctagggttccggtgcgcctctacagccggacgcgaggctaggctgggcatggagggaatcgtcacggcctgaaagaggtcctggccggagacgacgaacggggctgcagccgccgggaagcgctacaaagggtggggtcaacactaagcagagttacaagcgtcaagctatccatccgcgaccacgagtctaaccacaacctaaagaacatcgagctggaaggcaattttgaccagatcaagcaagccagcgacttgttgcgtgatctcatcgcaaccatcagcgcaagcatgccagcgaaaaatccatcttctgctgtggcgccagcaggaggaggccgaggcagtggtccggggggcacgagcagcaactacaagacgaagctgtgcgagaacttcttgaagctatgcgagaacttccaacacgactatgtatgagatattatctcttattatgactggatgagatgtgtcttatggctatagatgagacttttgtggtgtaattgatgagactatagatttaaatattgttatgtgattgtgtgtgagatgttttatgtgaaaatatgttgtgatatagttgtttatatatttgttatgttgtggaatgtggtgtaaaataaaaataaaaacatttttaatgttggtccaat

SEQ ID NO: 84124 - DNA, 540 bp, Zea Mays
acgaccttctctaggaagttagctgccccagctaacttcctacgacctactctaggaagttatcttttagcttttgaccagtcaaacgagccgctaactttctagagtatatgtacaacctctaggaagttaagtaacttcctatgaatttactctaggaagtaatattttttatcctaatctacgaatttaacgttatctttccatcgttcatcctttcttctccaacacccgtcgctctcttctccaactcgaagatgtcggccgccaccgccctgcttcatcgaggcccaagacccaatctccgtttttgataaagaaaccaaacagcaacctagcagtcttccttcacttctctgctcccgacctcgtagcgaatcagatcggggggctagggttccggtgcgcctctacagccggacgcgaggctaggctgggcatggagggaatcgtcacggcctgaaagaggtcctggccggagacgacgaacggggctgcagccgccgggaagcgctacaaagacacagagtcatttcaaac

SEQ ID NO: 84125 - DNA, 783 bp, Zea Mays
gagaaggcaggcgatcccatcctgtgctgttgccccagctgtgtgtgatctctcctcctcgtatggccgtacacgagctctatataaacagaaacaggcttgcccctctcagcacacgcgcctggattctcctcgcccctcgcctccctccacctgcagagagcgccacaagagcgcttcgttctagcagcagcggacgagggagacaagaggaggaagagatggcaggccgtgatggagccaagtcatcggcgtccatggaggaagaggcatgcggggagaagaagtacggaggaatcgcacccaagaagaagcctttgatatccaaggaccacgagcgcgcctacttcgactctgcagactgggtgctgggcaagcaggctgcgaacagtagcacgagggccaccgtcgagtctctgaagcccaagctgaagagaacgcctcaccaccagctgccccctcgcaagcccacctgcgcttccggttgagacgaccggacccatggctacgcgttgcagctgctcggaggtgagggagggaggacgccgaggccgagctcacataaatgtctagctggtcggaaaccgtggtagggacgaatccgagatgcaatctggcttgttggccgttgcattgcagcacctattgtgtctttatcagttcgttatcaattatctggctttaagtttggcatggcacttggtgttcgaatgaactacacaagagagtggacgagagattttgcctcccaaaaatgcgggcattagaaattttgtttctttg

SEQ ID NO: 84126 - DNA, 612 bp, Zea Mays
tgtgatggagccaagtcatcggcgtccatggaggaagagccaagtactggaagcggtcaagcaggagagccaagtcatcggcgtccatggaggaagaggcatgcggggagaagaagtacggaggaatcgcacccaagaagaagcctttgatatccaaggaccacgagcgcgcctacttcgactctgcagactgggtgctgggcaagcaggctgcgaacagtagcacgagggccaccgtcgagtctctgaagcccaagctgaagagaacgcctcaccaccagctgccccctcgcaagcccacctgcgcttccggttgagacgaccggacccatggctacgcgttgcagctgctcggaggtgagggagggaggacgccgaggccgagctcacataaatgtctagctggtcggaaaccgtggtagggacgaatccgagatgcaatctggcttgttggccgttgcattgcagcacctattgtgtctttatcagttcgttatcaattatctggctttaagtttggcatggcacttggtgttcgaatgaactacacaagagagtggacgagagattttgcctcccaaaaatgcgggcattagaaattttgtttctttg

SEQ ID NO: 84127 - DNA, 2323 bp, Zea Mays
atcctcctcttcccattccactctctcactctctctaatcacaatttcgacactgatcggtactctctagtgtccgactcgtcacagttttagcgagagagacagagagcgagcgagggagaggaggatgggttccacttccacgggaccggtgagcgggttcgcggcgccggagcgggacatcgacgatctgccgcggaacgacgccaactacacggcgctcactccgctctggttcctcgagcgcgcggcgctggcgcatccgggcagggcctccgtcgtgcacggccccgtgcgctacacctgggctgacacctatcgccgctgccgccgcctcgcatccgccctcgcgcgcctatccgtcggccacggaagcacggagctgttgtgaactgcgtcaatattcggctaaacgccgagacaatagcattcctccttgaacactccgtggcagaagttgtgatggtggaccaagaattctgcaccctagccgaagaatcgctgaaaataattggcaagaagaagacatcggctttcaggcggcctccaatcttgatcgtcatcggcgacccaacctgtgatcccaagtctctacagcatgctctgggaaagggagccatagagtatgaagagtttctgaaaaccggtgacccggagttcagttggaagccaccgaaggacgagtggcagagcatcgccctaggctacacttctgggactacttccagcccaaagggcgtcgtgttgcatcaccgcggtgcttatctcatggcactcagcgttgccatcgtgtgggggatgcctgaaggggctgtctacttgtggactctgcccatgttccattgcaatggttggtgctacacttgggcgctggcagcgttctgcggaacaagcatatgtcttcgccaggtgagcacaaaagccatatacgaaggcatcacgaagcaaggagtgacgcacttctgtgccgcacctgtcgtccttaacaacctgatcaacgctccggcaagcgagaccttcctgccgctgccccgcgtcgtcagtgtcaacgtggccggagccgccccgacgccgtccctgctgggcgcgctgtccatccgtgggttccgcgtcacgcacacgtacggcctgtcagagacgtacggtccctcgacggtgtgcgcgtggaagcccgagtgggacgagctgccgctggaggagcggtcccgcctgcactgccgacagggcgtcaggtacatcgcgatggagggcctggacgtcgtggaccccaagacgatggcgcccgtcccggccgacggcaagtcgtacggcgagatcgtgctgcggggcaacgccgtgatgaaggggtacctcaagaaccccagggcgaacgcggaggcgttcgcgggagggtggtaccactcgggcgacctcggcgtgaagcaccccgacgggtacgtcgaggtgagggaccggatgaaggacgtgatcatctccggaggggagaacatcagcagcctggaggtggagaaggtgctgtgcgcgcacccggcggtgctcgaggtctcggtggtcgccagggccgacgagcggtggggcgagtcgccgtgcgcgttcgtgacgctcaaggacggagcagcagccgacgggtcggacgaggcggcgctggccaacgacatcatgcgcttctgccgggagaggatgccggggtactgggtgcccaagtcggtcatcttcgggccgctgcccaagacggccacggggaagatcaagaagcacgagctgagggccagagccaaagagctcggccctgtgaagaagagcaggatgtgagagatctgggggccgacggcgatagcgtgtgatgccatggcaacaactcagaatcttgctccaagtcgcgcatataaaattcatgagttctgaagatgcctaataacttgagtgctttgcttgtatcgttctgaaaccagaagttcagaccagatccgatatataagtaagaactgtatcagattgtccggtttgcaggaaacagatgcggaggtgatgacgtttcttgacaagaattaacgccaaccgtcgcacgcgcgtgaagaagtcggaatcctgatgctctctccgtcttccttggcttctccccgtgttggaacaggtcacacacaggggcacaaggcgcatcgtttgggtttcgtctcgtgaaggcgaccgatagatccttcccaattttcatgtttgcaattaagtgccttttggttcacgaaatgtaacgtaaatggtaatgataacgattcacactcgaataccagcggtaacaaatttgaataagcagatatccatttat

SEQ ID NO: 84128 - DNA, 3233 bp, Zea Mays
ttttaaaatgcccggcctctagaggcctccccgatctgatgccccctggccgcctccctgcctcctcgccgccgccaccgcttgtagcctccgctacgtagaccacgtgtattttcttgtttgatctggagcatgctgtatcggtgattttctccttcttttgccgacgctgcggagcggcgaggagttttgattcagctgtagagagattctaggatctatggggtccgagaagggtggagccaaggttattggcggcggtggaggaggaggcgggatcttcaacctatttgattggaagcgaaagtcacgcaagaagctgttctccaactcgccagaggcgtctaagcttgtcaagaggagcgaagaaaccttgctgtcagtgcgtctccacttgggtgatgaagatgaggggattggtgtatcaagcttcaagggaagcagcgactacagctgtgcgtcttcagtgaccgatgaggaagggcgtgagatgaaggcgccaggtgttgtggccaggctcatgggcctggacgccatgcccaccttgggtgttccagaaccgtactgcacaccgttccgagacacaatatcattcagggacagccacagcctcaagaggagccctgagtactcaacgaatgaccaattcggtcatgttcctcgaagagttgatggatatatcaggaagccattggatttcagagcaccaaagatgccaagcagcccgattgaaaggttccagatggaagcattgccaccaaggtccgcaaagcctctaccaatgtctcaccatagattgttgtcccccatcaagaatccaggtttcacttcagcgaggaatgctgtccagatcatggaggaagcagccaagattcttcagccaagggcacaaacaagctctagggagaaagtatgttcttttagcccggcgcggattcctttgagagtttcggagccaagagagaacatccctttttctcagagggctgtgcctctgaaaccgcaatcatccaggactgctcctgagctgccaaatgtgagaatctctagagcacagcagatgaaccgaagctggaatagtgaggaggatattgtcatattcagaccatcggttgattcttatgagattaataatcctagttgttctaagaacaacaagggaaagtctgtttcattggcagtccaggcaaagaacaacgtccagaagagggaaggcgcaactggttctgggaggaattcacgagtacaaaaagaacatgatgagaaaagggtaaaccaaccatttaggagtcagtctaatctccagagaaacaagcagcaaaagaagccatcatcatctggcacttcttcccctgttctttggcaaaataatcagaaacagaattctttggtgaccaaaggcaaggtggcactaaacaaaaccgtctcaacacagcaaggcagaaaggtgatggccggagattcatcttctgggaagatcaagagtggaagcaagaactctaaagttggcagaaaagacattgtggaaagcattagtggtgatagagaaggatcatcgtcgaacaacaaggacttcccgcagaagaaacggttgatagagagaaactccaccaacgagaagggtacatttgtgcctgaaaacccagtgggtaaacttctgaagcaggttcaacctaatgttgttatggacgagcacattaaatggaacaaggaatgtaaagataccacagatgttgtgtcatttaccttcacctcacccttggtcaaaccatcggcaggaccgtccagactggcgggtaagtgggatacaagaagcaatcttgatatggacgcaggatgtgataaagatgattcagataacaaggctcaagggttgtcatcagtggggctgaactttgtaaatggtgatgcattgagccttcttctagaaaagaagctgaaggagctaacatcaaaaattgatccatcaatcacctttacgaggggtgacacatttgcgcctgctacttttaccttggaggaaccaccaacctcttcatgcagtaattggggctcagaaagtggagcatttgactgtagcccttctgaactaaaaccttctcagtatgattattgcccttcagcccagtcatctacaaaaggccaaaattttcgaggcagtaaaataaaggtggaagaacaagaagaatgcagcagcataagcaatgcaaggaaggaacaggaaaatgaagatctaagtcccctatctgtgcttgaacccaccacctctctaagcgagagttgctggtcttctgagtgttcggacagcagcggtgggggtaaggtttatccatcactttttgatgttaaaaatggtcaggggaatttcttgattaacccagcatcagttgatatcgaggcaaagacaacagactcagcctcttcggcatcagcagatacatcggatgtttcagatatcacccaatgctctaaaagatcaagacacacagagctggagtacatcgcagatgtgctaagcagtgtgaacttgacaacagatgaactgggatcactcttcgtcaatcaggatagatcagctctgcaccccctcctcttcgagaaactggagaatacgcatgcgtacacacaagggaaagagcccttttgccatcgagggtacaggcggctgttgttcgactgcgtgaatgagtgcctggagacaagacgcacgacctacttccgggcaggatatgcggcatggagcaaaggagcagcgacgctgggcatggaggaggcccaagtctgcagtgaggtaaccagctggaagcgcatgggagactggacggaggacgagctcgtcgacaaggacatgagcggcgggctgggcacatgggtcgatttccgggtggaggagttcgaggccggtgaggaggtggagaaccacgtactgagctcactgctcgatgaggtggtgggcgacatggtcgcgagacggcggcggccaggagtatttgtgatttgagaatgggccctgtaattttgtttcgttttgctgttacatatctccccaatttattttgtcaccccagaagtgtgctgttcaaatcagtgataaatgttcatcgatcgttttcagctcggctactgaatgccctgcttgacacggtttctgaagtctttttacctctgtgataggcaaaacaactctggccatttctactcgtaattcgatccaaaactaacctgcttctgct

SEQ ID NO: 84129 - DNA, 3350 bp, Zea Mays
cgacgatgcttccccacaactcgagcccctcgtagcttccacccggcccccatccgcggcctccctcctccgttcccctttcccgttttcctcctccgcttcccgattcaactcgcaacgccgccgccttcgctgacccatgagcgggcgcgagccgatttaggcccgccgctacagagatttcgagagaatttttgggctagcggggtgtgaacagaaacttggtgccccgctgctctgccttttgtcgtccactgtttcgcgtcaattctcgcgcgaaaagggatgggcactggagaggggtcgccgccggcgaggcggggcatcagcggtaggcgccgtcgatggccggacgaggacgacgacgagtatgtgctggaggaggaagaagaagaggattatgtggaggagctctccgcctcgagcgccggcgaggagggggtggattcagacgccgagtaccaggaggcagaggaggaggacgagatcgagaagccgcgcccaaagcgaccagcgaagggcatcacatcgagcgccggcgagaggggattggattcagacgccgaataccaggaggcagaggaggacgacgagatcgagccgccgcgcctgaagcgaccggccaagggcagcacatcgagcgcgggtgaggaggggttggattcagacgccgaataccaggaggcagaggaggacgagatggagacgccgcgcccaaagcgaccggcgaaggacagcacatcgagcgccggcgaggatgggttggattcagacgccgaataccaggaggcagaggaggaggacgacgacgaaatcgagacgccgcgcccgaagcgacgggcaaagggcagcaacagagtacggaaaggaaaggtggatctggccgccgcacgatctcgacgccggaagtatgaggaggacgaggactacgaggaggaggttgacgaagacgacgaggtggaggaggagtaccatgatgaccttgaggaggtcgaggaggaggaagaagtggcaccacagcggccgaagagcattgtgaaatgcggtgcccgtggccggaatgtgaagctgtctctggcagcgaagcgatctcatcagcggaagcaggaggatgatgaggatatggattttgacccagagttggatgacgaggaggtcgagatagatgaggatattgattttgatcccgatgtcgatggtgacgaggaggatgagtatcaagacgaggaggaagaggaactggttcctgcccgtgccagaaaggtaactgtaaagaatccggtgaagcgaaagtccatttcaaagaggcgaacaccaaagaagaagaagaaaaataggggatctaaggtttctaggcggaagggggcttcagctaaagtgaagaaatcagcacctgttaggaggcggagaaagcgttcagtgatagatgattacgaggatgaggatgtggatgatgacgatgacgacgacttcattgtcgacgatgaggtcattgtgaatcggcaccccaagaagaaggccaggatagggagtgggagggagacagtggtggaccctcaagtatctattgaggaagagacatggccagaccttgagtcagactcatcggactttgagtttgcgacgtccgatgaagaacctaacaatgttgaaacacctgtagctgagcagactacagtcagaaaagggaggaagaagaggatatctgagtcagagtcatcctcagattctgaatttgttgtatcaggtaaggaattggaagaattgagggagcctgagcctccaaaggctgcaccaaatctgcatgtgtccttgagaaggatttgtattacaaggcatggagaaggcaagggaaaggagaaacaggaacaggaggaggctgggaagccaatatgcgggatctgtctctcggaggagctgagagctactgtacaaggtttatcagcccactgaagaagaaataaggcgttggctagacccatatgaaaatgttgtttgtatagagtgcaatcaagagaagtgcccgaaggaaactggtactgtggaggatgtagactcggtgacgagggaccatcatatactggaattcagcgtacagtagcttatgaaagacaaaattacagaagtcatgtcggtagttctgtaagttttggcatggctgtaccaggcggtacatttgaaaggccgtcatcaatcaatcctcgccattcttttcaagggattgatctaaatctatctccaagagagtttcccggagaatcacatcctgctgaatcacaagtttcaactgatagcgtatcaactcccactggaagagctggaagaactatttcaggaaggcgtgaattacaacggtacattcagagtttgttcagaccaagtctacctagtagaccagacacgtaccacaatattgcgcagaacagtggtggtgtatcaagaaatgaaccgaaccgctggaacttcccttcttcatcagaagcaaacacatcacagaatctgcctgatggcattcagaaccatcacagtgaccttccatttgttcaagctcacagcaattttgctccatttatgtccccagatggggatgatttccagcaaattgagggtgtcaagagcaacctcaggaacatgcagtagagcccttacggcgttactagaagctcgattctaccctgtgaagcttaccaagggggcaacatgtgccgttttaatggcttgtggaactgaacataacaaaagcttgtgcctgttgcattctcccagaaattgatgtggttcggctcatttgcggagatgtgatgtggtcaacgatataagatacatgctctctttgtttaagtttaggcattttttgttgtcgtcattcttattcattcagtcattaagcacaacctcagattacacagcgaaggcatttctgaatgtcttgatagcttcaaatttatacattgtaatattgtggtaacaccaatttcattaggctgaccattcttttcctcgcgagatgctcttttgcctactaggaatgctgataactgagcttcccagcctcttctataatcatataccgcgcggtggcaaactagcctcgttcgggtactggctttctgttctattagcatactggtctagtggatcaaccgagaaaagctatcaacaatcttagtactaacaatctatggtctgaagactcgtcttctttaagtgttttgttgtatagcgcagctgctttttgtacagatgaatgtttgttccatattgcttaagtttgtatccagtatccccttcatatgcatgtgtttatagagttgtggccattgtgcctgggtctccggattgttctgtgg

SEQ ID NO: 84130 - DNA, 3418 bp, Zea Mays
cgacgatgcttccccacaactcgagcccctcgtagcttccacccggcccccatccgcggcctccctcctccgttcccctttcccgttttcctcctccgcttcccgattcaactcgcaacgccgccgccttcgctgacccatgagcgggcgcgagccgatttaggcccgccgctacagagatttcgagagaatttttgggctagcggggtgtgaacagaaacttggtgccccgctgctctgccttttgtcgtccactgtttcgcgtcaattctcgcgcgaaaagggatgggcactggagaggggtcgccgccggcgaggcggggcatcagcggtaggcgccgtcgatggccggacgaggacgacgacgagtatgtgctggaggaggaagaagaagaggattatgtggaggagctctccgcctcgagcgccggcgaggagggggtggattcagacgccgagtaccaggaggcagaggaggaggacgagatcgagaagccgcgcccaaagcgaccagcgaagggcatcacatcgagcgccggcgagaggggattggattcagacgccgaataccaggaggcagaggaggacgagatggagacgccgcgcccaaagcgaccggcgaaggacagcacatcgagcgccggcgaggatgggttggattcagacgccgaataccaggaggcagaggaggaggacgacgacgaaatcgagacgccgcgcccgaagcgacgggcaaagggcagcaacagagtacggaaaggaaaggtggatctggccgccgcacgatctcgacgccggaagtatgaggaggacgaggactacgaggaggaggttgacgaagacgacgaggtggaggaggagtaccatgatgaccttgaggaggtcgaggaggaggaagaagtggcaccacagcggccgaagagcattgtgaaatgcggtgcccgtggccggaatgtgaagctgtctctggcagcgaagcgatctcatcagcggaagcaggaggatgatgaggatatggattttgacccagagttggatgacgaggaggtcgagatagatgaggatattgattttgatcccgatgtcgatggtgacgaggaggatgagtatcaagacgaggaggaagaggaactggttcctgcccgtgccagaaaggtaactgtaaagaatccggtgaagcgaaagtccatttcaaagaggcgaacaccaaagaagaagaagaaaaataggggatctaaggtttctaggcggaagggggcttcagctaaagtgaagaaatcagcacctgttaggaggcggagaaagcgttcagtgatagatgattacgaggatgaggatgtggatgatgacgatgacgacgacttcattgtcgacgatgaggtcattgtgaatcggcaccccaagaagaaggccaggatagggagtgggagggagacagtggtggaccctcaagtatctattgaggaagagacatggccagaccttgagtcagactcatcggactttgagtttgcgacgtccgatgaagaacctaacaatgttgaaacacctgtagctgagcagactacagtcagaaaagggaggaagaagaggatatctgagtcagagtcatcctcagattctgaatttgttgtatcaggtaaggaattggaagaattgagggagcctgagcctccaaaggctgcaccaaatctgcatgtgtccttgagaaggatttgtattacaaggcatggagaaggcaagggaaaggagaaacaggaacaggaggaggctgggaagccaatatgcgggatctgtctctcggaggagctgagagctactgtacaaggtgtcctcaattgttgctcacactatttttgcttcgcatgcatcatggaatggtctagggttgagtcgagatgcccattgtgcaagcagcggttcactacaatcaccaagtcatcaaaggtagatcttggtcttggagtgagaaaagctgtagtcaaggtcgaagagcgtgatcaggtttatcagcccactgaagaagaaataaggcgttggctagacccatatgaaaatgttgtttgtatagagtgcaatcaagagaagtgcccgaaggaaactggtactgtggaggatgtagactcggtgacgagggaccatcatatactggaattcagcgtacagtagcttatgaaagacaaaattacagaagtcatgtcggtagttctgtaagttttggcatggctgtaccaggcggtacatttgaaaggccgtcatcaatcaatcctcgccattcttttcaagggattgatctaaatctatctccaagagagtttcccggagaatcacatcctgctgaatcacaagtttcaactgatagcgtatcaactcccactggaagagctggaagaactatttcaggaaggcgtgaattacaacggtacattcagagtttgttcagaccaagtctacctagtagaccagacacgtaccacaatattgcgcagaacagtggtggtgtatcaagaaatgaaccgaaccgctggaacttcccttcttcatcagaagcaaacacatcacagaatctgcctgatggcattcagaaccatcacagtgaccttccatttgttcaagctcacagcaattttgctccatttatgtccccagatggggatgatttccagcaaattgagggtgtcaagagcaacctcaggaacatgcagtagagcccttacggcgttactagaagctcgattctaccctgtgaagcttaccaagggggcaacatgtgccgttttaatggcttgtggaactgaacataacaaaagcttgtgcctgttgcattctcccagaaattgatgtggttcggctcatttgcggagatgtgatgtggtcaacgatataagatacatgctctctttgtttaagtttaggcattttttgttgtcgtcattcttattcattcagtcattaagcacaacctcagattacacagcgaaggcatttctgaatgtcttgatagcttcaaatttatacattgtaatattgtggtaacaccaatttcattaggctgaccattcttttcctcgcgagatgctcttttgcctactaggaatgctgataactgagcttcccagcctcttctataatcatataccgcgcggtggcaaactagcctcgttcgggtactggctttctgttctattagcatactggtctagtggatcaaccgagaaaagctatcaacaatcttagtactaacaatctatggtctgaagactcgtcttctttaagtgttttgttgtatagcgcagctgctttttgtacagatgaatgtttgttccatattgcttaagtttgtatccagtatccccttcatatgcatgtgtttatagagttgtggccattgtgcctgggtctccggattgttctgtgg

SEQ ID NO: 84131 - DNA, 3908 bp, Zea Mays
atgaatgaaaaacgattcgtcgtcgctctctcccaaacgttggttcgaaccgggacgaaaccccagtcccctatgcgaccgcggcaaaggttcgaccgccgcatcaaacacgcaatcgccgccagctcggtctgcggccccgcaccggtgttctaccgtttggatgccaaggtgaacgccggccgccatggcctccatcgagccccgcaatcctacgccggcagaacaccggtgcggggccgcggccgccgctcaccaaccggcccgcgacttcctcgcccaccgcgacggcgtcgacaagctcctcaagatcttccgctacgccacgcccctcgcactcgccgctggggccccggcgcctccgcccgcctcaagtctttcgagtccagcgtcgtcctcagccgcaagggtttccgtctcggcaagttcgtgcagtccctccgcgcccacccgcaccttcccccggcgcttgcgctactcgcctacggcagtgagggcgtctactacttcgtcgagcagttcgtctggctcgccaaggccgggatcctgcctgcgcacctgctcgccaagttattgttgaagcctgaagggatgggcactggagaggggtcgccgccggcgaggcggggcatcagcggtaggcgccgtcgatggccggacgaggacgacgacgagtatgtgctggaggaggaagaagaagaggattatgtggaggagctctccgcctcgagcgccggcgaggagggggtggattcagacgccgagtaccaggaggcagaggaggaggacgagatcgagaagccgcgcccaaagcgaccagcgaagggcatcacatcgagcgccggcgagaggggattggattcagacgccgaataccaggaggcagaggaggacgacgagatcgagccgccgcgcctgaagcgaccggccaagggcagcacatcgagcgcgggtgaggaggggttggattcagacgccgaataccaggaggcagaggaggacgagatggagacgccgcgcccaaagcgaccggcgaaggacagcacatcgagcgccggcgaggatgggttggattcagacgccgaataccaggaggcagaggaggaggacgacgacgaaatcgagacgccgcgcccgaagcgacgggcaaagggcagcaacagagtacggaaaggaaaggtggatctggccgccgcacgatctcgacgccggaagtatgaggaggacgaggactacgaggaggaggttgacgaagacgacgaggtggaggaggagtaccatgatgaccttgaggaggtcgaggaggaggaagaagtggcaccacagcggccgaagagcattgtgaaatgcggtgcccgtggccggaatgtgaagctgtctctggcagcgaagcgatctcatcagcggaagcaggaggatgatgaggatatggattttgacccagagttggatgacgaggaggtcgagatagatgaggatattgattttgatcccgatgtcgatggtgacgaggaggatgagtatcaagacgaggaggaagaggaactggttcctgcccgtgccagaaaggtaactgtaaagaatccggtgaagcgaaagtccatttcaaagaggcgaacaccaaagaagaagaagaaaaataggggatctaaggtttctaggcggaagggggcttcagctaaagtgaagaaatcagcacctgttaggaggcggagaaagcgttcagtgatagatgattacgaggatgaggatgtggatgatgacgatgacgacgacttcattgtcgacgatgaggtcattgtgaatcggcaccccaagaagaaggccaggatagggagtgggagggagacagtggtggaccctcaagtatctattgaggaagagacatggccagaccttgagtcagactcatcggactttgagtttgcgacgtccgatgaagaacctaacaatgttgaaacacctgtagctgagcagactacagtcagaaaagggaggaagaagaggatatctgagtcagagtcatcctcagattctgaatttgttgtatcaggtaaggaattggaagaattgagggagcctgagcctccaaaggctgcaccaaatctgcatgtgtccttgagaaggatttgtattacaaggcatggagaaggcaagggaaaggagaaacaggaacaggaggaggctgggaagccaatatgcgggatctgtctctcggaggagctgagagctactgtacaaggtgtcctcaattgttgctcacactatttttgcttcgcatgcatcatggaatggtctagggttgagtcgagatgcccattgtgcaagcagcggttcactacaatcaccaagtcatcaaaggtagatcttggtcttggagtgagaaaagctgtagtcaaggtcgaagagcgtgatcaggtttatcagcccactgaagaagaaataaggcgttggctagacccatatgaaaatgttgtttgtatagagtgcaatcaaggtggcgatgataatctcatgctactatgtgacatttgtgattcctcagcacatacttattgtgttggcttgggtagagaagtgcccgaaggaaactggtactgtggaggatgtagactcggtgacgagggaccatcatatactggaattcagcgtacagtagcttatgaaagacaaaattacagaagtcatgtcggtagttctgtaagttttggcatggctgtaccaggcggtacatttgaaaggccgtcatcaatcaatcctcgccattcttttcaagggattgatctaaatctatctccaagagagtttcccggagaatcacatcctgctgaatcacaagtttcaactgatagcgtatcaactcccactggaagagctggaagaactatttcaggaaggcgtgaattacaacggtacattcagagtttgttcagaccaagtctacctagtagaccagacacgtaccacaatattgcgcagaacagtggtggtgtatcaagaaatgaaccgaaccgctggaacttcccttcttcatcagaagcaaacacatcacagaatctgcctgatggcattcagaaccatcacagtgaccttccatttgttcaagctcacagcaattttgctccatttatgtccccagatggggatgatttccagcaaattgagggtgtcaagagcaacctcaggaacatgcagtagagcccttacggcgttactagaagctcgattctaccctgtgaagcttaccaagggggcaacatgtgccgttttaatggcttgtggaactgaacataacaaaagcttgtgcctgttgcattctcccagaaattgatgtggttcggctcatttgcggagatgtgatgtggtcaacgatataagatacatgctctctttgtttaagtttaggcattttttgttgtcgtcattcttattcattcagtcattaagcacaacctcagattacacagcgaaggcatttctgaatgtcttgatagcttcaaatttatacattgtaatattgtggtaacaccaatttcattaggctgaccattcttttcctcgcgagatgctcttttgcctactaggaatgctgataactgagcttcccagcctcttctataatcatataccgcgcggtggcaaactagcctcgttcgggtactggctttctgttctattagcatactggtctagtggatcaaccgagaaaagctatcaacaatcttagtactaacaatctatggtctgaagactcgtcttctttaagtgttttgttgtatagcgcagctgctttttgtacagatgaatgtttgttccatattgcttaagtttgtatccagtatccccttcatatgcatgtgtttatagagttgtggccattgtgcctgggtctccggattgttctgtgg

SEQ ID NO: 84132 - DNA, 2962 bp, Zea Mays
atgaatgaaaaacgattcgtcgtcgctctctcccaaacgttggttcgaaccgggacgaaaccccagtcccctatgcgaccgcggcaaaggttcgaccgccgcatcaaacacgcaatcgccgccagctcggtctgcggccccgcaccggtgttctaccgtttggatgccaaggtgaacgccggccgccatggcctccatcgagccccgcaatcctacgccggcagaacaccggtgcggggccgcggccgccgctcaccaaccggcccgcgacttcctcgcccaccgcgacggcgtcgacaagctcctcaagatcttccgctacgccacgcccctcgcactcgccgctggggccccggcgcctccgcccgcctcaagtctttcgagtccagcgtcgtcctcagccgcaagggtttccgtctcggcaagttcgtgcagtccctccgcgcccacccgcaccttcccccggcgcttgcgctactcgcctacggcagtgagggcgtctactacttcgtcgagcagttcgtctggctcgccaaggccgggatcctgcctgcgcacctgctcgccaagttattgttgaagcctgaaggtacacaagttgtagataacacatcatatgatgaagtaaagctctgattaaagcgataaagtatatctgctgctgctgtgtatgattgcgttcagataaatggtcttgcttttctccaactcttcatcttcatagttctcaaatcaaaagcattgtgcctgaggctcacctgcaaccttgagctatccatgtcaatttaatttggagcaccaagatgcacgttggttctccaaatatcaaattagtcatcacaatttgcttctcatgcacaaaaagaagaaatacacagtacattcacacttcctaatcttaataaggaatagtttgcaaattgggtaacaaaaccctggagcttatgtaatcacagtctggcacatcatcatgaaataaaatatctatatgcccaagtgcaagtaaggtataaaaatgatgaaggattgcttaaaactaaatcagtgacatagacttgccagtagtaggaggtccaatcttgaataatcgaaacatcattcagctattggctcttattatttcaggtcaaaatagaaattaaattttgtttgtatgggcgattgccatctattgagttaggctacttcaatgacctggaaagaatggtgatcagcgaaaaaaagaacttcaggagttgtctaattgcaatcaatcaatgtagggcagtatttgttcattacatggtttttaaggcatcacctaggcgtccaggctctcaaaaactctgggcattcaccgtcgccatgcagaatgagacacagaggaaggaaggatggagaggaagatgagggaaagcgttccggagttgatttcgtgggagagcgggcgtcgatctggatggggaaacagcggcggtgctggagggagcttgaaggagagggtggcggcgctggatgagcggcggcgacggctttggagggagctcgaagggtaggggaagcgctggagggagatcgaaggcgtgggcggcggcgcttgagctggaagcagggcagcgcatgagggagcaaggcgacgacttgaaggagcagcagagcagggcggcggcgtgagggatagatgagaagtaggtcaagacatggataggagggatgggcatatgtgctggtgggctgtctaagagcaactccagtagttctctaaaatactccctgaatcaataatttagatagttaacctaaaaactcatctccgacagctctctaaatgaacttcctaaatttagtcacttctcatctaaccttatttcctacctacatttagcaaccacttaccaactcccgaaacataaaatctggcacacttcttttgtttggacgtcttttccacattctgagcccatgcgtcagctgtcggtgatgcacaattgcagcacctagtaagttagagattaaacaattaataatgtaatagttgcacatgcacaggtcgagaataaacaattgtggcaacaaatcaaaaggacaacacagctcaccatgttgaatcagtttgctgacgaggtcacaattttgagatcgagttgcagaagcgagatgaaaacaaaaggaaaaatggctaatcccactcaaattggtgatatgacaagttttaacatatttaggaagtaatatatagataactgttggaggagataagtttttttgtttcctatattatttgaggacttgctaaatctcagatttaggtagtagaaatatacataactattggagctgctctaagtgggctggcatgcctttttctcccttctccctccctctctttttttctttttctcccttctccctccctctctttttttctttttctccctccatcctgctgccattttattgcttcatatgataataaggcgtcaccttgcagtatatagcagtatatgcactatgaagtttgctcaattttaactctgctgttaagatggtctgctgctatggtcagggtgttgctgtggtgggtgttggcaactagggagttgtaagtgcttcaaggtactgctgtgcagtggcctttttttcgtattattgtaaaacacattcgtcatttaaatgttgcagggatgattcagcgcatttaccttttctttgggattctcttcaccatattttattgagacaaaacttccatgtttgattggatggctaagaaatctgtatccttgtttgctcttattattcatgcgaatattgtgttatgtgtagccaggtagggtcatattagtgtgttttgtttccagcaatagctgagtaggttcagcttaatgttattctaagtatgtctctgtatttttgtgttatagccttataggtgtacttaacaaatgaaacaataaagaggatgacattaatgaaaggtttg

SEQ ID NO: 84133 - DNA, 2182 bp, Zea Mays
cggtgcaagccgtcgtttcaggtgaattcgagtgagccaagtggtctcgactctcgactctctcgagtgagtgagtgatcgccgcctcggcttgcacgtggccactctcaatggacctgaagaggacgcttgacgtggaggaggaggtggtggacggcgacgaggacgagctcgcctgctgtcccgacgccaagcgccgccggacgttcgtcgatagctcgatgcaggaggccattggcgcgcagtacatgcagaggcatctgcccaagctggagccatttctgcgcagagtcgtgcaggaggaggtgcacaatgttcttatccgacacatcgattccgcacacaggctcccgctccagctaaagacaagcagcaagcggtacaagctgcagttccagggaaacctgccgcagacgcttttcacgggcaacagggtggaggcggagagcaagcagccgctccggctagtcctgaccgacgctaccaccggccagacggtcgcctccgggcccatgtcctcgatgaaggtcgagctcctcgtcctcgacggcgacttcaacgccgacgagcggctggtggagcacagcgagaaggagttcagcgagagcgtcgtgttcgagagggaaggcaagaggccgctcttgtccggcgaggtggtggtcgtgctcgagaagggcgctgcctccatccgcgacatctccttcacggataactccagctggatacggagccgcaagttcaggctcggcgccaggatgtccagggctagctccatcgaagagcgggtgctggaagccgtgagcaacccgttcctagtgaaggatcaccgtggagaagtgtacaagaagcaccatccacctgcattagccgacgacgtgtggcgtctggagaagatcgggaaagacggcgtgttccacaagaagctggcggacttcggaatccacactgttcaagacttcctcaggaacctggtgatggatcagtacggactgcgcagccggcatgtcgaacaagatgtgggagtccacggtggagcacgcccgggagtgcgtgctggacgacaggctctactcctactgcagcgggcacgggaccgtcctcctgttcaactgcgtctacgaagtcgtcggcgtgctcgtcgggggccactgcttcaccttgagcgctctcaccccgacacagaaggcgctggttgggcagctgcagcaggacgcgtacaagttcccggaccgcatagccgagttcaaggtgcagtcgcagagcgccggcgtggagcagccacccgccgcggtcgagtccccgccgtccgtgcccggggcgcaggtgctcggcctcccgcacggtgtcgtccaggtccagccctcagcaggcgcgccgagtgcccatgacctgctgctgagcccgcggctcctccagcaccagcagcagccgctcagcgaggcggccctggaggacgtgctgcagtcggccagcgccgcgcaccagctcgacgccgccgagccttggttcccttcgtttggggcgggcgggttcgatgcgcgggacccgttcgacgtgcagttcggcggcgggtcgcagccgtgcgggctgctgctctccagcaccggcgccaggttgtgacttgcgagggacgtacgtacgcctctcgccgggcacgctgtcttttccatgtggtccgtggcgtcgtcgcgcggaacgagagaggacccggccgggcaaccggcgccggcgttttcggttggatatatgacgaaatctgcaggccgcagcggagcatgcatgggtcgggtcggtgcactgactgattttctgtctgtccgctaacagtcacaggtcggtgctgtttgtctgaggatgcctgtgttgcccagaggaaaggcaaagctggtgcagagagaagatacagtacagtggtgactggtagtgcagctggtggtaggatcagatgtcatcttttgtcattttggcatgtaacgtgagtgatgagtaatgagaagagcacagttctggccgttcaccagagactcccttcccatgtctgtaaaagcatagaagcgtgccttttgttttctcccttttcttttgcttgttcatcgtaaagatattgtacgtagtgcttggtattacacacttctcttcggtttgtacaagctcgtttgcatcaaccacggttaaaatgaat

SEQ ID NO: 84134 - DNA, 2382 bp, Zea Mays
ccgctttccggcctgacaaaatcccgcgccctttctgcaggcgtacgtcggcactgaaagaaaggaggagccgaggaggaggaggaggacgggaaagccgaaaggagctatccctccctccggccccggtggacgggcgaggcgagccctgcccgcctcggaatcttggcatttctagggattctgtcattcatcctggtgtgtggtgaggtgaattcgagtgagccaagtggtctcgactctcgactctctcgagtgagtgagtgatcgccgcctcggcttgcacgtggccactctcaatggacctgaagaggacgcttgacgtggaggaggaggtggtggacggcgacgaggacgagctcgcctgctgtcccgacgccaagcgccgccggacgttcgtcgatagctcgatgcaggaggccattggcgcgcagtacatgcagaggcatctgcccaagctggagccatttctgcgcagagtcgtgcaggaggaggtgcacaatgttcttatccgacacatcgattccgcacacaggctcccgctccagctaaagacaagcagcaagcggtacaagctgcagttccagggaaacctgccgcagacgcttttcacgggcaacagggtggaggcggagagcaagcagccgctccggctagtcctgaccgacgctaccaccggccagacggtcgcctccgggcccatgtcctcgatgaaggtcgagctcctcgtcctcgacggcgacttcaacgccgacgagcggctggtggagcacagcgagaaggagttcagcgagagcgtcgtgttcgagagggaaggcaagaggccgctcttgtccggcgaggtggtggtcgtgctcgagaagggcgctgcctccatccgcgacatctccttcacggataactccagctggatacggagccgcaagttcaggctcggcgccaggatgtccagggctagctccatcgaagagcgggtgctggaagccgtgagcaacccgttcctagtgaaggatcaccgtggagaagtgtacaagaagcaccatccacctgcattagccgacgacgtgtggcgtctggagaagatcgggaaagacggcgtgttccacaagaagctggcggacttcggaatccacactgttcaagacttcctcaggaacctggtgatggatcagtacggactgcgcagcttgcttggcagcggcatgtcgaacaagatgtgggagtccacggtggagcacgcccgggagtgcgtgctggacgacaggctctactcctactgcagcgggcacgggaccgtcctcctgttcaactgcgtctacgaagtcgtcggcgtgctcgtcgggggccactgcttcaccttgagcgctctcaccccgacacagaaggcgctggttgggcagctgcagcaggacgcgtacaagttcccggaccgcatagccgagttcaaggtgcagtcgcagagcgccggcgtggagcagccacccgccgcggtcgagtccccgccgtccgtgcccggggcgcaggtgctcggcctcccgcacggtgtcgtccaggtccagccctcagcaggcgcgccgagtgcccatgacctgctgctgagcccgcggctcctccagcaccagcagcagccgctcagcgaggcggccctggaggacgtgctgcagtcggccagcgccgcgcaccagctcgacgccgccgagccttggttcccttcgtttggggcgggcgggttcgatgcgcgggacccgttcgacgtgcagttcggcggcgggtcgcagccgtgcgggctgctgctctccagcaccggcgccaggttgtgacttgcgagggacgtacgtacgcctctcgccgggcacgctgtcttttccatgtggtccgtggcgtcgtcgcgcggaacgagagaggacccggccgggcaaccggcgccggcgttttcggttggatatatgacgaaatctgcaggccgcagcggagcatgcatgggtcgggtcggtgcactgactgattttctgtctgtccgctaacagtcacaggtcggtgctgtttgtctgaggatgcctgtgttgcccagaggaaaggcaaagctggtgcagagagaagatacagtacagtggtgactggtagtgcagctggtggtaggatcagatgtcatcttttgtcattttggcatgtaacgtgagtgatgagtaatgagaagagcacagttctggccgttcaccagagactcccttcccatgtctgtaaaagcatagaagcgtgccttttgttttctcccttttcttttgcttgttcatcgtaaagatattgtacgtagtgcttggtattacacacttctcttcggtttgtacaagctcgtttgcatcaaccacggttaaaatgaat

SEQ ID NO: 84135 - DNA, 3840 bp, Zea Mays
cacttgcatagttgcacaccccacggccgcggtgcgtcggtgcggttgatcccgccaacaaggcaacaacgggcgcccgcccccgtcctgtcatctccgctcgccacaccagtcgccgtcggccgtcgctcctctcctccacgcctccctccctacctacctacctcgccttggcatccccgcaaggaatatcccttccatagcgtcccttgcttctttaccaccccaccctgtattcgtgcgtccctgccgcttaatttcccggtttctctgcgctctttcgtcatcttggatcttggttgcctcgggtggttcacagggtaatcatcgagcatagagttcatgttgcctgattaccttagttgctactatgcgatttaaggtgttacacaacttcatgctggataaattaggtcgtgggaggactttaaaaactagctgcctggtgtttctttttctccttcattctagtgaactcactttcagaagcttgtttgcaatatgtcttacacgaactgtttgaagaagcatccctatagaattttctttcgatatggcaactccatcctcagagcttctttagagaaaggctcaccacaaaagttacttatggactatagcactttgctccatttcactgctttctgccctgattacagaacctacgctttccttctcagagcttgtgcaaaatgctcagacctctatgctgccatggaaatccattgtcatctcactaaagttgggttgctatctaaacagcatataacacctcctctgttcaagttatatatttctcatggttacatgttggaagcatgtgaattactttggtcaatgctggagtggaataccgatcccttccatggcaatctgatgcttatgggattcctgaagagcggacggctagataaggcatatcagattttcaagaggatgcctgtcaaggacttgatctcatggaattcaatgattgcaggtgcagtaaggagctcgcacctaaaagaagcaatgaatatttttagcaggttggttagttcaggccttgtgcctgattgcttctcgttctcctcagttctgtcagcatgtgctcgagctggtgctcgacgatatggagtgtgggtgcatcacctgatgactgaactgggggtggaaatgaatcatatcttgagctcagcacttgttgacatgtatgccaaatgcggaagaattgatgtagcaactgagatattcaataaagtcaagggaaaccatatttctgtctggaatactatgattagtggcttggcatcgcatggtcttggatccgatgtagtcattttgttccacaagatgaaaagtgaagagctggttcctgatggggttacgtttgttgcactcttgacagcatgcagtcgctgtggcatggttgaagaggctcggcattacttcagatcaatgactacagagtattctatcacgccagaggttgagcactacggtgccttggtggatacgttgtcgcgagctgggttgctggatgaagcatacgagttggtaatgtcgatgaatgtaaagcctgatgttgtgatatggagggcattacttagcgcctgtcgcagatatcgccacacaaaactaggtgaggccactattgagcatatggcatgccatggcagtggggattatacccttctttcaaacatctattcatcagcaaatagatggaatgattcagaggaagtatggaaacagaggaaacaaaagaaagttaggaagaccaaaggcttgagttgggttgagttagggggaagcacccatgaatttaaagctggtgatagatctcatcctgacaccgaggatatatacgtagtgctgcatggattatgcagaagagctaaggttgaaggttatgctccattgactgaactagtaacaaaagatgtctccgaagaggaaagagaagaaaaccttaccttccatagtgagaagctagcagtggcttatagtgtcctgaagactggtccagggacagaaataatggtttcaaagaatttgcaggtttgcagtgactgtcatgaatggatgaagataatctcaaaggtactttgccgtgttattattctgagggatagagttcggtttcaccggtttgaaagtggatggtgctcctgcaaggattactggtaggcctttcctggagcaatacagatgtaatccagctaatacaaaacgagcagttcctaggggatacatctgacctaattactttctccatctggagaatttggtgctggttctgctgctgcatagcaatgaaatgaaatatttggacatttggttactatatagtttagctctttggcacagcacagggaaccaaggaaaggactagatgaccgacacatgcacgtgtattgtacactccaaagcaatgcaagtgattagtgagataaatcaagagatcaaaatctctacgttggatttgtgttttatgattcattcagcacccttatgttttcagatgcttgacatgtgatgtcttgttttgggtttttttcgatgattacttgtgtcgacatgatatgtggattaatgctgaagtgttatccaatattcagtgaaaacgaggtactgaaaaataggagttgcaatgcctttgatgccccattcatctgtttttgcatgtccttgtatttgctgcgagaacttccatctactaagacactctataggagacacttgcagcatcagatggcttaaatgccatagcagattaatatatgaaactttcctctcaagcagaagacatcaaagtaaacctcttagtacaacagttctagcaagaagcacaagaaaagtaagcagtcatttagcaatagtcatcattttgcatggtaaatcagttgaatcatcaattgaagtgtacatgcagtcagagtttgagcagcttaactcacttcattgctacaatgttgtggaagagttttctgtagtcaagactaaatggcctgcaattgtccttgttttttatattgaaactacaagcttctcacattgtgatgacagaattattgagttttcagttccgtgatcttatgggacgaaaggatagcactttccagacactcataaatcatgaggaagatgtgtggagttgtcagatggacggcaaactagttctctggttactcctaatgggcattcctttgatgtatcctttttctcatctttgagttccgactgtgtgaagtagagatgcctagtgattgactctttgtggatactcttcctattgcaagacaattggtggattctaatgaattctattggatccaaacggtgcctcggtaatgcagtgaggacccagagatagagatgaggaactgagggttaaagtgagggacaagaagattcgagtattttacaatttcagtatttgttttatatttgatagttaaagttagaagacaagaagactattgttctgtgcggaatcactggtgagagacgacagaagctttcaggctgttattatttgccgatttcttgtttttatatgtttttaaaatttttgagtaagttttacctcttcatttggagcaattggtgaatagtgaagatattgcttcatgacggcgtgtttcatatatatcattatgtaatgttttgttataacttttgaactatgttactttctattgtatttttgtcgtattaaattagatccgctggtcgcatgtgtgccataggagtgacgcgccacgctgacttcgtttcaaaagaagtgcaatgcagagtggagctttgcctttggccctaaagagagtaattgctgttcacagcatgaactgttcaaat

SEQ ID NO: 84136 - DNA, 3245 bp, Zea Mays
cacttgcatagttgcacaccccacggccgcggtgcgtcggtgcggttgatcccgccaacaaggcaacaacgggcgcccgcccccgtcctgtcatctccgctcgccacaccagtcgccgtcggccgtcgctcctctcctccacgcctccctccctacctacctacctcgccttggcatccccgcaaggaatatcccttccatagcgtcccttgcttctttaccaccccaccctgtattcgtgcgtccctgccgcttaatttcccggtttctctgcgctctttcgtcatcttggatcttggttgcctcgggtggttcacagaacctacgctttccttctcagagcttgtgcaaaatgctcagacctctatgctgccatggaaatccattgtcatctcactaaagttgggttgctatctaaacagcatataacacctcctctgttcaagttatatatttctcatggttacatgttggaagcatgtgaattactttggtcaatgctggagtggaataccgatcccttccatggcaatctgatgcttatgggattcctgaagagcggacggctagataaggcatatcagattttcaagaggatgcctgtcaaggacttgatctcatggaattcaatgattgcaggtgcagtaaggagctcgcacctaaaagaagcaatgaatatttttagcaggttggttagttcaggccttgtgcctgattgcttctcgttctcctcagttctgtcagcatgtgctcgagctggtgctcgacgatatggagtgtgggtgcatcacctgatgactgaactgggggtggaaatgaatcatatcttgagctcagcacttgttgacatgtatgccaaatgcggaagaattgatgtagcaactgagatattcaataaagtcaagggaaaccatatttctgtctggaatactatgattagtggcttggcatcgcatggtcttggatccgatgtagtcattttgttccacaagatgaaaagtgaagagctggttcctgatggggttacgtttgttgcactcttgacagcatgcagtcgctgtggcatggttgaagaggctcggcattacttcagatcaatgactacagagtattctatcacgccagaggttgagcactacggtgccttggtggatacgttgtcgcgagctgggttgctggatgaagcatacgagttggtaatgtcgatgaatgtaaagcctgatgttgtgatatggagggcattacttagcgcctgtcgcagatatcgccacacaaaactaggtgaggccactattgagcatatggcatgccatggcagtggggattatacccttctttcaaacatctattcatcagcaaatagatggaatgattcagaggaagtatggaaacagaggaaacaaaagaaagttaggaagaccaaaggcttgagttgggttgagttagggggaagcacccatgaatttaaagctggtgatagatctcatcctgacaccgaggatatatacgtagtgctgcatggattatgcagaagagctaaggttgaaggttatgctccattgactgaactagtaacaaaagatgtctccgaagaggaaagagaagaaaaccttaccttccatagtgagaagctagcagtggcttatagtgtcctgaagactggtccagggacagaaataatggtttcaaagaatttgcaggtttgcagtgactgtcatgaatggatgaagataatctcaaaggtactttgccgtgttattattctgagggatagagttcggtttcaccggtttgaaagtggatggtgctcctgcaaggattactggtaggcctttcctggagcaatacagatgtaatccagctaatacaaaacgagcagttcctaggggatacatctgacctaattactttctccatctggagaatttggtgctggttctgctgctgcatagcaatgaaatgaaatatttggacatttggttactatatagtttagctctttggcacagcacagggaaccaaggaaaggactagatgaccgacacatgcacgtgtattgtacactccaaagcaatgcaagtgattagtgagataaatcaagagatcaaaatctctacgttggatttgtgttttatgattcattcagcacccttatgttttcagatgcttgacatgtgatgtcttgttttgggtttttttcgatgattacttgtgtcgacatgatatgtggattaatgctgaagtgttatccaatattcagtgaaaacgaggtactgaaaaataggagttgcaatgcctttgatgccccattcatctgtttttgcatgtccttgtatttgctgcgagaacttccatctactaagacactctataggagacacttgcagcatcagatggcttaaatgccatagcagattaatatatgaaactttcctctcaagcagaagacatcaaagtaaacctcttagtacaacagttctagcaagaagcacaagaaaaatttggagaacttattcccattctgctataataggtgtggagttgtcagatggacggcaaactagttctctggttactcctaatgggcattcctttgatgtatcctttttctcatctttgagttccgactgtgtgaagtagagatgcctagtgattgactctttgtggatactcttcctattgcaagacaattggtggattctaatgaattctattggatccaaacggtgcctcggtaatgcagtgaggacccagagatagagatgaggaactgagggttaaagtgagggacaagaagattcgagtattttacaatttcagtatttgttttatatttgatagttaaagttagaagacaagaagactattgttctgtgcggaatcactggtgagagacgacagaagctttcaggctgttattatttgccgatttcttgtttttatatgtttttaaaatttttgagtaagttttacctcttcatttggagcaattggtgaatagtgaagatattgcttcatgacggcgtgtttcatatatatcattatgtaatgttttgttataacttttgaactatgttactttctattgtatttttgtcgtattaaattagatccgctggtcgcatgtgtgccataggagtgacgcgccacgctgacttcgtttcaaaagaagtgcaatgcagagtggagctttgcctttggccctaaagagagtaattgctgttcacagcatgaactgttcaaat

SEQ ID NO: 84137 - DNA, 1335 bp, Zea Mays
cacttgcatagttgcacaccccacggccgcggtgcgtcggtgcggttgatcccgccaacaaggcaacaacgggcgcccgcccccgtcctgtcatctccgctcgccacaccagtcgccgtcggccgtcgctcctctcctccacgcctccctccctacctacctacctcgccttggcatccccgcaaggaatatcccttccatagcgtcccttgcttctttaccaccccaccctgtattcgtgcgtccctgccgcttaatttcccggtttctctgcgctctttcgtcatcttggatcttggttgcctcgggtggttcacaggattaatgctgaagtgttatccaatattcagtgaaaacgaggtactgaaaaataggagttgcaatgcctttgatgccccattcatctgtttttgcatgtccttgtatttgctgcgagaacttccatctactaagacactctataggagacacttgcagcatcagatggcttaaatgccatagcagattaatatatgaaactttcctctcaagcagaagacatcaaagtaaacctcttagtacaacagttctagcaagaagcacaagaaaaatttggagaacttattcccattctgctataataggtgtggagttgtcagatggacggcaaactagttctctggttactcctaatgggcattcctttgatgtatcctttttctcatctttgagttccgactgtgtgaagtagagatgcctagtgattgactctttgtggatactcttcctattgcaagacaattggtggattctaatgaattctattggatccaaacggtgcctcggtaatgcagtgaggacccagagatagagatgaggaactgagggttaaagtgagggacaagaagattcgagtattttacaatttcagtatttgttttatatttgatagttaaagttagaagacaagaagactattgttctgtgcggaatcactggtgagagacgacagaagctttcaggctgttattatttgccgatttcttgtttttatatgtttttaaaatttttgagtaagttttacctcttcatttggagcaattggtgaatagtgaagatattgcttcatgacggcgtgtttcatatatatcattatgtaatgttttgttataacttttgaactatgttactttctattgtatttttgtcgtattaaattagatccgctggtcgcatgtgtgccataggagtgacgcgccacgctgacttcgtttcaaaagaagtgcaatgcagagtggagctttgcctttggccctaaagagagtaattgctgttcacagcatgaactgttcaaat

SEQ ID NO: 84138 - DNA, 1456 bp, Zea Mays
cacttgcatagttgcacaccccacggccgcggtgcgtcggtgcggttgatcccgccaacaaggcaacaacgggcgcccgcccccgtcctgtcatctccgctcgccacaccagtcgccgtcggccgtcgctcctctcctccacgcctccctccctacctacctacctcgccttggcatccccgcaaggaatatcccttccatagcgtcccttgcttctttaccaccccaccctgtattcgtgcgtccctgccgcttaatttcccggtttctctgcgctctttcgtcatcttggatcttggttgcctcgggtggttcacaggattaatgctgaagtgttatccaatattcagtgaaaacgaggtactgaaaaataggagttgcaatgcctttgatgccccattcatctgtttttgcatgtccttgtatttgctgcgagaacttccatctactaagacactctataggagacacttgcagcatcagatggcttaaatgccatagcagattaatatatgaaactttcctctcaagcagaagacatcaaagtaaacctcttagtacaacagttctagcaagaagcacaagaaaagggcaggtcacaggttcgaagtagcctctccacatttgtagggggaagacttgtcttggtttatttcttccccagactcccactcatgtgggaacctccagcaccgggtctgctcttattagcaatagcatgctctgcaggcctgatgttctaaggtgtggagttgtcagatggacggcaaactagttctctggttactcctaatgggcattcctttgatgtatcctttttctcatctttgagttccgactgtgtgaagtagagatgcctagtgattgactctttgtggatactcttcctattgcaagacaattggtggattctaatgaattctattggatccaaacggtgcctcggtaatgcagtgaggacccagagatagagatgaggaactgagggttaaagtgagggacaagaagattcgagtattttacaatttcagtatttgttttatatttgatagttaaagttagaagacaagaagactattgttctgtgcggaatcactggtgagagacgacagaagctttcaggctgttattatttgccgatttcttgtttttatatgtttttaaaatttttgagtaagttttacctcttcatttggagcaattggtgaatagtgaagatattgcttcatgacggcgtgtttcatatatatcattatgtaatgttttgttataacttttgaactatgttactttctattgtatttttgtcgtattaaattagatccgctggtcgcatgtgtgccataggagtgacgcgccacgctgacttcgtttcaaaagaagtgcaatgcagagtggagctttgcctttggccctaaagagagtaattgctgttcacagcatgaactgttcaaat

SEQ ID NO: 84139 - DNA, 3447 bp, Zea Mays
cacttgcatagttgcacaccccacggccgcggtgcgtcggtgcggttgatcccgccaacaaggcaacaacgggcgcccgcccccgtcctgtcatctccgctcgccacaccagtcgccgtcggccgtcgctcctctcctccacgcctccctccctacctacctacctcgccttggcatccccgcaaggaatatcccttccatagcgtcccttgcttctttaccaccccaccctgtattcgtgcgtccctgccgcttaatttcccggtttctctgcgctctttcgtcatcttggatcttggttgcctcgggtggttcacagggtaatcatcgagcatagagttcatgttgcctgattaccttagttgctactatgcgatttaaggtgttacacaacttcatgctggataaattaggtcgtgggaggactttaaaaactagctgcctggtgtttctttttctccttcattctagtgaactcactttcagaagcttgtttgcaatatgtcttacacgaactgtttgaagaagcatccctatagaattttctttcgatatggcaactccatcctcagagcttctttagagaaaggctcaccacaaaagttacttatggactatagcactttgctccatttcactgctttctgccctgattacagaacctacgctttccttctcagagcttgtgcaaaatgctcagacctctatgctgccatggaaatccattgtcatctcactaaagttgggttgctatctaaacagcatataacacctcctctgttcaagttatatatttctcatggttacatgttggaagcatgtgaattactttggtcaatgctggagtggaataccgatcccttccatggcaatctgatgcttatgggattcctgaagagcggacggctagataaggcatatcagattttcaagaggatgcctgtcaaggacttgatctcatggaattcaatgattgcaggtgcagtaaggagctcgcacctaaaagaagcaatgaatatttttagcaggttggttagttcaggccttgtgcctgattgcttctcgttctcctcagttctgtcagcatgtgctcgagctggtgctcgacgatatggagtgtgggtgcatcacctgatgactgaactgggggtggaaatgaatcatatcttgagctcagcacttgttgacatgtatgccaaatgcggaagaattgatgtagcaactgagatattcaataaagtcaagggaaaccatatttctgtctggaatactatgattagtggcttggcatcgcatggtcttggatccgatgtagtcattttgttccacaagatgaaaagtgaagagctggttcctgatggggttacgtttgttgcactcttgacagcatgcagtcgctgtggcatggttgaagaggctcggcattacttcagatcaatgactacagagtattctatcacgccagaggttgagcactacggtgccttggtggatacgttgtcgcgagctgggttgctggatgaagcatacgagttggtaatgtcgatgaatgtaaagcctgatgttgtgatatggagggcattacttagcgcctgtcgcagatatcgccacacaaaactaggtgaggccactattgagcatatggcatgccatggcagtggggattatacccttctttcaaacatctattcatcagcaaatagatggaatgattcagaggaagtatggaaacagaggaaacaaaagaaagttaggaagaccaaaggcttgagttgggttgagttagggggaagcacccatgaatttaaagctggtgatagatctcatcctgacaccgaggatatatacgtagtgctgcatggattatgcagaagagctaaggttgaaggttatgctccattgactgaactagtaacaaaagatgtctccgaagaggaaagagaagaaaaccttaccttccatagtgagaagctagcagtggcttatagtgtcctgaagactggtccagggacagaaataatggtttcaaagaatttgcaggtttgcagtgactgtcatgaatggatgaagataatctcaaaggtactttgccgtgttattattctgagggatagagttcggtttcaccggtttgaaagtggatggtgctcctgcaaggattactggtaggcctttcctggagcaatacagatgtaatccagctaatacaaaacgagcagttcctaggggatacatctgacctaattactttctccatctggagaatttggtgctggttctgctgctgcatagcaatgaaatgaaatatttggacatttggttactatatagtttagctctttggcacagcacagggaaccaaggaaaggactagatgaccgacacatgcacgtgtattgtacactccaaagcaatgcaagtgattagtgagataaatcaagagatcaaaatctctacgttggatttgtgttttatgattcattcagcacccttatgttttcagatgcttgacatgtgatgtcttgttttgggtttttttcgatgattacttgtgtcgacatgatatgtggattaatgctgaagtgttatccaatattcagtgaaaacgaggagacacttgcagcatcagatggcttaaatgccatagcagattaatatatgaaactttcctctcaagcagaagacatcaaagtaaacctcttagtacaacagttctagcaagaagcacaagaaaagtgtggagttgtcagatggacggcaaactagttctctggttactcctaatgggcattcctttgatgtatcctttttctcatctttgagttccgactgtgtgaagtagagatgcctagtgattgactctttgtggatactcttcctattgcaagacaattggtggattctaatgaattctattggatccaaacggtgcctcggtaatgcagtgaggacccagagatagagatgaggaactgagggttaaagtgagggacaagaagattcgagtattttacaatttcagtatttgttttatatttgatagttaaagttagaagacaagaagactattgttctgtgcggaatcactggtgagagacgacagaagctttcaggctgttattatttgccgatttcttgtttttatatgtttttaaaatttttgagtaagttttacctcttcatttggagcaattggtgaatagtgaagatattgcttcatgacggcgtgtttcatatatatcattatgtaatgttttgttataacttttgaactatgttactttctattgtatttttgtcgtattaaattagatccgctggtcgcatgtgtgccataggagtgacgcgccacgctgacttcgtttcaaaagaagtgcaatgcagagtggagctttgcctttggccctaaagagagtaattgctgttcacagcatgaactgttcaaat

SEQ ID NO: 84140 - DNA, 3322 bp, Zea Mays
cacttgcatagttgcacaccccacggccgcggtgcgtcggtgcggttgatcccgccaacaaggcaacaacgggcgcccgcccccgtcctgtcatctccgctcgccacaccagtcgccgtcggccgtcgctcctctcctccacgcctccctccctacctacctacctcgccttggcatccccgcaaggaatatcccttccatagcgtcccttgcttctttaccaccccaccctgtattcgtgcgtccctgccgcttaatttcccggtttctctgcgctctttcgtcatcttggatcttggttgcctcgggtggttcacagggtaatcatcgagcatagagttcatgttgcctgattaccttagttgctactatgcgatttaaggtgttacacaacttcatgctggataaattaggtcgtgggaggactttaaaaactagctgcctggtgtttctttttctccttcattctagtgaactcactttcagaagcttgtttgcaatatgtcttacacgaactgtttgaagaagcatccctatagaattttctttcgatatggcaactccatcctcagagcttctttagagaaaggctcaccacaaaagttacttatggactatagcactttgctccatttcactgctttctgccctgattacagaacctacgctttccttctcagagcttgtgcaaaatgctcagacctctatgctgccatggaaatccattgtcatctcactaaagttgggttgctatctaaacagcatataacacctcctctgttcaagttatatatttctcatggttacatgttggaagcatgtgaattactttggtcaatgctggagtggaataccgatcccttccatggcaatctgatgcttatgggattcctgaagagcggacggctagataaggcatatcagattttcaagaggatgcctgtcaaggacttgatctcatggaattcaatgattgcaggtgcagtaaggagctcgcacctaaaagaagcaatgaatatttttagcaggttggttagttcaggccttgtgcctgattgcttctcgttctcctcagttctgtcagcatgtgctcgagctggtgctcgacgatatggagtgtgggtgcatcacctgatgactgaactgggggtggaaatgaatcatatcttgagctcagcacttgttgacatgtatgccaaatgcggaagaattgatgtagcaactgagatattcaataaagtcaagggaaaccatatttctgtctggaatactatgattagtggcttggcatcgcatggtcttggatccgatgtagtcattttgttccacaagatgaaaagtgaagagctggttcctgatggggttacgtttgttgcactcttgacagcatgcagtcgctgtggcatggttgaagaggctcggcattacttcagatcaatgactacagagtattctatcacgccagaggttgagcactacggtgccttggtggatacgttgtcgcgagctgggttgctggatgaagcatacgagttggtaatgtcgatgaatgtaaagcctgatgttgtgatatggagggcattacttagcgcctgtcgcagatatcgccacacaaaactaggtgaggccactattgagcatatggcatgccatggcagtggggattatacccttctttcaaacatctattcatcagcaaatagatggaatgattcagaggaagtatggaaacagaggaaacaaaagaaagttaggaagaccaaaggcttgagttgggttgagttagggggaagcacccatgaatttaaagctggtgatagatctcatcctgacaccgaggatatatacgtagtgctgcatggattatgcagaagagctaaggttgaaggttatgctccattgactgaactagtaacaaaagatgtctccgaagaggaaagagaagaaaaccttaccttccatagtgagaagctagcagtggcttatagtgtcctgaagactggtccagggacagaaataatggtttcaaagaatttgcaggtttgcagtgactgtcatgaatggatgaagataatctcaaaggtactttgccgtgttattattctgagggatagagttcggtttcaccggtttgaaagtggatggtgctcctgcaaggattactggtaggcctttcctggagcaatacagatgtaatccagctaatacaaaacgagcagttcctaggggatacatctgacctaattactttctccatctggagaatttggtgctggttctgctgctgcatagcaatgaaatgaaatatttggacatttggttactatatagtttagctctttggcacagcacagggaaccaaggaaaggactagatgaccgacacatgcacgtgtattgtacactccaaagcaatgcaagtgattagtgagataaatcaagagatcaaaatctctacgttggatttgtgttttatgattcattcagcacccttatgttttcagatgcttgacatgtgatgtcttgttttgggtttttttcgatgattacttgtgtcgacatgatatgtggattaatgctgaagtgttatccaatattcagtgaaaacgaggtgtggagttgtcagatggacggcaaactagttctctggttactcctaatgggcattcctttgatgtatcctttttctcatctttgagttccgactgtgtgaagtagagatgcctagtgattgactctttgtggatactcttcctattgcaagacaattggtggattctaatgaattctattggatccaaacggtgcctcggtaatgcagtgaggacccagagatagagatgaggaactgagggttaaagtgagggacaagaagattcgagtattttacaatttcagtatttgttttatatttgatagttaaagttagaagacaagaagactattgttctgtgcggaatcactggtgagagacgacagaagctttcaggctgttattatttgccgatttcttgtttttatatgtttttaaaatttttgagtaagttttacctcttcatttggagcaattggtgaatagtgaagatattgcttcatgacggcgtgtttcatatatatcattatgtaatgttttgttataacttttgaactatgttactttctattgtatttttgtcgtattaaattagatccgctggtcgcatgtgtgccataggagtgacgcgccacgctgacttcgtttcaaaagaagtgcaatgcagagtggagctttgcctttggccctaaagagagtaattgctgttcacagcatgaactgttcaaat

SEQ ID NO: 84141 - DNA, 1590 bp, Zea Mays
cacttgcatagttgcacaccccacggccgcggtgcgtcggtgcggttgatcccgccaacaaggcaacaacgggcgcccgcccccgtcctgtcatctccgctcgccacaccagtcgccgtcggccgtcgctcctctcctccacgcctccctccctacctacctacctcgccttggcatccccgcaaggaatatcccttccatagcgtcccttgcttctttaccaccccaccctgtattcgtgcgtccctgccgcttaatttcccggtttctctgcgctctttcgtcatcttggatcttggttgcctcgggtggttcacaggattaatgctgaagtgttatccaatattcagtgaaaacgaggtactgaaaaataggagttgcaatgcctttgatgccccattcatctgtttttgcatgtccttgtatttgctgcgagaacttccatctactaagacactctataggagacacttgcagcatcagatggcttaaatgccatagcagattaatatatgaaactttcctctcaagcagaagacatcaaagtaaacctcttagtacaacagttctagcaagaagcacaagaaaagtaagcagtcatttagcaatagtcatcattttgcatggtaaatcagttgaatcatcaattgaagtgtacatgcagtcagagtttgagcagcttaactcacttcattgctacaatgttgtggaagagttttctgtagtcaagactaaatggcctgcaattgtccttgttttttatattgaaactacaagcttctcacattgtgatgacagaattattgagttttcagttccgtgatcttatgggacgaaaggatagcactttccagacactcataaatcatgaggaagatgtgtggagttgtcagatggacggcaaactagttctctggttactcctaatgggcattcctttgatgtatcctttttctcatctttgagttccgactgtgtgaagtagagatgcctagtgattgactctttgtggatactcttcctattgcaagacaattggtggattctaatgaattctattggatccaaacggtgcctcggtaatgcagtgaggacccagagatagagatgaggaactgagggttaaagtgagggacaagaagattcgagtattttacaatttcagtatttgttttatatttgatagttaaagttagaagacaagaagactattgttctgtgcggaatcactggtgagagacgacagaagctttcaggctgttattatttgccgatttcttgtttttatatgtttttaaaatttttgagtaagttttacctcttcatttggagcaattggtgaatagtgaagatattgcttcatgacggcgtgtttcatatatatcattatgtaatgttttgttataacttttgaactatgttactttctattgtatttttgtcgtattaaattagatccgctggtcgcatgtgtgccataggagtgacgcgccacgctgacttcgtttcaaaagaagtgcaatgcagagtggagctttgcctttggccctaaagagagtaattgctgttcacagcatgaactgttcaaat

SEQ ID NO: 84142 - DNA, 3995 bp, Zea Mays
cacttgcatagttgcacaccccacggccgcggtgcgtcggtgcggttgatcccgccaacaaggcaacaacgggcgcccgcccccgtcctgtcatctccgctcgccacaccagtcgccgtcggccgtcgctcctctcctccacgcctccctccctacctacctacctcgccttggcatccccgcaaggaatatcccttccatagcgtcccttgcttctttaccaccccaccctgtattcgtgcgtccctgccgcttaatttcccggtttctctgcgctctttcgtcatcttggatcttggttgcctcgggtggttcacagggtaatcatcgagcatagagttcatgttgcctgattaccttagttgctactatgcgatttaaggtgttacacaacttcatgctggataaattaggtcgtgggaggactttaaaaactagctgcctggtgtttctttttctccttcattctagtgaactcactttcagaagcttgtttgcaatatgtcttacacgaactgtttgaagaagcatccctatagaattttctttcgatatggcaactccatcctcagagcttctttagagaaaggctcaccacaaaagttacttatggactatagcactttgctccatttcactgctttctgccctgattacagaacctacgctttccttctcagagcttgtgcaaaatgctcagacctctatgctgccatggaaatccattgtcatctcactaaagttgggttgctatctaaacagcatataacacctcctctgttcaagttatatatttctcatggttacatgttggaagcatgtgaattactttggtcaatgctggagtggaataccgatcccttccatggcaatctgatgcttatgggattcctgaagagcggacggctagataaggcatatcagattttcaagaggatgcctgtcaaggacttgatctcatggaattcaatgattgcaggtgcagtaaggagctcgcacctaaaagaagcaatgaatatttttagcaggttggttagttcaggccttgtgcctgattgcttctcgttctcctcagttctgtcagcatgtgctcgagctggtgctcgacgatatggagtgtgggtgcatcacctgatgactgaactgggggtggaaatgaatcatatcttgagctcagcacttgttgacatgtatgccaaatgcggaagaattgatgtagcaactgagatattcaataaagtcaagggaaaccatatttctgtctggaatactatgattagtggcttggcatcgcatggtcttggatccgatgtagtcattttgttccacaagatgaaaagtgaagagctggttcctgatggggttacgtttgttgcactcttgacagcatgcagtcgctgtggcatggttgaagaggctcggcattacttcagatcaatgactacagagtattctatcacgccagaggttgagcactacggtgccttggtggatacgttgtcgcgagctgggttgctggatgaagcatacgagttggtaatgtcgatgaatgtaaagcctgatgttgtgatatggagggcattacttagcgcctgtcgcagatatcgccacacaaaactaggtgaggccactattgagcatatggcatgccatggcagtggggattatacccttctttcaaacatctattcatcagcaaatagatggaatgattcagaggaagtatggaaacagaggaaacaaaagaaagttaggaagaccaaaggcttgagttgggttgagttagggggaagcacccatgaatttaaagctggtgatagatctcatcctgacaccgaggatatatacgtagtgctgcatggattatgcagaagagctaaggttgaaggttatgctccattgactgaactagtaacaaaagatgtctccgaagaggaaagagaagaaaaccttaccttccatagtgagaagctagcagtggcttatagtgtcctgaagactggtccagggacagaaataatggtttcaaagaatttgcaggtttgcagtgactgtcatgaatggatgaagataatctcaaaggtactttgccgtgttattattctgagggatagagttcggtttcaccggtttgaaagtggatggtgctcctgcaaggattactggtaggcctttcctggagcaatacagatgtaatccagctaatacaaaacgagcagttcctaggggatacatctgacctaattactttctccatctggagaatttggtgctggttctgctgctgcatagcaatgaaatgaaatatttggacatttggttactatatagtttagctctttggcacagcacagggaaccaaggaaaggactagatgaccgacacatgcacgtgtattgtacactccaaagcaatgcaagtgattagtgagataaatcaagagatcaaaatctctacgttggatttgtgttttatgattcattcagcacccttatgttttcagatgcttgacatgtgatgtcttgttttgggtttttttcgatgattacttgtgtcgacatgatatgtggattaatgctgaagtgttatccaatattcagtgaaaacgaggtactgaaaaataggagttgcaatgcctttgatgccccattcatctgtttttgcatgtccttgtatttgctgcgagaacttccatctactaagacactctataggagacacttgcagcatcagatggcttaaatgccatagcagattaatatatgaaactttcctctcaagcagaagacatcaaagtaaacctcttagtacaacagttctagcaagaagcacaagaaaagtaagcagtcatttagcaatagtcatcattttgcatggtaaatcagttgaatcatcaattgaagtgtacatgcagtcagagtttgagcagcttaactcacttcattgctacaatgttgtggaagagttttctgtagtcaagactaaatggcctgcaattgtccttgttttttatattgaaactacaagcttctcacattgtgatgacagaattattgagttttcagttccgtgatcttatgggacgaaaggatagcactttccagacactcataaatcatgaggaagatgggcaggtcacaggttcgaagtagcctctccacatttgtagggggaagacttgtcttggtttatttcttccccagactcccactcatgtgggaacctccagcaccgggtctgctcttattagcaatagcatgctctgcaggcctgatgttctaaggtgtggagttgtcagatggacggcaaactagttctctggttactcctaatgggcattcctttgatgtatcctttttctcatctttgagttccgactgtgtgaagtagagatgcctagtgattgactctttgtggatactcttcctattgcaagacaattggtggattctaatgaattctattggatccaaacggtgcctcggtaatgcagtgaggacccagagatagagatgaggaactgagggttaaagtgagggacaagaagattcgagtattttacaatttcagtatttgttttatatttgatagttaaagttagaagacaagaagactattgttctgtgcggaatcactggtgagagacgacagaagctttcaggctgttattatttgccgatttcttgtttttatatgtttttaaaatttttgagtaagttttacctcttcatttggagcaattggtgaatagtgaagatattgcttcatgacggcgtgtttcatatatatcattatgtaatgttttgttataacttttgaactatgttactttctattgtatttttgtcgtattaaattagatccgctggtcgcatgtgtgccataggagtgacgcgccacgctgacttcgtttcaaaagaagtgcaatgcagagtggagctttgcctttggccctaaagagagtaattgctgttcacagcatgaactgttcaaat

SEQ ID NO: 84143 - DNA, 2932 bp, Zea Mays
gccactccacttgcatagttgcacaccccacggccgcggtgcgtcggtgcggttgatcccgccaacaaggcaacaacgggcgcccgcccccgtcctgtcatctccgctcgccacaccagtcgccgtcggccgtcgctcctctcctccacgcctccctccctacctacctacctcgccttggcatccccgcaaggaatatcccttccatagcgtcccttgcttctttaccaccccaccctgtattcgtgcgtccctgccgcttaatttcccggtttctctgcgctctttcgtcatcttggatcttggttgcctcgggtggttcacaggtgcagtaaggagctcgcacctaaaagaagcaatgaatatttttagcaggttggttagttcaggccttgtgcctgattgcttctcgttctcctcagttctgtcagcatgtgctcgagctggtgctcgacgatatggagtgtgggtgcatcacctgatgactgaactgggggtggaaatgaatcatatcttgagctcagcacttgttgacatgtatgccaaatgcggaagaattgatgtagcaactgagatattcaataaagtcaagggaaaccatatttctgtctggaatactatgattagtggcttggcatcgcatggtcttggatccgatgtagtcattttgttccacaagatgaaaagtgaagagctggttcctgatggggttacgtttgttgcactcttgacagcatgcagtcgctgtggcatggttgaagaggctcggcattacttcagatcaatgactacagagtattctatcacgccagaggttgagcactacggtgccttggtggatacgttgtcgcgagctgggttgctggatgaagcatacgagttggtaatgtcgatgaatgtaaagcctgatgttgtgatatggagggcattacttagcgcctgtcgcagatatcgccacacaaaactaggtgaggccactattgagcatatggcatgccatggcagtggggattatacccttctttcaaacatctattcatcagcaaatagatggaatgattcagaggaagtatggaaacagaggaaacaaaagaaagttaggaagaccaaaggcttgagttgggttgagttagggggaagcacccatgaatttaaagctggtgatagatctcatcctgacaccgaggatatatacgtagtgctgcatggattatgcagaagagctaaggttgaaggttatgctccattgactgaactagtaacaaaagatgtctccgaagaggaaagagaagaaaaccttaccttccatagtgagaagctagcagtggcttatagtgtcctgaagactggtccagggacagaaataatggtttcaaagaatttgcaggtttgcagtgactgtcatgaatggatgaagataatctcaaaggtactttgccgtgttattattctgagggatagagttcggtttcaccggtttgaaagtggatggtgctcctgcaaggattactggtaggcctttcctggagcaatacagatgtaatccagctaatacaaaacgagcagttcctaggggatacatctgacctaattactttctccatctggagaatttggtgctggttctgctgctgcatagcaatgaaatgaaatatttggacatttggttactatatagtttagctctttggcacagcacagggaaccaaggaaaggactagatgaccgacacatgcacgtgtattgtacactccaaagcaatgcaagtgattagtgagataaatcaagagatcaaaatctctacgttggatttgtgttttatgattcattcagcacccttatgttttcagatgcttgacatgtgatgtcttgttttgggtttttttcgatgattacttgtgtcgacatgatatgtggattaatgctgaagtgttatccaatattcagtgaaaacgaggtactgaaaaataggagttgcaatgcctttgatgccccattcatctgtttttgcatgtccttgtatttgctgcgagaacttccatctactaagacactctataggagacacttgcagcatcagatggcttaaatgccatagcagattaatatatgaaactttcctctcaagcagaagacatcaaagtaaacctcttagtacaacagttctagcaagaagcacaagaaaaatttggagaacttattcccattctgctataataggtgtggagttgtcagatggacggcaaactagttctctggttactcctaatgggcattcctttgatgtatcctttttctcatctttgagttccgactgtgtgaagtagagatgcctagtgattgactctttgtggatactcttcctattgcaagacaattggtggattctaatgaattctattggatccaaacggtgcctcggtaatgcagtgaggacccagagatagagatgaggaactgagggttaaagtgagggacaagaagattcgagtattttacaatttcagtatttgttttatatttgatagttaaagttagaagacaagaagactattgttctgtgcggaatcactggtgagagacgacagaagctttcaggctgttattatttgccgatttcttgtttttatatgtttttaaaatttttgagtaagttttacctcttcatttggagcaattggtgaatagtgaagatattgcttcatgacggcgtgtttcatatatatcattatgtaatgttttgttataacttttgaactatgttactttctattgtatttttgtcgtattaaattagatccgctggtcgcatgtgtgccataggagtgacgcgccacgctgacttcgtttcaaaagaagtgcaatgcagagtggagctttgcctttggccctaaagagagtaattgctgttcacagcatgaactgttcaaat

SEQ ID NO: 84144 - DNA, 3595 bp, Zea Mays
gccactccacttgcatagttgcacaccccacggccgcggtgcgtcggtgcggttgatcccgccaacaaggcaacaacgggcgcccgcccccgtcctgtcatctccgctcgccacaccagtcgccgtcggccgtcgctcctctcctccacgcctccctccctacctacctacctcgccttggcatccccgcaaggaatatcccttccatagcgtcccttgcttctttaccaccccaccctgtattcgtgcgtccctgccgcttaatttcccggtttctctgcgctctttcgtcatcttggatcttggttgcctcgggtggttcacagcagggtaatcatcgagcatagagttcatgttgcctgattaccttagttgctactatgcgatttaaggtgttacacaacttcatgctggataaattaggtcgtgggaggactttaaaaactagctgcctggtgtttctttttctccttcattctagtgaactcactttcagaagcttgtttgcaatatgtcttacacgaactgtttgaagaagcatccctatagaattttctttcgatatggcaactccatcctcagagcttctttagagaaaggctcaccacaaaagttacttatggactatagcactttgctccatttcactgctttctgccctgattacagaacctacgctttccttctcagagcttgtgcaaaatgctcagacctctatgctgccatggaaatccattgtcatctcactaaagttgggttgctatctaaacagcatataacacctcctctgttcaagttatatatttctcatggttacatgttggaagcatgtgaattactttggtcaatgctggagtggaataccgatcccttccatggcaatctgatgcttatgggattcctgaagagcggacggctagataaggcatatcagattttcaagaggatgcctgtcaaggacttgatctcatggaattcaatgattgcaggtgcagtaaggagctcgcacctaaaagaagcaatgaatatttttagcaggttggttagttcaggccttgtgcctgattgcttctcgttctcctcagttctgtcagcatgtgctcgagctggtgctcgacgatatggagtgtgggtgcatcacctgatgactgaactgggggtggaaatgaatcatatcttgagctcagcacttgttgacatgtatgccaaatgcggaagaattgatgtagcaactgagatattcaataaagtcaagggaaaccatatttctgtctggaatactatgattagtggcttggcatcgcatggtcttggatccgatgtagtcattttgttccacaagatgaaaagtgaagagctggttcctgatggggttacgtttgttgcactcttgacagcatgcagtcgctgtggcatggttgaagaggctcggcattacttcagatcaatgactacagagtattctatcacgccagaggttgagcactacggtgccttggtggatacgttgtcgcgagctgggttgctggatgaagcatacgagttggtaatgtcgatgaatgtaaagcctgatgttgtgatatggagggcattacttagcgcctgtcgcagatatcgccacacaaaactaggtgaggccactattgagcatatggcatgccatggcagtggggattatacccttctttcaaacatctattcatcagcaaatagatggaatgattcagaggaagtatggaaacagaggaaacaaaagaaagttaggaagaccaaaggcttgagttgggttgagttagggggaagcacccatgaatttaaagctggtgatagatctcatcctgacaccgaggatatatacgtagtgctgcatggattatgcagaagagctaaggttgaaggttatgctccattgactgaactagtaacaaaagatgtctccgaagaggaaagagaagaaaaccttaccttccatagtgagaagctagcagtggcttatagtgtcctgaagactggtccagggacagaaataatggtttcaaagaatttgcaggtttgcagtgactgtcatgaatggatgaagataatctcaaaggtactttgccgtgttattattctgagggatagagttcggtttcaccggtttgaaagtggatggtgctcctgcaaggattactggtaggcctttcctggagcaatacagatgtaatccagctaatacaaaacgagcagttcctaggggatacatctgacctaattactttctccatctggagaatttggtgctggttctgctgctgcatagcaatgaaatgaaatatttggacatttggttactatatagtttagctctttggcacagcacagggaaccaaggaaaggactagatgaccgacacatgcacgtgtattgtacactccaaagcaatgcaagtgattagtgagataaatcaagagatcaaaatctctacgttggatttgtgttttatgattcattcagcacccttatgttttcagatgcttgacatgtgatgtcttgttttgggtttttttcgatgattacttgtgtcgacatgatatgtggattaatgctgaagtgttatccaatattcagtgaaaacgaggtactgaaaaataggagttgcaatgcctttgatgccccattcatctgtttttgcatgtccttgtatttgctgcgagaacttccatctactaagacactctataggagacacttgcagcatcagatggcttaaatgccatagcagattaatatatgaaactttcctctcaagcagaagacatcaaagtaaacctcttagtacaacagttctagcaagaagcacaagaaaaatttggagaacttattcccattctgctataataggtgtggagttgtcagatggacggcaaactagttctctggttactcctaatgggcattcctttgatgtatcctttttctcatctttgagttccgactgtgtgaagtagagatgcctagtgattgactctttgtggatactcttcctattgcaagacaattggtggattctaatgaattctattggatccaaacggtgcctcggtaatgcagtgaggacccagagatagagatgaggaactgagggttaaagtgagggacaagaagattcgagtattttacaatttcagtatttgttttatatttgatagttaaagttagaagacaagaagactattgttctgtgcggaatcactggtgagagacgacagaagctttcaggctgttattatttgccgatttcttgtttttatatgtttttaaaatttttgagtaagttttacctcttcatttggagcaattggtgaatagtgaagatattgcttcatgacggcgtgtttcatatatatcattatgtaatgttttgttataacttttgaactatgttactttctattgtatttttgtcgtattaaattagatccgctggtcgcatgtgtgccataggagtgacgcgccacgctgacttcgtttcaaaagaagtgcaatgcagagtggagctttgcctttggccctaaagagagtaattgctgttcacagcatgaactgttcaaat

SEQ ID NO: 84145 - DNA, 1114 bp, Zea Mays
tgccactccacttgcatagttgcacaccccacggccgcggtgcgtcggtgcggttgatcccgccaacaaggcaacaacgggcgcccgcccccgtcctgtcatctccgctcgccacaccagtcgccgtcggccgtcgctcctctcctccacgcctccctccctacctacctacctcgccttggcatccccgcaaggaatatcccttccatagcgtcccttgcttctttaccaccccaccctgtattcgtgcgtccctgccgcttaatttcccggtttctctgcgctctttcgtcatcttggatcttggttgcctcgggtggttcacaggattaatgctgaagtgttatccaatattcagtgaaaacgagatttggagaacttattcccattctgctataataggtgtggagttgtcagatggacggcaaactagttctctggttactcctaatgggcattcctttgatgtatcctttttctcatctttgagttccgactgtgtgaagtagagatgcctagtgattgactctttgtggatactcttcctattgcaagacaattggtggattctaatgaattctattggatccaaacggtgcctcggtaatgcagtgaggacccagagatagagatgaggaactgagggttaaagtgagggacaagaagattcgagtattttacaatttcagtatttgttttatatttgatagttaaagttagaagacaagaagactattgttctgtgcggaatcactggtgagagacgacagaagctttcaggctgttattatttgccgatttcttgtttttatatgtttttaaaatttttgagtaagttttacctcttcatttggagcaattggtgaatagtgaagatattgcttcatgacggcgtgtttcatatatatcattatgtaatgttttgttataacttttgaactatgttactttctattgtatttttgtcgtattaaattagatccgctggtcgcatgtgtgccataggagtgacgcgccacgctgacttcgtttcaaaagaagtgcaatgcagagtggagctttgcctttggccctaaagagagtaattgctgttcacagcatgaactgttcaaat

SEQ ID NO: 84146 - DNA, 3388 bp, Zea Mays
tgctttgttcatggcggaagcacgtgccactccacttgcatagttgcacaccccacggccgcggtgcgtcggtgcggttgatcccgccaacaaggcaacaacgggcgcccgcccccgtcctgtcatctccgctcgccacaccagtcgccgtcggccgtcgctcctctcctccacgcctccctccctacctacctacctcgccttggcatccccgcaaggaatatcccttccatagcgtcccttgcttctttaccaccccaccctgtattcgtgcgtccctgccgcttaatttcccggtttctctgcgctctttcgtcatcttggatcttggttgcctcgggtggttcacagggtaatcatcgagcatagagttcatgttgcctgattaccttagttgctactatgcgatttaaggtgttacacaacttcatgctggataaattaggtcgtgggaggactttaaaaactagctgcctggtgtttctttttctccttcattctagtgaactcactttcagaagcttgtttgcaatatgtcttacacgaactgtttgaagaagcatccctatagaattttctttcgatatggcaactccatcctcagagcttctttagagaaaggctcaccacaaaagttacttatggactatagcactttgctccatttcactgctttctgccctgattacagaacctacgctttccttctcagagcttgtgcaaaatgctcagacctctatgctgccatggaaatccattgtcatctcactaaagttgggttgctatctaaacagcatataacacctcctctgttcaagttatatatttctcatggttacatgttggaagcatgtgaattactttggtcaatgctggagtggaataccgatcccttccatggcaatctgatgcttatgggattcctgaagagcggacggctagataaggcatatcagattttcaagaggatgcctgtcaaggacttgatctcatggaattcaatgattgcaggtgcagtaaggagctcgcacctaaaagaagcaatgaatatttttagcaggttggttagttcaggccttgtgcctgattgcttctcgttctcctcagttctgtcagcatgtgctcgagctggtgctcgacgatatggagtgtgggtgcatcacctgatgactgaactgggggtggaaatgaatcatatcttgagctcagcacttgttgacatgtatgccaaatgcggaagaattgatgtagcaactgagatattcaataaagtcaagggaaaccatatttctgtctggaatactatgattagtggcttggcatcgcatggtcttggatccgatgtagtcattttgttccacaagatgaaaagtgaagagctggttcctgatggggttacgtttgttgcactcttgacagcatgcagtcgctgtggcatggttgaagaggctcggcattacttcagatcaatgactacagagtattctatcacgccagaggttgagcactacggtgccttggtggatacgttgtcgcgagctgggttgctggatgaagcatacgagttggtaatgtcgatgaatgtaaagcctgatgttgtgatatggagggcattacttagcgcctgtcgcagatatcgccacacaaaactaggtgaggccactattgagcatatggcatgccatggcagtggggattatacccttctttcaaacatctattcatcagcaaatagatggaatgattcagaggaagtatggaaacagaggaaacaaaagaaagttaggaagaccaaaggcttgagttgggttgagttagggggaagcacccatgaatttaaagctggtgatagatctcatcctgacaccgaggatatatacgtagtgctgcatggattatgcagaagagctaaggttgaaggttatgctccattgactgaactagtaacaaaagatgtctccgaagaggaaagagaagaaaaccttaccttccatagtgagaagctagcagtggcttatagtgtcctgaagactggtccagggacagaaataatggtttcaaagaatttgcaggtttgcagtgactgtcatgaatggatgaagataatctcaaaggtactttgccgtgttattattctgagggatagagttcggtttcaccggtttgaaagtggatggtgctcctgcaaggattactggtaggcctttcctggagcaatacagatgtaatccagctaatacaaaacgagcagttcctaggggatacatctgacctaattactttctccatctggagaatttggtgctggttctgctgctgcatagcaatgaaatgaaatatttggacatttggttactatatagtttagctctttggcacagcacagggaaccaaggaaaggactagatgaccgacacatgcacgtgtattgtacactccaaagcaatgcaagtgattagtgagataaatcaagagatcaaaatctctacgttggatttgtgttttatgattcattcagcacccttatgttttcagatgcttgacatgtgatgtcttgttttgggtttttttcgatgattacttgtgtcgacatgatatgtggattaatgctgaagtgttatccaatattcagtgaaaacgagatttggagaacttattcccattctgctataataggtgtggagttgtcagatggacggcaaactagttctctggttactcctaatgggcattcctttgatgtatcctttttctcatctttgagttccgactgtgtgaagtagagatgcctagtgattgactctttgtggatactcttcctattgcaagacaattggtggattctaatgaattctattggatccaaacggtgcctcggtaatgcagtgaggacccagagatagagatgaggaactgagggttaaagtgagggacaagaagattcgagtattttacaatttcagtatttgttttatatttgatagttaaagttagaagacaagaagactattgttctgtgcggaatcactggtgagagacgacagaagctttcaggctgttattatttgccgatttcttgtttttatatgtttttaaaatttttgagtaagttttacctcttcatttggagcaattggtgaatagtgaagatattgcttcatgacggcgtgtttcatatatatcattatgtaatgttttgttataacttttgaactatgttactttctattgtatttttgtcgtattaaattagatccgctggtcgcatgtgtgccataggagtgacgcgccacgctgacttcgtttcaaaagaagtgcaatgcagagtggagctttgcctttggccctaaagagagtaattgctgttcacagcatgaactgttcaaat

SEQ ID NO: 84147 - DNA, 3772 bp, Zea Mays
tgctttgttcatggcggaagcacgtgccactccacttgcatagttgcacaccccacggccgcggtgcgtcggtgcggttgatcccgccaacaaggcaacaacgggcgcccgcccccgtcctgtcatctccgctcgccacaccagtcgccgtcggccgtcgctcctctcctccacgcctccctccctacctacctacctcgccttggcatccccgcaaggaatatcccttccatagcgtcccttgcttctttaccaccccaccctgtattcgtgcgtccctgccgcttaatttcccggtttctctgcgctctttcgtcatcttggatcttggttgcctcgggtggttcacagggtaatcatcgagcatagagttcatgttgcctgattaccttagttgctactatgcgatttaaggtgttacacaacttcatgctggataaattaggtcgtgggaggactttaaaaactagctgcctggtgtttctttttctccttcattctagtgaactcactttcagaagcttgtttgcaatatgtcttacacgaactgtttgaagaagcatccctatagaattttctttcgatatggcaactccatcctcagagcttctttagagaaaggctcaccacaaaagttacttatggactatagcactttgctccatttcactgctttctgccctgattacagaacctacgctttccttctcagagcttgtgcaaaatgctcagacctctatgctgccatggaaatccattgtcatctcactaaagttgggttgctatctaaacagcatataacacctcctctgttcaagttatatatttctcatggttacatgttggaagcatgtgaattactttggtcaatgctggagtggaataccgatcccttccatggcaatctgatgcttatgggattcctgaagagcggacggctagataaggcatatcagattttcaagaggatgcctgtcaaggacttgatctcatggaattcaatgattgcaggtgcagtaaggagctcgcacctaaaagaagcaatgaatatttttagcaggttggttagttcaggccttgtgcctgattgcttctcgttctcctcagttctgtcagcatgtgctcgagctggtgctcgacgatatggagtgtgggtgcatcacctgatgactgaactgggggtggaaatgaatcatatcttgagctcagcacttgttgacatgtatgccaaatgcggaagaattgatgtagcaactgagatattcaataaagtcaagggaaaccatatttctgtctggaatactatgattagtggcttggcatcgcatggtcttggatccgatgtagtcattttgttccacaagatgaaaagtgaagagctggttcctgatggggttacgtttgttgcactcttgacagcatgcagtcgctgtggcatggttgaagaggctcggcattacttcagatcaatgactacagagtattctatcacgccagaggttgagcactacggtgccttggtggatacgttgtcgcgagctgggttgctggatgaagcatacgagttggtaatgtcgatgaatgtaaagcctgatgttgtgatatggagggcattacttagcgcctgtcgcagatatcgccacacaaaactaggtgaggccactattgagcatatggcatgccatggcagtggggattatacccttctttcaaacatctattcatcagcaaatagatggaatgattcagaggaagtatggaaacagaggaaacaaaagaaagttaggaagaccaaaggcttgagttgggttgagttagggggaagcacccatgaatttaaagctggtgatagatctcatcctgacaccgaggatatatacgtagtgctgcatggattatgcagaagagctaaggttgaaggttatgctccattgactgaactagtaacaaaagatgtctccgaagaggaaagagaagaaaaccttaccttccatagtgagaagctagcagtggcttatagtgtcctgaagactggtccagggacagaaataatggtttcaaagaatttgcaggtttgcagtgactgtcatgaatggatgaagataatctcaaaggtactttgccgtgttattattctgagggatagagttcggtttcaccggtttgaaagtggatggtgctcctgcaaggattactggtaggcctttcctggagcaatacagatgtaatccagctaatacaaaacgagcagttcctaggggatacatctgacctaattactttctccatctggagaatttggtgctggttctgctgctgcatagcaatgaaatgaaatatttggacatttggttactatatagtttagctctttggcacagcacagggaaccaaggaaaggactagatgaccgacacatgcacgtgtattgtacactccaaagcaatgcaagtgattagtgagataaatcaagagatcaaaatctctacgttggatttgtgttttatgattcattcagcacccttatgttttcagatgcttgacatgtgatgtcttgttttgggtttttttcgatgattacttgtgtcgacatgatatgtggattaatgctgaagtgttatccaatattcagtgaaaacgaggtactgaaaaataggagttgcaatgcctttgatgccccattcatctgtttttgcatgtccttgtatttgctgcgagaacttccatctactaagacactctataggagacacttgcagcatcagatggcttaaatgccatagcagattaatatatgaaactttcctctcaagcagaagacatcaaagtaaacctcttagtacaacagttctagcaagaagcacaagaaaagggcaggtcacaggttcgaagtagcctctccacatttgtagggggaagacttgtcttggtttatttcttccccagactcccactcatgtgggaacctccagcaccgggtctgctcttattagcaatagcatgctctgcaggcctgatgttctaagatttggagaacttattcccattctgctataataggtgtggagttgtcagatggacggcaaactagttctctggttactcctaatgggcattcctttgatgtatcctttttctcatctttgagttccgactgtgtgaagtagagatgcctagtgattgactctttgtggatactcttcctattgcaagacaattggtggattctaatgaattctattggatccaaacggtgcctcggtaatgcagtgaggacccagagatagagatgaggaactgagggttaaagtgagggacaagaagattcgagtattttacaatttcagtatttgttttatatttgatagttaaagttagaagacaagaagactattgttctgtgcggaatcactggtgagagacgacagaagctttcaggctgttattatttgccgatttcttgtttttatatgtttttaaaatttttgagtaagttttacctcttcatttggagcaattggtgaatagtgaagatattgcttcatgacggcgtgtttcatatatatcattatgtaatgttttgttataacttttgaactatgttactttctattgtatttttgtcgtattaaattagatccgctggtcgcatgtgtgccataggagtgacgcgccacgctgacttcgtttcaaaagaagtgcaatgcagagtggagctttgcctttggccctaaagagagtaattgctgttcacagcatgaactgttcaaat

SEQ ID NO: 84148 - DNA, 3617 bp, Zea Mays
tgctttgttcatggcggaagcacgtgccactccacttgcatagttgcacaccccacggccgcggtgcgtcggtgcggttgatcccgccaacaaggcaacaacgggcgcccgcccccgtcctgtcatctccgctcgccacaccagtcgccgtcggccgtcgctcctctcctccacgcctccctccctacctacctacctcgccttggcatccccgcaaggaatatcccttccatagcgtcccttgcttctttaccaccccaccctgtattcgtgcgtccctgccgcttaatttcccggtttctctgcgctctttcgtcatcttggatcttggttgcctcgggtggttcacagggtaatcatcgagcatagagttcatgttgcctgattaccttagttgctactatgcgatttaaggtgttacacaacttcatgctggataaattaggtcgtgggaggactttaaaaactagctgcctggtgtttctttttctccttcattctagtgaactcactttcagaagcttgtttgcaatatgtcttacacgaactgtttgaagaagcatccctatagaattttctttcgatatggcaactccatcctcagagcttctttagagaaaggctcaccacaaaagttacttatggactatagcactttgctccatttcactgctttctgccctgattacagaacctacgctttccttctcagagcttgtgcaaaatgctcagacctctatgctgccatggaaatccattgtcatctcactaaagttgggttgctatctaaacagcatataacacctcctctgttcaagttatatatttctcatggttacatgttggaagcatgtgaattactttggtcaatgctggagtggaataccgatcccttccatggcaatctgatgcttatgggattcctgaagagcggacggctagataaggcatatcagattttcaagaggatgcctgtcaaggacttgatctcatggaattcaatgattgcaggtgcagtaaggagctcgcacctaaaagaagcaatgaatatttttagcaggttggttagttcaggccttgtgcctgattgcttctcgttctcctcagttctgtcagcatgtgctcgagctggtgctcgacgatatggagtgtgggtgcatcacctgatgactgaactgggggtggaaatgaatcatatcttgagctcagcacttgttgacatgtatgccaaatgcggaagaattgatgtagcaactgagatattcaataaagtcaagggaaaccatatttctgtctggaatactatgattagtggcttggcatcgcatggtcttggatccgatgtagtcattttgttccacaagatgaaaagtgaagagctggttcctgatggggttacgtttgttgcactcttgacagcatgcagtcgctgtggcatggttgaagaggctcggcattacttcagatcaatgactacagagtattctatcacgccagaggttgagcactacggtgccttggtggatacgttgtcgcgagctgggttgctggatgaagcatacgagttggtaatgtcgatgaatgtaaagcctgatgttgtgatatggagggcattacttagcgcctgtcgcagatatcgccacacaaaactaggtgaggccactattgagcatatggcatgccatggcagtggggattatacccttctttcaaacatctattcatcagcaaatagatggaatgattcagaggaagtatggaaacagaggaaacaaaagaaagttaggaagaccaaaggcttgagttgggttgagttagggggaagcacccatgaatttaaagctggtgatagatctcatcctgacaccgaggatatatacgtagtgctgcatggattatgcagaagagctaaggttgaaggttatgctccattgactgaactagtaacaaaagatgtctccgaagaggaaagagaagaaaaccttaccttccatagtgagaagctagcagtggcttatagtgtcctgaagactggtccagggacagaaataatggtttcaaagaatttgcaggtttgcagtgactgtcatgaatggatgaagataatctcaaaggtactttgccgtgttattattctgagggatagagttcggtttcaccggtttgaaagtggatggtgctcctgcaaggattactggtaggcctttcctggagcaatacagatgtaatccagctaatacaaaacgagcagttcctaggggatacatctgacctaattactttctccatctggagaatttggtgctggttctgctgctgcatagcaatgaaatgaaatatttggacatttggttactatatagtttagctctttggcacagcacagggaaccaaggaaaggactagatgaccgacacatgcacgtgtattgtacactccaaagcaatgcaagtgattagtgagataaatcaagagatcaaaatctctacgttggatttgtgttttatgattcattcagcacccttatgttttcagatgcttgacatgtgatgtcttgttttgggtttttttcgatgattacttgtgtcgacatgatatgtggattaatgctgaagtgttatccaatattcagtgaaaacgaggtactgaaaaataggagttgcaatgcctttgatgccccattcatctgtttttgcatgtccttgtatttgctgcgagaacttccatctactaagacactctataggagacacttgcagcatcagatggcttaaatgccatagcagattaatatatgaaactttcctctcaagcagaagacatcaaagtaaacctcttagtacaacagttctagcaagaagcacaagaaaaatttggagaacttattcccattctgctataataggtgtggagttgtcagatggacggcaaactagttctctggttactcctaatgggcattcctttgatgtatcctttttctcatctttgagttccgactgtgtgaagtagagatgcctagtgattgactctttgtggatactcttcctattgcaagacaattggtggattctaatgaattctattggatccaaacggtgcctcggtaatgcagtgaggacccagagatagagatgaggaactgagggttaaagtgagggacaagaagattcgagtattttacaatttcagtatttgttttatatttgatagttaaagttagaagacaagaagactattgttctgtgcggaatcactggtgagagacgacagaagctttcaggctgttattatttgccgatttcttgtttttatatgtttttaaaatttttgagtaagttttacctcttcatttggagcaattggtgaatagtgaagatattgcttcatgacggcgtgtttcatatatatcattatgtaatgttttgttataacttttgaactatgttactttctattgtatttttgtcgtattaaattagatccgctggtcgcatgtgtgccataggagtgacgcgccacgctgacttcgtttcaaaagaagtgcaatgcagagtggagctttgcctttggccctaaagagagtaattgctgttcacagcatgaactgttcaaat

SEQ ID NO: 84149 - DNA, 3581 bp, Zea Mays
cacttgcatagttgcacaccccacggccgcggtgcgtcggtgcggttgatcccgccaacaaggcaacaacgggcgcccgcccccgtcctgtcatctccgctcgccacaccagtcgccgtcggccgtcgctcctctcctccacgcctccctccctacctacctacctcgccttggcatccccgcaaggaatatcccttccatagcgtcccttgcttctttaccaccccaccctgtattcgtgcgtccctgccgcttaatttcccggtttctctgcgctctttcgtcatcttggatcttggttgcctcgggtggttcacagggtaatcatcgagcatagagttcatgttgcctgattaccttagttgctactatgcgatttaaggtgttacacaacttcatgctggataaattaggtcgtgggaggactttaaaaactagctgcctggtgtttctttttctccttcattctagtgaactcactttcagaagcttgtttgcaatatgtcttacacgaactgtttgaagaagcatccctatagaattttctttcgatatggcaactccatcctcagagcttctttagagaaaggctcaccacaaaagttacttatggactatagcactttgctccatttcactgctttctgccctgattacagaacctacgctttccttctcagagcttgtgcaaaatgctcagacctctatgctgccatggaaatccattgtcatctcactaaagttgggttgctatctaaacagcatataacacctcctctgttcaagttatatatttctcatggttacatgttggaagcatgtgaattactttggtcaatgctggagtggaataccgatcccttccatggcaatctgatgcttatgggattcctgaagagcggacggctagataaggcatatcagattttcaagaggatgcctgtcaaggacttgatctcatggaattcaatgattgcaggtgcagtaaggagctcgcacctaaaagaagcaatgaatatttttagcaggttggttagttcaggccttgtgcctgattgcttctcgttctcctcagttctgtcagcatgtgctcgagctggtgctcgacgatatggagtgtgggtgcatcacctgatgactgaactgggggtggaaatgaatcatatcttgagctcagcacttgttgacatgtatgccaaatgcggaagaattgatgtagcaactgagatattcaataaagtcaagggaaaccatatttctgtctggaatactatgattagtggcttggcatcgcatggtcttggatccgatgtagtcattttgttccacaagatgaaaagtgaagagctggttcctgatggggttacgtttgttgcactcttgacagcatgcagtcgctgtggcatggttgaagaggctcggcattacttcagatcaatgactacagagtattctatcacgccagaggttgagcactacggtgccttggtggatacgttgtcgcgagctgggttgctggatgaagcatacgagttggtaatgtcgatgaatgtaaagcctgatgttgtgatatggagggcattacttagcgcctgtcgcagatatcgccacacaaaactaggtgaggccactattgagcatatggcatgccatggcagtggggattatacccttctttcaaacatctattcatcagcaaatagatggaatgattcagaggaagtatggaaacagaggaaacaaaagaaagttaggaagaccaaaggcttgagttgggttgagttagggggaagcacccatgaatttaaagctggtgatagatctcatcctgacaccgaggatatatacgtagtgctgcatggattatgcagaagagctaaggttgaaggttatgctccattgactgaactagtaacaaaagatgtctccgaagaggaaagagaagaaaaccttaccttccatagtgagaagctagcagtggcttatagtgtcctgaagactggtccagggacagaaataatggtttcaaagaatttgcaggtttgcagtgactgtcatgaatggatgaagataatctcaaaggtactttgccgtgttattattctgagggatagagttcggtttcaccggtttgaaagtggatggtgctcctgcaaggattactggtaggcctttcctggagcaatacagatgtaatccagctaatacaaaacgagcagttcctaggggatacatctgacctaattactttctccatctggagaatttggtgctggttctgctgctgcatagcaatgaaatgaaatatttggacatttggttactatatagtttagctctttggcacagcacagggaaccaaggaaaggactagatgaccgacacatgcacgtgtattgtacactccaaagcaatgcaagtgattagtgagataaatcaagagatcaaaatctctacgttggatttgtgttttatgattcattcagcacccttatgttttcagatgcttgacatgtgatgtcttgttttgggtttttttcgatgattacttgtgtcgacatgatatgtggattaatgctgaagtgttatccaatattcagtgaaaacgaggtactgaaaaataggagttgcaatgcctttgatgccccattcatctgtttttgcatgtccttgtatttgctgcgagaacttccatctactaagacactctataggagacacttgcagcatcagatggcttaaatgccatagcagattaatatatgaaactttcctctcaagcagaagacatcaaagtaaacctcttagtacaacagttctagcaagaagcacaagaaaagtaagcagtcatttagcaatagtcatcattttgcatggtaaatcagttgaatcatcaattgaagtgtacatgcagtcagagtttgagcagcttaactcacttcattgctacaatgttgtggaagagttttctgtagtcaagactaaatggcctgcaattgtccttgttttttatattgaaactacaagcttctcacattgtgatgacagaattattgagttttcagttccgtgatcttatgggacgaaaggatagcactttccagacactcataaatcatgaggaagatgtgagaaatatatatctctatctcttctctactatctattaagtcaatagtgtagaccacagcactaccatgacttcacccttcctagaccccacctgcagatatgcggcccgtcgcggcctctattggccattccggtctcgaggcccaagcatggcggccttgcatcggaggcccaagcccaacacaactagcttcagttcggtacacctggtagctcgataactcaataattagcaacaatgacatacacggagaagcggcagttgagtttaagtgcagaaacaacccagccccaacggtgtgtagctggcggcaagtctcccgagcaatgcaatggattttttattgcctctcacttacaagtacagttatagtatctgttcatgtatgtacacactcacaccaaaacatacaccaactctcccctaccgtacacaagcagaccatgac

SEQ ID NO: 84150 - DNA, 1331 bp, Zea Mays
cacttgcatagttgcacaccccacggccgcggtgcgtcggtgcggttgatcccgccaacaaggcaacaacgggcgcccgcccccgtcctgtcatctccgctcgccacaccagtcgccgtcggccgtcgctcctctcctccacgcctccctccctacctacctacctcgccttggcatccccgcaaggaatatcccttccatagcgtcccttgcttctttaccaccccaccctgtattcgtgcgtccctgccgcttaatttcccggtttctctgcgctctttcgtcatcttggatcttggttgcctcgggtggttcacaggattaatgctgaagtgttatccaatattcagtgaaaacgaggtactgaaaaataggagttgcaatgcctttgatgccccattcatctgtttttgcatgtccttgtatttgctgcgagaacttccatctactaagacactctataggagacacttgcagcatcagatggcttaaatgccatagcagattaatatatgaaactttcctctcaagcagaagacatcaaagtaaacctcttagtacaacagttctagcaagaagcacaagaaaagtaagcagtcatttagcaatagtcatcattttgcatggtaaatcagttgaatcatcaattgaagtgtacatgcagtcagagtttgagcagcttaactcacttcattgctacaatgttgtggaagagttttctgtagtcaagactaaatggcctgcaattgtccttgttttttatattgaaactacaagcttctcacattgtgatgacagaattattgagttttcagttccgtgatcttatgggacgaaaggatagcactttccagacactcataaatcatgaggaagatgtgagaaatatatatctctatctcttctctactatctattaagtcaatagtgtagaccacagcactaccatgacttcacccttcctagaccccacctgcagatatgcggcccgtcgcggcctctattggccattccggtctcgaggcccaagcatggcggccttgcatcggaggcccaagcccaacacaactagcttcagttcggtacacctggtagctcgataactcaataattagcaacaatgacatacacggagaagcggcagttgagtttaagtgcagaaacaacccagccccaacggtgtgtagctggcggcaagtctcccgagcaatgcaatggattttttattgcctctcacttacaagtacagttatagtatctgttcatgtatgtacacactcacaccaaaacatacaccaactctcccctaccgtacacaagcagaccatgac

SEQ ID NO: 84151 - DNA, 2008 bp, Zea Mays
cgccgcccgtcaccacccgcagcgagccttgctcgtcaccaactcaccatcacgcgcgagcgcgacgcttcagctctctctcgttgaagagctgcatctccagccagtgcctagcccgtcgagggaccggtcgccttggcggactcccgctggaattttacaggaatcgcgctggaatttcacaggaatcagttcaatttcacggaacaaacgcaggagcaaggaaattttgtcacgttcccctcatttgtttccttcggcgacgactaggcgagtgctgcccgctcttcacgaggttttcacctgcgagtctgcgacgaacatcctccagttgatcttctggctggaaaatcacgttgacggtggcaagtaggggttctatcatccgcagcctcatctcaagaagcaaaattctttcatgatccctttgaaccggagggcaagcctgcccagggctgggatggagtactttgatgcaaggcggaagcctcgtaatgttggaaaaatcattgcagccctggtcctcacaacactctgtatatttgctctgaagcaatctcctggttttggtggcaatagtgtgttttctcgccatgaacctggtgttacccacgtcttagtaacaggaggagctggttatattggttcacatgccgctttaaggctcttacaggatagctatcgagttaccattgtggataatctatctagaggaaatatgggagcagtaaaggttctgcagggcttatttccgcagcctggtagactacaattcatctttgctgatctgggggaccagaaatctgtcaacaagatatttgctgaaaatgcatttgatgctgtgatgcactttgcagctgttgcttatgtgggagagagcacattggaaccccttaggtactatcacaatattacatcgaacactttactgattttggaggctatggcatctcatggagtcaaaacccttatctactccagtacatgtgctacctacggagaaccagagaagatgcctattacagaagccacacctcagttccctatcaatccatatggaaaagctaagaaaatggcagaggatatcatattagatttctcaaagtcgaagggagctgacatggctgtcatgattttaagatatttcaatgttattggctctgaccctgagggaagattaggtgaggctcctaggccagaactccgagagcatggtcggatatctggggcatgcttcgatgcagcattaggagtcattacaggattaaaggttaaaggaacagattatcccacaactgatggaacctgcataagagattatattgatgtcacagatttagttgatgctcatgtgaaagcactcaacaaggcagagcctagaaaagtcagcatttacaatgttggaacaggaagaggtcgctcggttaatgagttcgtcgatgcctgcaagaaggcaactggggttaacatcaaaattgagtacctcagcagaaggccaggagattatgcagaagtatatagcgacccaacaaaaatcaacaaggagctcaactggacagctcgatatactgatcttaaagagagtctgtcagtcgcatggaggtggcaaaagtcgcatcccagtggctacgggccaaatcgaatatagcctgctgatttataattcactgaatcaatacatattaattctttagttagcgataaaaaaatcttgctatgacactcctctcaaaatcactccgtattcttctcgttctttttatttcaaaggtttgctgtttttttactagtagaaacatgaacggtgatttggatacaaaaaacttgtgatgacaatttcattgtttttgacacaaattgttgatagaaaaaatgtacatttttcagccagtgagctgcaaggtttggttgcatcgagttaagaaaaaccttatgttgtgaccaatggaaatgctgtggattttgtgctgttgctgctgctgcaggatatttgcttcatataaaaatt

SEQ ID NO: 84152 - DNA, 1837 bp, Zea Mays
cgccgcccgtcaccacccgcagcgagccttgctcgtcaccaactcaccatcacgcgcgagcgcgacgcttcagctctctctcgttgaagagctgcatctccagccagtgcctagcccgtcgagggaccggtcgccttggcggactcccgctggaattttacaggaatcgcgctggaatttcacaggaatcagttcaatttcacggaacaaacgcaggagcaaggaaattttgtcacgttcccctcatttgtttccttcggcgacgactaggcgagtgctgcccgctcttcacgaggttttcacctgcgagtctgcgacgaacatcctccagggatggagtactttgatgcaaggcggaagcctcgtaatgttggaaaaatcattgcagccctggtcctcacaacactctgtatatttgctctgaagcaatctcctggttttggtggcaatagtgtgttttctcgccatgaacctggtgttacccacgtcttagtaacaggaggagctggttatattggttcacatgccgctttaaggctcttacaggatagctatcgagttaccattgtggataatctatctagaggaaatatgggagcagtaaaggttctgcagggcttatttccgcagcctggtcaacaagatatttgctgaaaatgcatttgatgctgtgatgcactttgcagctgttgcttatgtgggagagagcacattggaaccccttaggtactatcacaatattacatcgaacactttactgattttggaggctatggcatctcatggagtcaaaacccttatctactccagtacatgtgctacctacggagaaccagagaagatgcctattacagaagccacacctcagttccctatcaatccatatggaaaagctaagaaaatggcagaggatatcatattagatttctcaaagtcgaagggagctgacatggctgtcatgattttaagatatttcaatgttattggctctgaccctgagggaagattaggtgaggctcctaggccagaactccgagagcatggtcggatatctggggcatgcttcgatgcagcattaggagtcattacaggattaaaggttaaaggaacagattatcccacaactgatggaacctgcataagagattatattgatgtcacagatttagttgatgctcatgtgaaagcactcaacaaggcagagcctagaaaagtcagcatttacaatgttggaacaggaagaggtcgctcggttaatgagttcgtcgatgcctgcaagaaggcaactggggttaacatcaaaattgagtacctcagcagaaggccaggagattatgcagaagtatatagcgacccaacaaaaatcaacaaggagctcaactggacagctcgatatactgatcttaaagagagtctgtcagtcgcatggaggtggcaaaagtcgcatcccagtggctacgggccaaatcgaatatagcctgctgatttataattcactgaatcaatacatattaattctttagttagcgataaaaaaatcttgctatgacactcctctcaaaatcactccgtattcttctcgttctttttatttcaaaggtttgctgtttttttactagtagaaacatgaacggtgatttggatacaaaaaacttgtgatgacaatttcattgtttttgacacaaattgttgatagaaaaaatgtacatttttcagccagtgagctgcaaggtttggttgcatcgagttaagaaaaaccttatgttgtgaccaatggaaatgctgtggattttgtgctgttgctgctgctgcaggatatttgcttcatataaaaatt

SEQ ID NO: 84153 - DNA, 1959 bp, Zea Mays
cgccgcccgtcaccacccgcagcgagccttgctcgtcaccaactcaccatcacgcgcgagcgcgacgcttcagctctctctcgttgaagagctgcatctccagccagtgcctagcccgtcgagggaccggtcgccttggcggactcccgctggtgctcctccacgcccatctctctcttttcctcgctgcagccacggatcttggtagcagggacgccaccgcatttccagaatccaaacggaatcgcgctggaatttcacaggaatcagttcaatttcacggaacaaacgcaggagcaaggaaattttgtcacgttcccctcatttgtttccttcggcgacgactaggcgagtgctgcccgctcttcacgaggttttcacctgcgagtctgcgacgaacatcctccagggatggagtactttgatgcaaggcggaagcctcgtaatgttggaaaaatcattgcagccctggtcctcacaacactctgtatatttgctctgaagcaatctcctggttttggtggcaatagtgtgttttctcgccatgaacctggtgttacccacgtcttagtaacaggaggagctggttatattggttcacatgccgctttaaggctcttacaggatagctatcgagttaccattgtggataatctatctagaggaaatatgggagcagtaaaggttctgcagggcttatttccgcagcctggtagactacaattcatctttgctgatctgggggaccagaaatctgtcaacaagatatttgctgaaaatgcatttgatgctgtgatgcactttgcagctgttgcttatgtgggagagagcacattggaaccccttaggtactatcacaatattacatcgaacactttactgattttggaggctatggcatctcatggagtcaaaacccttatctactccagtacatgtgctacctacggagaaccagagaagatgcctattacagaagccacacctcagttccctatcaatccatatggaaaagctaagaaaatggcagaggatatcatattagatttctcaaagtcgaagggagctgacatggctgtcatgattttaagatatttcaatgttattggctctgaccctgagggaagattaggtgaggctcctaggccagaactccgagagcatggtcggatatctggggcatgcttcgatgcagcattaggagtcattacaggattaaaggttaaaggaacagattatcccacaactgatggaacctgcataagagattatattgatgtcacagatttagttgatgctcatgtgaaagcactcaacaaggcagagcctagaaaagtcagcatttacaatgttggaacaggaagaggtcgctcggttaatgagttcgtcgatgcctgcaagaaggcaactggggttaacatcaaaattgagtacctcagcagaaggccaggagattatgcagaagtatatagcgacccaacaaaaatcaacaaggagctcaactggacagctcgatatactgatcttaaagagagtctgtcagtcgcatggaggtggcaaaagtcgcatcccagtggctacgggccaaatcgaatatagcctgctgatttataattcactgaatcaatacatattaattctttagttagcgataaaaaaatcttgctatgacactcctctcaaaatcactccgtattcttctcgttctttttatttcaaaggtttgctgtttttttactagtagaaacatgaacggtgatttggatacaaaaaacttgtgatgacaatttcattgtttttgacacaaattgttgatagaaaaaatgtacatttttcagccagtgagctgcaaggtttggttgcatcgagttaagaaaaaccttatgttgtgaccaatggaaatgctgtggattttgtgctgttgctgctgctgcaggatatttgcttcatataaaaatt

SEQ ID NO: 84154 - DNA, 1970 bp, Zea Mays
cgccgcccgtcaccacccgcagcgagccttgctcgtcaccaactcaccatcacgcgcgagcgcgacgcttcagctctctctcgttgaagagctgcatctccagccagtgcctagcccgtcgagggaccggtcgccttggcggactcccgctggtgctcctccacgcccatctctctcttttcctcgctgcagccacggatcttggtagcagggacgccaccgcatttccagaatccaaacggaattttacaggaatcgcgctggaatttcacaggaatcagttcaatttcacggaacaaacgcaggagcaaggaaattttgtcacgttcccctcatttgtttccttcggcgacgactaggcgagtgctgcccgctcttcacgaggttttcacctgcgagtctgcgacgaacatcctccagggatggagtactttgatgcaaggcggaagcctcgtaatgttggaaaaatcattgcagccctggtcctcacaacactctgtatatttgctctgaagcaatctcctggttttggtggcaatagtgtgttttctcgccatgaacctggtgttacccacgtcttagtaacaggaggagctggttatattggttcacatgccgctttaaggctcttacaggatagctatcgagttaccattgtggataatctatctagaggaaatatgggagcagtaaaggttctgcagggcttatttccgcagcctggtagactacaattcatctttgctgatctgggggaccagaaatctgtcaacaagatatttgctgaaaatgcatttgatgctgtgatgcactttgcagctgttgcttatgtgggagagagcacattggaaccccttaggtactatcacaatattacatcgaacactttactgattttggaggctatggcatctcatggagtcaaaacccttatctactccagtacatgtgctacctacggagaaccagagaagatgcctattacagaagccacacctcagttccctatcaatccatatggaaaagctaagaaaatggcagaggatatcatattagatttctcaaagtcgaagggagctgacatggctgtcatgattttaagatatttcaatgttattggctctgaccctgagggaagattaggtgaggctcctaggccagaactccgagagcatggtcggatatctggggcatgcttcgatgcagcattaggagtcattacaggattaaaggttaaaggaacagattatcccacaactgatggaacctgcataagagattatattgatgtcacagatttagttgatgctcatgtgaaagcactcaacaaggcagagcctagaaaagtcagcatttacaatgttggaacaggaagaggtcgctcggttaatgagttcgtcgatgcctgcaagaaggcaactggggttaacatcaaaattgagtacctcagcagaaggccaggagattatgcagaagtatatagcgacccaacaaaaatcaacaaggagctcaactggacagctcgatatactgatcttaaagagagtctgtcagtcgcatggaggtggcaaaagtcgcatcccagtggctacgggccaaatcgaatatagcctgctgatttataattcactgaatcaatacatattaattctttagttagcgataaaaaaatcttgctatgacactcctctcaaaatcactccgtattcttctcgttctttttatttcaaaggtttgctgtttttttactagtagaaacatgaacggtgatttggatacaaaaaacttgtgatgacaatttcattgtttttgacacaaattgttgatagaaaaaatgtacatttttcagccagtgagctgcaaggtttggttgcatcgagttaagaaaaaccttatgttgtgaccaatggaaatgctgtggattttgtgctgttgctgctgctgcaggatatttgcttcatataaaaatt

SEQ ID NO: 84155 - DNA, 1876 bp, Zea Mays
cgcccccgccgcccgtcaccacccgcagcgagccttgctcgtcaccaactcaccatcacgcgcgagcgcgacgcttcagctctctctcgttgaagagctgcatctccagccagtgcctagcccgtcgagggaccggtcgccttggcggactcccgctggaatcgcgctggaatttcacaggaatcagttcaatttcacggaacaaacgcaggagcaaggaaattttgtcacgttcccctcatttgtttccttcggcgacgactaggcgagtgctgcccgctcttcacgaggttttcacctgcgagtctgcgacgaacatcctccagggatggagtactttgatgcaaggcggaagcctcgtaatgttggaaaaatcattgcagccctggtcctcacaacactctgtatatttgctctgaagcaatctcctggttttggtggcaatagtgtgttttctcgccatgaacctggtgttacccacgtcttagtaacaggaggagctggttatattggttcacatgccgctttaaggctcttacaggatagctatcgagttaccattgtggataatctatctagaggaaatatgggagcagtaaaggttctgcagggcttatttccgcagcctggtagactacaattcatctttgctgatctgggggaccagaaatctgtcaacaagatatttgctgaaaatgcatttgatgctgtgatgcactttgcagctgttgcttatgtgggagagagcacattggaaccccttaggtactatcacaatattacatcgaacactttactgattttggaggctatggcatctcatggagtcaaaacccttatctactccagtacatgtgctacctacggagaaccagagaagatgcctattacagaagccacacctcagttccctatcaatccatatggaaaagctaagaaaatggcagaggatatcatattagatttctcaaagtcgaagggagctgacatggctgtcatgattttaagatatttcaatgttattggctctgaccctgagggaagattaggtgaggctcctaggccagaactccgagagcatggtcggatatctggggcatgcttcgatgcagcattaggagtcattacaggattaaaggttaaaggaacagattatcccacaactgatggaacctgcataagagattatattgatgtcacagatttagttgatgctcatgtgaaagcactcaacaaggcagagcctagaaaagtcagcatttacaatgttggaacaggaagaggtcgctcggttaatgagttcgtcgatgcctgcaagaaggcaactggggttaacatcaaaattgagtacctcagcagaaggccaggagattatgcagaagtatatagcgacccaacaaaaatcaacaaggagctcaactggacagctcgatatactgatcttaaagagagtctgtcagtcgcatggaggtggcaaaagtcgcatcccagtggctacgggccaaatcgaatatagcctgctgatttataattcactgaatcaatacatattaattctttagttagcgataaaaaaatcttgctatgacactcctctcaaaatcactccgtattcttctcgttctttttatttcaaaggtttgctgtttttttactagtagaaacatgaacggtgatttggatacaaaaaacttgtgatgacaatttcattgtttttgacacaaattgttgatagaaaaaatgtacatttttcagccagtgagctgcaaggtttggttgcatcgagttaagaaaaaccttatgttgtgaccaatggaaatgctgtggattttgtgctgttgctgctgctgcaggatatttgcttcatataaaaatt

SEQ ID NO: 84156 - DNA, 1360 bp, Zea Mays
cgccgcccgtcaccacccgcagcgagccttgctcgtcaccaactcaccatcacgcgcgagcgcgacgcttcagctctctctcgttgaagagctgcatctccagccagtgcctagcccgtcgagggaccggtcgccttggcggactcccgctggtgctcctccacgcccatctctctcttttcctcgctgcagccacggatcttggtagcagggacgccaccgcatttccagaatccaaacggcacggaagagcactttgctcttttcttcttctttctttcgttcacccgtttctccccaatctctctcacacagcgcctgtttggaacgcaggaattttacaggaatcgcgctggaatttcacaggaatcagttcaatttcacggaacaaacgcaggagcaaggaaattttgtcacgttcccctcatttgtttccttcggcgacgactaggcgagtgctgcccgctcttcacgaggttttcacctgcgagtctgcgacgaacatcctccagttgatcttctggctggaaaatcacgttgacggtggcaagtaggggttctatcatccgcagcctcatctcaagaagcaaaattctttcatgatccctttgaaccggagggcaagcctgcccagggctgggatggagtactttgatgcaaggcggaagcctcgtaatgttggaaaaatcattgcagccctggtcctcacaacactctgtatatttgctctgaagcaatctcctggttttggtggcaatagtgtgttttctcgccatgaacctggtgttacccacgtcttagtaacaggaggagctggttatattggttcacatgccgctttaaggctcttacaggatagctatcgagttaccattgtggataatctatctagaggaaatatgggagcagtaaaggttctgcagggcttatttccgcagcctggtagactacaattcatctttgctgatctgggggaccagaaatctgtatcctcatctatgcttctaaagctgttctgcttgtgtcttttctgcttatggagagttacacccgaagtcttcttttcacttaactgcctcccaggtcaacaagatatttgctgaaaatgcatttgatgctgtgatgcactttgcagctgttgcttatgtgggagagagcacattggaaccccttaggtactatcacaatattacatcgaacactttactgattttggaggctatggcatctcatggagtcaaaacccttatctactccagtacatgtgctacctacggagaaccagagaagatgcctattacagaagccacacctcaggtgcctgtgcagacaaacatgttgtcacggtactaattggttt

SEQ ID NO: 84157 - DNA, 592 bp, Zea Mays
atggggttctccggggtgatcttgaagccctggagagcctgcatcgccaccatggactggccgtcgtcctcgaactccacaaaggcaatgcctggtttggcttcgatcatccggacttcccggaagccgggatactgctggaacaggatctggagcatcatgctcgtggtctggtctggcaagttctggatgaagaggatgttgttcggaggagcagggagagtgagcaatagagtatggggagatagtgagaatgagcatgagctcctactcagtgggggagatgaagggggtgcggtgttggtgttgaatgtgactgctgcgaggcgggggctggtgtcacaatgggatggagcaggagcgagtcaagcagaatcgaggggggccacattggcgaagactcagctgggacgtgcggccgtaggggtgggtggtggccgaagggaggaggatgacgacgagggcgccggggcggtgatacgggcacacctgctctccgacttcaaggccgcggtgcgtgcaggaaaagtactggtgtccgacccgtcgtctggaagcgctggtggtttgtttggtaaatggggaatggaca

SEQ ID NO: 84158 - DNA, 2522 bp, Zea Mays
cacaagtgccttgccgggctcacacacaaaagcacttttgttttttttaaccccccgctagcaaaaattgttccccttccttcctcactccttctctctcatccaccacctcgacgctttgcgccgctaagcgatggcgatggtcatgactgacgccgacgccgccaccgccactgccaccgccgacgccgccaccgccaccgccaccgccaccgccgacgccgccaccgccaccgtcgacgccgactccgtcaccgccaccgccgcagagaagccgaagcacgccgagaagccggactacgccccctacaacggcgcttccaccgcagatggcggcacgggcgcccgcgtccgccgcggcggcggcgtggtggattcggtggtggcgcggtggcggcgggaggacatgctcgacaagagccccctcgcgctgcatgccgcggccgcggtcttcgccttcgtcgctctcgtgcttgtcgcgtccaaccagcacggcgactggatgcagttcgaccggtaccaggagtacaagtacctgctttccatcgcgtcgctggcgctactctactcgctggcgcaggcggcgcggcacgcgcaccggatgcgcggcggcgtcgaccccatctcctcagcatctgggaggcttcttgatttcgttggtgatcaggcgagtcattgcttccaacttttagtctgcagctataaatgttgtgccgacacaggtatttcgctcagtcagcaaaagtccgacgtgtttttcgatttggtcgagattcctgctcagtgacgagaacgagagaacaatatgagtgcaatttataaactgatgagcaagagtaaaggttccagtacagacattctacttccgtggtgaagaaacacatcaattcagtagtactgtgtaggagaattctctcccgtagcttttcccccatctgattagcagcataacaatggtgcgagtaactttgtgacttgtgagaagaggcacaacaccttttactgttggatcagtcggattggtctgtgatgctccttttccaggcacaccttcaactcaacaacctaataccccttcagtttctttttggaagaaactaggcaaaaggatagtgggctagaagctctcaaaaatggtctaataatgtgggcaatctatatgctagtaccagcacatgacaggccaccagcagcaatcatggtaatgtggtcccagtattgggagattggagtggttggaccaaacttccaaatgagctcgaagttgggagtatgttttgaatcttcagttcttcagttggttggagataagtactgcatgtcaacaaaaatgttcatgatgcccattagattatgcttgaatgcattgaaatgctctcgtgtgaaacaatgaagtttgaaacgtctgagggactatgtacccttagggtttgtttggttgattgggaatacatctaatatttgaatcagcggcctcacttattctaaggacacataaaagttagaattagattttctgcaacttgaatttactttctagtgcatacctagattttgttagtcaaatggagtcaaaataataaagttcaaacaacgtatgtggcattacatgaagtaacctttcatgccatgtggtgtattcttataacagttaaactggctaagagggttttgtatcgaagttcatgcttatccctccttagattctttgatcaggactcaagaggttatttatttcatgtcatgataccatttctagtgcagcaaggtagttgcgtacttgctgatgtctgcgctgtcggctgctgccccgatcacgaaccgcatgagatctgcagttgtcaataacttcacagatgcaaccgctgcagcaatcagcatgaccttctttgcatttgcagctcttgccttgtcggcagtggtttctggttacaagctctccaaacaaacatacatgtgaatcatcgtcgtagaagtaaaacccattaggccttgtttggttgcacaaggatcgaatgggattgaggggaattaaatccattcttgtttaattttgactagaaagagatttaatctgctccgatccccttcaatcccttacaaaccgaagaagcccttaggtggaatattcattatggattgcttagccaaagaagagaaacctctgatgcttctcttcaacttgaaggtcatctgttatgtgttacggtgattgttgttgcttgcagtagcttccatgtgtgtacatagaattataggattcctgaatattattgttttcctttctaagatattcctgttataatcagaagtagagctgtatgcttatttcagggctcatgattttcctttacctctgaaaagcgaaatgtttgctgccctaattgtaacatgcaactttgcgctgcgttcattactgtcggaaattttctggttaaatttctaattgacatggttgttatattcattttatacaaggttaactggtattagtggcgtaagctctgtttctgattagctcc

SEQ ID NO: 84159 - DNA, 999 bp, Zea Mays
gatctccttgttggccctctgccccagccagatccggcggcgaaggtaaggcaagatgtacaccgcgaggaagaagatccagaaggataagggccttgagccctccgagttcgaggactccgtcgcccaggctttcttcgacctggagaacggtaaccaggagctcaagagcgacctcaaggacctttacatcaacggtgctatccagctggatgttgccgggagcaggaaggctgttgtgatccacgtcccataccgcttgcgtaaggccttcaggaagatccatgtcaggatcgtcagggagctggagaagaaattcagcggcaaggatgtggtaattgttgccacaaggaggatcgtgaggccgcccaagaagggttcagctgttcagcgccctcgcaccaggactctgactgctgtccatgatggcatcctggaggatgttgtcttcccagctgagattgtggggaagcgtgtcaggtaccgtctggatggtgccaagatcatcaagatcttcttggacccaaaggagaggaacaacacagaatacaagctggacacctacactacggtctaccgcaggctgtgtgggaaagatgtggtctttgagtaccctatggccgaaaatgcataaatatgacgcccggatatccccattttattttgttgaatctggatgtttctttggggtctcaactagactgctccgtatgtacttcaaaaaccatagttttgatgccaaagttgttgcctaggaatttggtactcgggaattggtagcggacctgaacaatgttaagttttgagcatttaaatttacctttgtcatgataacatgttgcgagtttttatttaattgctggacgtgtttgatatgccagactgcattgttcgtttgattctacctagaatcaaatcaatatgcaactacaagcctcgcacctgtaacgtctaacctgggtttttcttgttcatttaaactttgtaacatcatgtcca

SEQ ID NO: 84160 - DNA, 2045 bp, Zea Mays
aatgcagatgcttatttgtgctattggctattgactggctctttctatgcaagcaatgcagttgtagtttagatgaatatgcttcttagtttggctggtttacatgaaacaattcatattgctgcttattttaaatatatttgtgtgttgacctacttttgcttgtgatttcgggtgggtttgagtgtccatttcatctgcttggttgtttgaagatttaggcggtggtgaccaatctgaacggcgcacactcgacatggccattgctatggcactaagggagagcaagcccgtgtacctcagcatcagttgcaacctccctgggctacctcattctacctttagttttatgttcaagtacatgattatcgggagaaaccaagatatggtgcttacactatttttgtaaatccttttgtagcaatgtctgtgcgctgggctgaaggcggacgcgcttgctcatcaaccgcgtgcggtcgagtgctagagccaccgattcaccgtcgagtgcatcacccgctacatcgctgggctacagcagaagtatacacaaagtggtggagtccgctccctttggcttcgaacccgacaccaataagccagcgctgtaccagaccgatccatcgggtaccatctctgcttggaaggccaatgccatgggaaggaactccaactctatgtgtgagtttctgaagaactacaaagacctccggcaaggagaccatcaagtttgctatctgtgcacttctagagattgtgaactgaacttaaatcatgcattcagtattggtctctagagaggaagctctgccaagcattactaagaactgatcaggtatacttatccatggtggaaagaaaaggtgattgactcagacttgaaaagaaaagatggcctttgcccattgacgcctgaggagactactcttgtcctcagagcacttgacatcgatagaagtatgcaaatatacattgctgctggggaaatatacggtggaaagcacaggatggcttctctaacttcagcatacctaaatgttgtatgtgcacaaatatattatgcatctattgtagcgtacttgttacacagtactcttccatctctcctttttttccttgttgatgccaaaatcaagtttacaagtatggttgcccctcacccacagcctgttacatattttagtatcatttatttatggaaaaacgaattctcttgtttagtatcatttatttatagaaaaacgatgtgtacgtaatactatctgctcccggtttgcacaacttgtgtctcaatctgctttagatagatgtatgccaaaattaagtttacaagtatggttgcccctcacccacaacctgttacatatttttattagatataatcccgcacataagtctctaactggttgctatttagaattccttgacatacgatgaggataaaggagcttggtttctggagaaagagttgattgtgaatgtttatgttaggaaccatctcaaggtttatcaatatccatgattgcactaccgaacgtatgtaatcagtagttgaccatagtaccatacattgcatatggtcttttgcaagattttctggtgccttttttcagagtccaaccagcataaaattacacggctctggtgtgtatatctgaaatgggtttcacgggttacaactaaagtgtttcataactgatagttaattagtactttttatatatccagatagatatcagtccaacagttttcttcgagatgcaattagcacttatagtaacattgattttcttatatacccttatttttgtgaaaccaatttaatggtctatgttatcattcaaaattgccttatgttgacactatgtatatatgctattcacaataacagagccattcatgctgttggacgccttggatgaactaccttttcttcaacaaagatggagctcatgcagattgatttagtccatttcttgcaatgtaacatatatgtttcatacgaattttgtactcccgtcgcatcgcacgggcactcacctagt

SEQ ID NO: 84161 - DNA, 2011 bp, Zea Mays
gttaatgcagatgcttatttgtgctattggctattgactggctctttctatgcaagcaatgcagttgtagtttagatgaatatgcttcttagtttggctggtttacatgaaacaattcatattgctgcttattttaaatatatttgtgtgttgacctacttttgcttgtgatttcgggtgggtttgagtgtccatttcatctgcttggttgtttgaagatttaggcggtggtgaccaatctgaacggcgcacactcgacatggccattgctatggcactaagggagagcaagcccgtgtacctcagcatcagttgcaacctccctgggctacctcattctacctttagttttatgttcaagtacatgattatcgggagaaaccaagatatggtctgtgcgctgggctgaaggcggacgcgcttgctcatcaaccgcgtgcggtcgagtgctagagccaccgattcaccgtcgagtgcatcacccgctacatcgctgggctacagcagaagtatacacaaagtggtggagtccgctccctttggcttcgaacccgacaccaataagccagcgctgtaccagaccgatccatcgggtaccatctctgcttggaaggccaatgccatgggaaggaactccaactctatgtgtgagtttctgaagaactacaaagacctccggcaaggagaccatcaagtttgctatctgtgcacttctagagattgtgaactgaacttaaatcatgcattcagtattggtctctagagaggaagctctgccaagcattactaagaactgatcaggtatacttatccatggtggaaagaaaaggtgattgactcagacttgaaaagaaaagatggcctttgcccattgacgcctgaggagactactcttgtcctcagagcacttgacatcgatagaagtatgcaaatatacattgctgctggggaaatatacggtggaaagcacaggatggcttctctaacttcagcatacctaaatgttgtatgtgcacaaatatattatgcatctattgtagcgtacttgttacacagtactcttccatctctcctttttttccttgttgatgccaaaatcaagtttacaagtatggttgcccctcacccacagcctgttacatattttagtatcatttatttatggaaaaacgaattctcttgtttagtatcatttatttatagaaaaacgatgtgtacgtaatactatctgctcccggtttgcacaacttgtgtctcaatctgctttagatagatgtatgccaaaattaagtttacaagtatggttgcccctcacccacaacctgttacatatttttattagatataatcccgcacataagtctctaactggttgctatttagaattccttgacatacgatgaggataaaggagcttggtttctggagaaagagttgattgtgaatgtttatgttaggaaccatctcaaggtttatcaatatccatgattgcactaccgaacgtatgtaatcagtagttgaccatagtaccatacattgcatatggtcttttgcaagattttctggtgccttttttcagagtccaaccagcataaaattacacggctctggtgtgtatatctgaaatgggtttcacgggttacaactaaagtgtttcataactgatagttaattagtactttttatatatccagatagatatcagtccaacagttttcttcgagatgcaattagcacttatagtaacattgattttcttatatacccttatttttgtgaaaccaatttaatggtctatgttatcattcaaaattgccttatgttgacactatgtatatatgctattcacaataacagagccattcatgctgttggacgccttggatgaactaccttttcttcaacaaagatggagctcatgcagattgatttagtccatttcttgcaatgtaacatatatgtttcatacgaattttgtactcccgtcgcatcgcacgggcactcacctagt

SEQ ID NO: 84162 - DNA, 2664 bp, Zea Mays
tattaatcggagttaatgcagatgcttatttgtgctattggctattgactggctctttctatgcaagcaatgcagttgtagtttagatgaatatgcttcttagtttggctggtttacatgaaacaattcatattgctgcttattttaaatatatttgtgtgttgacctacttttgcttgtgatttcgggtgggtttgagtgtccatttcatctgcttggttgtttgaagatttaggcggtggtgaccaatctgaacggcgcacactcgacatggccattgctatggcactaagggagagcaagcccgtgtacctcagcatcagttgcaacctccctgggctacctcattctacctttagttttatgttcaagtacatgattatcgggagaaaccaagatatggtgcttacactatttttgtaaatccttttgtagcaatgtatgcattgctcttacgtttcctccagttatatttatgagttcccttgtatattgatggactttaggtgcaaaatatttattagttatgtgagaatttatggccaatatctggtttgtttaatggttttacacactaacttcaaatacagcatgaattcctgtcactagcccctataaggctattggagatcgatattcaaataaaaactcttaccgcacagtgcacattgtatagttgaagaagtgcacactctttatgtttttaaaaggaaaaacatttcaagggtgtttagtagccatggtactgtaaacctgtgcattctcttgcaaattaatgcacaaaggttgtgctaacttgcccctaatttttttttatcccacttggcctgttatacttatacaagctaaagtagacttctaagttaaggcacacatgcagaattgttgccactttctcattttgcccttaattttttaccctccatagcatccatttattgctctgatgatcaaactattggtatgatataattaagtactgaagaaaaaaagtttcaaccattttagaaataatatctctgacccgaattttcgtctccccaggtctgtgcgctgggctgaaggcggacgcgcttgctcatcaaccgcgtgcggtcgagtgctagagccaccgattcaccgtcgagtgcatcacccgctacatcgctgggctacagcagaagtatacacaaagtggtggagtccgctccctttggcttcgaacccgacaccaataagccagcgctgtaccagaccgatccatcgggtaccatctctgcttggaaggccaatgccatgggaaggaactccaactctatgtgtgagtttctgaagaactacaaagacctccggcaaggagaccatcaagtttgctatctgtgcacttctagagattgtgaactgaacttaaatcatgcattcagtattggtctctagagaggaagctctgccaagcattactaagaactgatcaggtatacttatccatggtggaaagaaaaggtgattgactcagacttgaaaagaaaagatggcctttgcccattgacgcctgaggagactactcttgtcctcagagcacttgacatcgatagaagtatgcaaatatacattgctgctggggaaatatacggtggaaagcacaggatggcttctctaacttcagcatacctaaatgttgtatgtgcacaaatatattatgcatctattgtagcgtacttgttacacagtactcttccatctctcctttttttccttgttgatgccaaaatcaagtttacaagtatggttgcccctcacccacagcctgttacatattttagtatcatttatttatggaaaaacgaattctcttgtttagtatcatttatttatagaaaaacgatgtgtacgtaatactatctgctcccggtttgcacaacttgtgtctcaatctgctttagatagatgtatgccaaaattaagtttacaagtatggttgcccctcacccacaacctgttacatatttttattagatataatcccgcacataagtctctaactggttgctatttagaattccttgacatacgatgaggataaaggagcttggtttctggagaaagagttgattgtgaatgtttatgttaggaaccatctcaaggtttatcaatatccatgattgcactaccgaacgtatgtaatcagtagttgaccatagtaccatacattgcatatggtcttttgcaagattttctggtgccttttttcagagtccaaccagcataaaattacacggctctggtgtgtatatctgaaatgggtttcacgggttacaactaaagtgtttcataactgatagttaattagtactttttatatatccagatagatatcagtccaacagttttcttcgagatgcaattagcacttatagtaacattgattttcttatatacccttatttttgtgaaaccaatttaatggtctatgttatcattcaaaattgccttatgttgacactatgtatatatgctattcacaataacagagccattcatgctgttggacgccttggatgaactaccttttcttcaacaaagatggagctcatgcagattgatttagtccatttcttgcaatgtaacatatatgtttcatacgaattttgtactcccgtcgcatcgcacgggcactcacctagt

SEQ ID NO: 84163 - DNA, 1320 bp, Zea Mays
gcatgttctgccggttccagcctcggtcgcggatcgcccactctcctcccccacggacgcagatcccccgcctcgattcctcattccttcaatggcgcatcccttccttcgatggcgctcctcgcatcccgcctgcccgccgcgctcgattcctccttccttcaatggcgcatcccgcccgcagccaccaatcaacgcccgcggatcctcgtcaatcaactcccgcggatcctccaccctcctccccaccgcggcggatcctccaccctcctcgtcaatcaacgcctgtggtcctcccccacgcggatcctcgcaccacccactcccccgcgtgcgtccctggcccctcgagctcgcgcaggccagaggaccgcgctcgcccccctgaagattactccctccccaaggagctggcggcggcgtgactgtgtcgggagaaggaggccgtagaggacgctgcgcgggggctgcggcaggagctcgactccgagcggtcctccccggagatggcagccagatctgaccattgagccccctaatcgagcggatccaaggtctgtgcgctgggctgaaggcggacgcgcttgctcatcaaccgcgtgcggtcgagtgctagagccaccgattcaccgtcgagtgcatcacccgctacatcgctgggctacagcagaagtatacacaaagtggtggagtccgctccctttggcttcgaacccgacaccaataagccagcgctgtaccagaccgatccatcgggtaccatctctgcttggaaggccaatgccatgggaaggaactccaactctatgtgtgagtttctgaagaactacaaagacctccggcaaggagaccatcaagtttgctatctgtgcacttctagagattgtgaactgaacttaaatcatgcattcagtattggtctctagagaggaagctctgccaagcattactaagaactgatcaggtatacttatccatggtggaaagaaaaggtgattgactcagacttgaaaagaaaagatggcctttgcccattgacgcctgaggagactactcttgtcctcagagcacttgacatcgatagaagtatgcaaatatacattgctgctggggaaatatacggtggaaagcacaggatggcttctctaacttcagcatacctaaatagccattcatgctgttggacgccttggatgaactaccttttcttcaacaaagatggagctcatgcagattgatttagtccatttcttgcaatgtaacatatatgtttcatacgaattttgtactcccgtcgcatcgcacgggcactcacctagt

SEQ ID NO: 84164 - DNA, 2132 bp, Zea Mays
gcatgttctgccggttccagcctcggtcgcggatcgcccactctcctcccccacggacgcagatcccccgcctcgattcctcattccttcaatggcgcatcccttccttcgatggcgctcctcgcatcccgcctgcccgccgcgctcgattcctccttccttcaatggcgcatcccgcccgcagccaccaatcaacgcccgcggatcctcgtcaatcaactcccgcggatcctccaccctcctccccaccgcggcggatcctccaccctcctcgtcaatcaacgcctgtggtcctcccccacgcggatcctcgcaccacccactcccccgcgtgcgtccctggcccctcgagctcgcgcaggccagaggaccgcgctcgcccccctgaagattactccctccccaaggagctggcggcggcgtgactgtgtcgggagaaggaggccgtagaggacgctgcgcgggggctgcggcaggagctcgactccgagcggtcctccccggagatggcagccagatctgaccattgagccccctaatcgagcggatccaaggcggtggtgaccaatctgaacggcgcacactcgacatggccattgctatggcactaagggagagcaagcccgtgtacctcagcatcagttgcaacctccctgggctacctcattctacctttagttttatgttcaagtacatgattatcgggagaaaccaagatatggtgcttacactatttttgtaaatccttttgtagcaatgtatgcattgctcttacgtttcctccagttatatttatgagttcccttgtatattgatggactttaggtgcaaaatatttattagttatgtgagaatttatggccaatatctggtttgtttaatggttttacacactaacttcaaatacagcatgaattcctgtcactagcccctataaggctattggagatcgatattcaaataaaaactcttaccgcacagtgcacattgtatagttgaagaagtgcacactctttatgtttttaaaaggaaaaacatttcaagggtgtttagtagccatggtactgtaaacctgtgcattctcttgcaaattaatgcacaaaggttgtgctaacttgcccctaatttttttttatcccacttggcctgttatacttatacaagctaaagtagacttctaagttaaggcacacatgcagaattgttgccactttctcattttgcccttaattttttaccctccatagcatccatttattgctctgatgatcaaactattggtatgatataattaagtactgaagaaaaaaagtttcaaccattttagaaataatatctctgacccgaattttcgtctccccaggtctgtgcgctgggctgaaggcggacgcgcttgctcatcaaccgcgtgcggtcgagtgctagagccaccgattcaccgtcgagtgcatcacccgctacatcgctgggctacagcagaagtatacacaaagtggtggagtccgctccctttggcttcgaacccgacaccaataagccagcgctgtaccagaccgatccatcgggtaccatctctgcttggaaggccaatgccatgggaaggaactccaactctatgtgtgagtttctgaagaactacaaagacctccggcaaggagaccatcaagtttgctatctgtgcacttctagagattgtgaactgaacttaaatcatgcattcagtattggtctctagagaggaagctctgccaagcattactaagaactgatcaggtatacttatccatggtggaaagaaaaggtgattgactcagacttgaaaagaaaagatggcctttgcccattgacgcctgaggagactactcttgtcctcagagcacttgacatcgatagaagtatgcaaatatacattgctgctggggaaatatacggtggaaagcacaggatggcttctctaacttcagcatacctaaatgttagccattcatgctgttggacgccttggatgaactaccttttcttcaacaaagatggagctcatgcagattgatttagtccatttcttgcaatgtaacatatatgtttcatacgaattttgtactcccgtcgcatcgcacgggcactcacctagt

SEQ ID NO: 84165 - DNA, 2138 bp, Zea Mays
gcatgttctgccggttccagcctcggtcgcggatcgcccactctcctcccccacggacgcagatcccccgcctcgattcctcattccttcaatggcgcatcccttccttcgatggcgctcctcgcatcccgcctgcccgccgcgctcgattcctccttccttcaatggcgcatcccgcccgcagccaccaatcaacgcccgcggatcctcgtcaatcaactcccgcggatcctccaccctcctccccaccgcggcggatcctccaccctcctcgtcaatcaacgcctgtggtcctcccccacgcggatcctcgcaccacccactcccccgcgtgcgtccctggcccctcgagctcgcgcaggccagaggaccgcgctcgcccccctgaagattactccctccccaaggagctggcggcggcgtgactgtgtcgggagaaggaggccgtagaggacgctgcgcgggggctgcggcaggagctcgactccgagcggtcctccccggagatggcagccagatctgaccattgagccccctaatcgagcggatccaagatttaggcggtggtgaccaatctgaacggcgcacactcgacatggccattgctatggcactaagggagagcaagcccgtgtacctcagcatcagttgcaacctccctgggctacctcattctacctttagttttatgttcaagtacatgattatcgggagaaaccaagatatggtgcttacactatttttgtaaatccttttgtagcaatgtatgcattgctcttacgtttcctccagttatatttatgagttcccttgtatattgatggactttaggtgcaaaatatttattagttatgtgagaatttatggccaatatctggtttgtttaatggttttacacactaacttcaaatacagcatgaattcctgtcactagcccctataaggctattggagatcgatattcaaataaaaactcttaccgcacagtgcacattgtatagttgaagaagtgcacactctttatgtttttaaaaggaaaaacatttcaagggtgtttagtagccatggtactgtaaacctgtgcattctcttgcaaattaatgcacaaaggttgtgctaacttgcccctaatttttttttatcccacttggcctgttatacttatacaagctaaagtagacttctaagttaaggcacacatgcagaattgttgccactttctcattttgcccttaattttttaccctccatagcatccatttattgctctgatgatcaaactattggtatgatataattaagtactgaagaaaaaaagtttcaaccattttagaaataatatctctgacccgaattttcgtctccccaggtctgtgcgctgggctgaaggcggacgcgcttgctcatcaaccgcgtgcggtcgagtgctagagccaccgattcaccgtcgagtgcatcacccgctacatcgctgggctacagcagaagtatacacaaagtggtggagtccgctccctttggcttcgaacccgacaccaataagccagcgctgtaccagaccgatccatcgggtaccatctctgcttggaaggccaatgccatgggaaggaactccaactctatgtgtgagtttctgaagaactacaaagacctccggcaaggagaccatcaagtttgctatctgtgcacttctagagattgtgaactgaacttaaatcatgcattcagtattggtctctagagaggaagctctgccaagcattactaagaactgatcaggtatacttatccatggtggaaagaaaaggtgattgactcagacttgaaaagaaaagatggcctttgcccattgacgcctgaggagactactcttgtcctcagagcacttgacatcgatagaagtatgcaaatatacattgctgctggggaaatatacggtggaaagcacaggatggcttctctaacttcagcatacctaaatgttagccattcatgctgttggacgccttggatgaactaccttttcttcaacaaagatggagctcatgcagattgatttagtccatttcttgcaatgtaacatatatgtttcatacgaattttgtactcccgtcgcatcgcacgggcactcacctagt

SEQ ID NO: 84166 - DNA, 1323 bp, Zea Mays
gcatgttctgccggttccagcctcggtcgcggatcgcccactctcctcccccacggacgcagatcccccgcctcgattcctcattccttcaatggcgcatcccttccttcgatggcgctcctcgcatcccgcctgcccgccgcgctcgattcctccttccttcaatggcgcatcccgcccgcagccaccaatcaacgcccgcggatcctcgtcaatcaactcccgcggatcctccaccctcctccccaccgcggcggatcctccaccctcctcgtcaatcaacgcctgtggtcctcccccacgcggatcctcgcaccacccactcccccgcgtgcgtccctggcccctcgagctcgcgcaggccagaggaccgcgctcgcccccctgaagattactccctccccaaggagctggcggcggcgtgactgtgtcgggagaaggaggccgtagaggacgctgcgcgggggctgcggcaggagctcgactccgagcggtcctccccggagatggcagccagatctgaccattgagccccctaatcgagcggatccaaggtctgtgcgctgggctgaaggcggacgcgcttgctcatcaaccgcgtgcggtcgagtgctagagccaccgattcaccgtcgagtgcatcacccgctacatcgctgggctacagcagaagtatacacaaagtggtggagtccgctccctttggcttcgaacccgacaccaataagccagcgctgtaccagaccgatccatcgggtaccatctctgcttggaaggccaatgccatgggaaggaactccaactctatgtgtgagtttctgaagaactacaaagacctccggcaaggagaccatcaagtttgctatctgtgcacttctagagattgtgaactgaacttaaatcatgcattcagtattggtctctagagaggaagctctgccaagcattactaagaactgatcaggtatacttatccatggtggaaagaaaaggtgattgactcagacttgaaaagaaaagatggcctttgcccattgacgcctgaggagactactcttgtcctcagagcacttgacatcgatagaagtatgcaaatatacattgctgctggggaaatatacggtggaaagcacaggatggcttctctaacttcagcatacctaaatgttagccattcatgctgttggacgccttggatgaactaccttttcttcaacaaagatggagctcatgcagattgatttagtccatttcttgcaatgtaacatatatgtttcatacgaattttgtactcccgtcgcatcgcacgggcactcacctagt

SEQ ID NO: 84167 - DNA, 2983 bp, Zea Mays
gcatgttctgccggttccagcctcggtcgcggatcgcccactctcctcccccacggacgcagatcccccgcctcgattcctcattccttcaatggcgcatcccttccttcgatggcgctcctcgcatcccgcctgcccgccgcgctcgattcctccttccttcaatggcgcatcccgcccgcagccaccaatcaacgcccgcggatcctcgtcaatcaactcccgcggatcctccaccctcctccccaccgcggcggatcctccaccctcctcgtcaatcaacgcctgtggtcctcccccacgcggatcctcgcaccacccactcccccgcgtgcgtccctggcccctcgagctcgcgcaggccagaggaccgcgctcgcccccctgaagattactccctccccaaggagctggcggcggcgtgactgtgtcgggagaaggaggccgtagaggacgctgcgcgggggctgcggcaggagctcgactccgagcggtcctccccggagatggcagccagatctgaccattgagccccctaatcgagcggatccaaggcggtggtgaccaatctgaacggcgcacactcgacatggccattgctatggcactaagggagagcaagcccgtgtacctcagcatcagttgcaacctccctgggctacctcattctacctttagttttatgttcaagtacatgattatcgggagaaaccaagatatggtgcttacactatttttgtaaatccttttgtagcaatgtatgcattgctcttacgtttcctccagttatatttatgagttcccttgtatattgatggactttaggtgcaaaatatttattagttatgtgagaatttatggccaatatctggtttgtttaatggttttacacactaacttcaaatacagcatgaattcctgtcactagcccctataaggctattggagatcgatattcaaataaaaactcttaccgcacagtgcacattgtatagttgaagaagtgcacactctttatgtttttaaaaggaaaaacatttcaagggtgtttagtagccatggtactgtaaacctgtgcattctcttgcaaattaatgcacaaaggttgtgctaacttgcccctaatttttttttatcccacttggcctgttatacttatacaagctaaagtagacttctaagttaaggcacacatgcagaattgttgccactttctcattttgcccttaattttttaccctccatagcatccatttattgctctgatgatcaaactattggtatgatataattaagtactgaagaaaaaaagtttcaaccattttagaaataatatctctgacccgaattttcgtctccccaggtctgtgcgctgggctgaaggcggacgcgcttgctcatcaaccgcgtgcggtcgagtgctagagccaccgattcaccgtcgagtgcatcacccgctacatcgctgggctacagcagaagtatacacaaagtggtggagtccgctccctttggcttcgaacccgacaccaataagccagcgctgtaccagaccgatccatcgggtaccatctctgcttggaaggccaatgccatgggaaggaactccaactctatgtgtgagtttctgaagaactacaaagacctccggcaaggagaccatcaagtttgctatctgtgcacttctagagattgtgaactgaacttaaatcatgcattcagtattggtctctagagaggaagctctgccaagcattactaagaactgatcaggtatacttatccatggtggaaagaaaaggtgattgactcagacttgaaaagaaaagatggcctttgcccattgacgcctgaggagactactcttgtcctcagagcacttgacatcgatagaagtatgcaaatatacattgctgctggggaaatatacggtggaaagcacaggatggcttctctaacttcagcatacctaaatgttgtatgtgcacaaatatattatgcatctattgtagcgtacttgttacacagtactcttccatctctcctttttttccttgttgatgccaaaatcaagtttacaagtatggttgcccctcacccacagcctgttacatattttagtatcatttatttatggaaaaacgaattctcttgtttagtatcatttatttatagaaaaacgatgtgtacgtaatactatctgctcccggtttgcacaacttgtgtctcaatctgctttagatagatgtatgccaaaattaagtttacaagtatggttgcccctcacccacaacctgttacatatttttattagatataatcccgcacataagtctctaactggttgctatttagaattccttgacatacgatgaggataaaggagcttggtttctggagaaagagttgattgtgaatgtttatgttaggaaccatctcaaggtttatcaatatccatgattgcactaccgaacgtatgtaatcagtagttgaccatagtaccatacattgcatatggtcttttgcaagattttctggtgccttttttcagagtccaaccagcataaaattacacggctctggtgtgtatatctgaaatgggtttcacgggttacaactaaagtgtttcataactgatagttaattagtactttttatatatccagatagatatcagtccaacagttttcttcgagatgcaattagcacttatagtaacattgattttcttatatacccttatttttgtgaaaccaatttaatggtctatgttatcattcaaaattgccttatgttgacactatgtatatatgctattcacaataacagagccattcatgctgttggacgccttggatgaactaccttttcttcaacaaagatggagctcatgcagattgatttagtccatttcttgcaatgtaacatatatgtttcatacgaattttgtactcccgtcgcatcgcacgggcactcacctagt

SEQ ID NO: 84168 - DNA, 1846 bp, Zea Mays
gcatgttctgccggttccagcctcggtcgcggatcgcccactctcctcccccacggacgcagatcccccgcctcgattcctcattccttcaatggcgcatcccttccttcgatggcgctcctcgcatcccgcctgcccgccgcgctcgattcctccttccttcaatggcgcatcccgcccgcagccaccaatcaacgcccgcggatcctcgtcaatcaactcccgcggatcctccaccctcctccccaccgcggcggatcctccaccctcctcgtcaatcaacgcctgtggtcctcccccacgcggatcctcgcaccacccactcccccgcgtgcgtccctggcccctcgagctcgcgcaggccagaggaccgcgctcgcccccctgaagattactccctccccaaggagctggcggcggcgtgactgtgtcgggagaaggaggccgtagaggacgctgcgcgggggctgcggcaggagctcgactccgagcggtcctccccggagatggcagccagatctgaccattgagccccctaatcgagcggatccaagattgtgaactgaacttaaatcatgcattcagtattggtctctagagaggaagctctgccaagcattactaagaactgatcaggtatacttatccatggtggaaagaaaaggtgattgactcagacttgaaaagaaaagatggcctttgcccattgacgcctgaggagactactcttgtcctcagagcacttgacatcgatagaagtatgcaaatatacattgctgctggggaaatatacggtggaaagcacaggatggcttctctaacttcagcatacctaaatgttgtatgtgcacaaatatattatgcatctattgtagcgtacttgttacacagtactcttccatctctcctttttttccttgttgatgccaaaatcaagtttacaagtatggttgcccctcacccacagcctgttacatattttagtatcatttatttatggaaaaacgaattctcttgtttagtatcatttatttatagaaaaacgatgtgtacgtaatactatctgctcccggtttgcacaacttgtgtctcaatctgctttagatagatgtatgccaaaattaagtttacaagtatggttgcccctcacccacaacctgttacatatttttattagatataatcccgcacataagtctctaactggttgctatttagaattccttgacatacgatgaggataaaggagcttggtttctggagaaagagttgattgtgaatgtttatgttaggaaccatctcaaggtttatcaatatccatgattgcactaccgaacgtatgtaatcagtagttgaccatagtaccatacattgcatatggtcttttgcaagattttctggtgccttttttcagagtccaaccagcataaaattacacggctctggtgtgtatatctgaaatgggtttcacgggttacaactaaagtgtttcataactgatagttaattagtactttttatatatccagatagatatcagtccaacagttttcttcgagatgcaattagcacttatagtaacattgattttcttatatacccttatttttgtgaaaccaatttaatggtctatgttatcattcaaaattgccttatgttgacactatgtatatatgctattcacaataacagagccattcatgctgttggacgccttggatgaactaccttttcttcaacaaagatggagctcatgcagattgatttagtccatttcttgcaatgtaacatatatgtttcatacgaattttgtactcccgtcgcatcgcacgggcactcacctagt

SEQ ID NO: 84169 - DNA, 1496 bp, Zea Mays
gcatgttctgccggttccagcctcggtcgcggatcgcccactctcctcccccacggacgcagatcccccgcctcgattcctcattccttcaatggcgcatcccttccttcgatggcgctcctcgcatcccgcctgcccgccgcgctcgattcctccttccttcaatggcgcatcccgcccgcagccaccaatcaacgcccgcggatcctcgtcaatcaactcccgcggatcctccaccctcctccccaccgcggcggatcctccaccctcctcgtcaatcaacgcctgtggtcctcccccacgcggatcctcgcaccacccactcccccgcgtgcgtccctggcccctcgagctcgcgcaggccagaggaccgcgctcgcccccctgaagattactccctccccaaggagctggcggcggcgtgactgtgtcgggagaaggaggccgtagaggacgctgcgcgggggctgcggcaggagctcgactccgagcggtcctccccggagatggcagccagatctgaccattgagccccctaatcgagcggatccaagatttaggcggtggtgaccaatctgaacggcgcacactcgacatggccattgctatggcactaagggagagcaagcccgtgtacctcagcatcagttgcaacctccctgggctacctcattctacctttagttttatgttcaagtacatgattatcgggagaaaccaagatatggtctgtgcgctgggctgaaggcggacgcgcttgctcatcaaccgcgtgcggtcgagtgctagagccaccgattcaccgtcgagtgcatcacccgctacatcgctgggctacagcagaagtatacacaaagtggtggagtccgctccctttggcttcgaacccgacaccaataagccagcgctgtaccagaccgatccatcgggtaccatctctgcttggaaggccaatgccatgggaaggaactccaactctatgtgtgagtttctgaagaactacaaagacctccggcaaggagaccatcaagtttgctatctgtgcacttctagagattgtgaactgaacttaaatcatgcattcagtattggtctctagagaggaagctctgccaagcattactaagaactgatcaggtatacttatccatggtggaaagaaaaggtgattgactcagacttgaaaagaaaagatggcctttgcccattgacgcctgaggagactactcttgtcctcagagcacttgacatcgatagaagtatgcaaatatacattgctgctggggaaatatacggtggaaagcacaggatggcttctctaacttcagcatacctaaatgttagccattcatgctgttggacgccttggatgaactaccttttcttcaacaaagatggagctcatgcagattgatttagtccatttcttgcaatgtaacatatatgtttcatacgaattttgtactcccgtcgcatcgcacgggcactcacctagt

SEQ ID NO: 84170 - DNA, 2174 bp, Zea Mays
gcatgttctgccggttccagcctcggtcgcggatcgcccactctcctcccccacggacgcagatcccccgcctcgattcctcattccttcaatggcgcatcccttccttcgatggcgctcctcgcatcccgcctgcccgccgcgctcgattcctccttccttcaatggcgcatcccgcccgcagccaccaatcaacgcccgcggatcctcgtcaatcaactcccgcggatcctccaccctcctccccaccgcggcggatcctccaccctcctcgtcaatcaacgcctgtggtcctcccccacgcggatcctcgcaccacccactcccccgcgtgcgtccctggcccctcgagctcgcgcaggccagaggaccgcgctcgcccccctgaagattactccctccccaaggagctggcggcggcgtgactgtgtcgggagaaggaggccgtagaggacgctgcgcgggggctgcggcaggagctcgactccgagcggtcctccccggagatggcagccagatctgaccattgagccccctaatcgagcggatccaaggtctgtgcgctgggctgaaggcggacgcgcttgctcatcaaccgcgtgcggtcgagtgctagagccaccgattcaccgtcgagtgcatcacccgctacatcgctgggctacagcagaagtatacacaaagtggtggagtccgctccctttggcttcgaacccgacaccaataagccagcgctgtaccagaccgatccatcgggtaccatctctgcttggaaggccaatgccatgggaaggaactccaactctatgtgtgagtttctgaagaactacaaagacctccggcaaggagaccatcaagtttgctatctgtgcacttctagagattgtgaactgaacttaaatcatgcattcagtattggtctctagagaggaagctctgccaagcattactaagaactgatcaggtatacttatccatggtggaaagaaaaggtgattgactcagacttgaaaagaaaagatggcctttgcccattgacgcctgaggagactactcttgtcctcagagcacttgacatcgatagaagtatgcaaatatacattgctgctggggaaatatacggtggaaagcacaggatggcttctctaacttcagcatacctaaatgttgtatgtgcacaaatatattatgcatctattgtagcgtacttgttacacagtactcttccatctctcctttttttccttgttgatgccaaaatcaagtttacaagtatggttgcccctcacccacagcctgttacatattttagtatcatttatttatggaaaaacgaattctcttgtttagtatcatttatttatagaaaaacgatgtgtacgtaatactatctgctcccggtttgcacaacttgtgtctcaatctgctttagatagatgtatgccaaaattaagtttacaagtatggttgcccctcacccacaacctgttacatatttttattagatataatcccgcacataagtctctaactggttgctatttagaattccttgacatacgatgaggataaaggagcttggtttctggagaaagagttgattgtgaatgtttatgttaggaaccatctcaaggtttatcaatatccatgattgcactaccgaacgtatgtaatcagtagttgaccatagtaccatacattgcatatggtcttttgcaagattttctggtgccttttttcagagtccaaccagcataaaattacacggctctggtgtgtatatctgaaatgggtttcacgggttacaactaaagtgtttcataactgatagttaattagtactttttatatatccagatagatatcagtccaacagttttcttcgagatgcaattagcacttatagtaacattgattttcttatatacccttatttttgtgaaaccaatttaatggtctatgttatcattcaaaattgccttatgttgacactatgtatatatgctattcacaataacagagccattcatgctgttggacgccttggatgaactaccttttcttcaacaaagatggagctcatgcagattgatttagtccatttcttgcaatgtaacatatatgtttcatacgaattttgtactcccgtcgcatcgcacgggcactcacctagt

SEQ ID NO: 84171 - DNA, 2347 bp, Zea Mays
gcatgttctgccggttccagcctcggtcgcggatcgcccactctcctcccccacggacgcagatcccccgcctcgattcctcattccttcaatggcgcatcccttccttcgatggcgctcctcgcatcccgcctgcccgccgcgctcgattcctccttccttcaatggcgcatcccgcccgcagccaccaatcaacgcccgcggatcctcgtcaatcaactcccgcggatcctccaccctcctccccaccgcggcggatcctccaccctcctcgtcaatcaacgcctgtggtcctcccccacgcggatcctcgcaccacccactcccccgcgtgcgtccctggcccctcgagctcgcgcaggccagaggaccgcgctcgcccccctgaagattactccctccccaaggagctggcggcggcgtgactgtgtcgggagaaggaggccgtagaggacgctgcgcgggggctgcggcaggagctcgactccgagcggtcctccccggagatggcagccagatctgaccattgagccccctaatcgagcggatccaagatttaggcggtggtgaccaatctgaacggcgcacactcgacatggccattgctatggcactaagggagagcaagcccgtgtacctcagcatcagttgcaacctccctgggctacctcattctacctttagttttatgttcaagtacatgattatcgggagaaaccaagatatggtctgtgcgctgggctgaaggcggacgcgcttgctcatcaaccgcgtgcggtcgagtgctagagccaccgattcaccgtcgagtgcatcacccgctacatcgctgggctacagcagaagtatacacaaagtggtggagtccgctccctttggcttcgaacccgacaccaataagccagcgctgtaccagaccgatccatcgggtaccatctctgcttggaaggccaatgccatgggaaggaactccaactctatgtgtgagtttctgaagaactacaaagacctccggcaaggagaccatcaagtttgctatctgtgcacttctagagattgtgaactgaacttaaatcatgcattcagtattggtctctagagaggaagctctgccaagcattactaagaactgatcaggtatacttatccatggtggaaagaaaaggtgattgactcagacttgaaaagaaaagatggcctttgcccattgacgcctgaggagactactcttgtcctcagagcacttgacatcgatagaagtatgcaaatatacattgctgctggggaaatatacggtggaaagcacaggatggcttctctaacttcagcatacctaaatgttgtatgtgcacaaatatattatgcatctattgtagcgtacttgttacacagtactcttccatctctcctttttttccttgttgatgccaaaatcaagtttacaagtatggttgcccctcacccacagcctgttacatattttagtatcatttatttatggaaaaacgaattctcttgtttagtatcatttatttatagaaaaacgatgtgtacgtaatactatctgctcccggtttgcacaacttgtgtctcaatctgctttagatagatgtatgccaaaattaagtttacaagtatggttgcccctcacccacaacctgttacatatttttattagatataatcccgcacataagtctctaactggttgctatttagaattccttgacatacgatgaggataaaggagcttggtttctggagaaagagttgattgtgaatgtttatgttaggaaccatctcaaggtttatcaatatccatgattgcactaccgaacgtatgtaatcagtagttgaccatagtaccatacattgcatatggtcttttgcaagattttctggtgccttttttcagagtccaaccagcataaaattacacggctctggtgtgtatatctgaaatgggtttcacgggttacaactaaagtgtttcataactgatagttaattagtactttttatatatccagatagatatcagtccaacagttttcttcgagatgcaattagcacttatagtaacattgattttcttatatacccttatttttgtgaaaccaatttaatggtctatgttatcattcaaaattgccttatgttgacactatgtatatatgctattcacaataacagagccattcatgctgttggacgccttggatgaactaccttttcttcaacaaagatggagctcatgcagattgatttagtccatttcttgcaatgtaacatatatgtttcatacgaattttgtactcccgtcgcatcgcacgggcactcacctagt

SEQ ID NO: 84172 - DNA, 1413 bp, Zea Mays
tacattggaggggaaataccagaagcttggagctctgccctgactttcttgatcggcttgccaactggcttgtattcatcaccgaaaaccatttcttgtcttgagtgtattggataagaaggtgaacaagaagctgacagccaagctgaccctatactcaggatgtgttgtgccttctggtggtgaaaccgtctctttaagcaactgaactgctttaagtataacagaagagctcagtgatttaccctttagaaaatcctctaccttgctagctctgatggcatggtcagctccataagcaccgaacaccaagcatatatcctccatgatgttcttccctgaagctgcatcagttgaagtccttgccaagagagcagcattgacatatgaagcagcattgccaaatggccgaggcgctgcccggaatgtctcaaaggtgatgccatctcaatcccactttgggatgaatatgctgatcagcagggtcctagaatcacatggagactgctgcaagaactcctccaaagtaaggcacaacctttttggaagccgtctggattgtgactgttgtacctgcagccagtagcacagttgctatgtctgactcgaatggcaacctctgcgccatgattatgttgccacctatggttgctgtgttccgaacaaatggcgaagccactttgcttaggtgattggcaatttttctgaagaccagatttccatctgacaacacctcaatggttgtagcctgtagagatggacacaaccgatccaagctcaattcccttaacgctgctgttgatgactgatagctctggtattcctttgatgtcaatgtacttgtcatagaggtcctgatccatgtgtaagggagttcactgccactccccgctcattttttctaaaggagaaatatccatcttcttgttgttttgtaccgttggatactttagcatcattctcatactactaggagtgtaggtaaggagtccacacatgagtttgtaaacaccatgtgtaagggagttcaccaacgtgatgtgcctcacctacaggggtgctgctttgtcaccacccttgtgccttgtccaggtgctacttactagcctcttattttgtttctgaattcaggatcttatgctggtcctacaagtaacattaaagcacttccctccctgttggcattaaaacccctggcgtggttgttgtgttgtactagacaaccatcacttccaatttgttgtagtagctttttcttgctacttcatggatcttgggtcttcggttgttgagttatttgcttcagcaattgggcttctgacttagagcttttggatttgtaagcattgctggttgtcttgaagaagatgatggtgggctcttcccaccactagcagctatagaggaagggga

SEQ ID NO: 84173 - DNA, 2118 bp, Zea Mays
cacaaatttaattggttactgagattttgggactgggtcaacaaatgaaaggtgcatttcaagttttgcttctgtgatgtttccacttttattttcagttatttcacctgttttgctaacttattgtctgaaagtctgactaggctcattatacatatttctatgaaaatgaaactgtatggtagttggttgcagactaattgttgattgtaaaatctaggtaacaaagctgctggaagaaccccattggactaggagaccagggtgaagatagctctgggcactgcacgcggaatggcttaccttcactccatgggtagcggcgggaagttcattcacgggaacatgaagtcaagcaacatccttctctcataggaactcggcgcctgcgtcaccgagttcggccttgcccagctcatgtccacgccccacgtccacccactgcacgcggaatggcttaccttcactccgtgtgtctcaatcgagggggagtcaccaacgaacgacccacaattggtaagcctcgttattcgactggatttttttatttcacctctagagaatacttctcattacctaactgctttgttctcttgccatttctgattctgttgttatgatactgatggaatcctcattcgccgctgctaaggagtttgagcaggactagagaggagacgtcagttcttcctcctccgctcatacattggaggggaaataccagaagcttggagctctgccctgactttcttgatcggcttgccaactggcttgtattcatcaccgaaaaccatttcttgtcttgagtgtattggaggataagaaggtgaacaagaagctgacagccaagctgaccctatactcaggatgtgttgtgccttctggtggtgaaaccgtctctttaagcaactgaactgctttaagtataacagaagagctcagtgatttaccctttagaaaatcctctaccttgctagctctgatggcatggtcagctccataagcaccgaacaccaagcatatatcctccatgatgttcttccctgaagctgcatcagttgaagtccttgccaagagagcagcattgacatatgaagcagcattgccaaatggccgaggcgctgcccggaatgtctcaaaggtgatgccatctcaatcccactttgggatgaatatgctgatcagcagggtcctagaatcacatggagactgctgcaagaactcctccaaagtaaggcacaacctttttggaagccgtctggattgtgactgttgtacctgcagccagtagcacagttgctatgtctgactcgaatggcaacctctgcgccatgattatgttgccacctatggttgctgtgttccgaacaaatggcgaagccactttgcttaggtgattggcaatttttctgaagaccagatttccatctgacaacacctcaatggttgtagcctgtagagatggacacaaccgatccaagctcaattcccttaacgctgctgttgatgactgatagctctggtattcctttgatgtcaatgtacttgtcatagaggtcctgatccatgtgtaagggagttcactgccactccccgctcattttttctaaaggagaaatatccatcttcttgttgttttgtaccgttggatactttagcatcattctcatactactaggagtgtaggtaaggagtccacacatgagtttgtaaacaccatgtgtaagggagttcaccaacgtgatgtgcctcacctacaggggtgctgctttgtcaccacccttgtgccttgtccaggtgctacttactagcctcttattttgtttctgaattcaggatcttatgctggtcctacaagtaacattaaagcacttccctccctgttggcattaaaacccctggcgtggttgttgtgttgtactagacaaccatcacttccaatttgttgtagtagctttttcttgctacttcatggatcttgggtcttcggttgttgagttatttgcttcagcaattgggcttctgacttagagcttttggatttgtaagcattgctggttgtcttgaagaagatgatggtgggctcttcccaccactagcagctatagaggaagggga

SEQ ID NO: 84174 - DNA, 1858 bp, Zea Mays
cacaaatttaattggttactgagattttgggactgggtcaacaaatgaaaggtgcatttcaagttttgcttctgtgatgtttccacttttattttcagttatttcacctgttttgctaacttattgtctgaaagtctgactaggctcattatacatatttctatgaaaatgaaactgtatggtagttggttgcagactaattgttgattgtaaaatctaggtaacaaagctgctggaagaaccccattggactaggagaccagggtgaagatagctctgggcactgcacgcggaatggcttaccttcactccatgggtagcggcgggaagttcattcacgggaacatgaagtcaagcaacatccttctctcataggaactcggcgcctgcgtcaccgagttcggccttgcccagctcatgtccacgccccacgtccacccactgcacgcggaatggcttaccttcactccgtgtgtctcaatcgagggggagtcaccaacgaacgacccacaattgtacattggaggggaaataccagaagcttggagctctgccctgactttcttgatcggcttgccaactggcttgtattcatcaccgaaaaccatttcttgtcttgagtgtattggaggataagaaggtgaacaagaagctgacagccaagctgaccctatactcaggatgtgttgtgccttctggtggtgaaaccgtctctttaagcaactgaactgctttaagtataacagaagagctcagtgatttaccctttagaaaatcctctaccttgctagctctgatggcatggtcagctccataagcaccgaacaccaagcatatatcctccatgatgttcttccctgaagctgcatcagttgaagtccttgccaagagagcagcattgacatatgaagcagcattgccaaatggccgaggcgctgcccggaatgtctcaaaggtgatgccatctcaatcccactttgggatgaatatgctgatcagcagggtcctagaatcacatggagactgctgcaagaactcctccaaagtaaggcacaacctttttggaagccgtctggattgtgactgttgtacctgcagccagtagcacagttgctatgtctgactcgaatggcaacctctgcgccatgattatgttgccacctatggttgctgtgttccgaacaaatggcgaagccactttgcttaggtgattggcaatttttctgaagaccagatttccatctgacaacacctcaatggttgtagcctgtagagatggacacaaccgatccaagctcaattcccttaacgctgctgttgatgactgatagctctggtattcctttgatgtcaatgtacttgtcatagaggtcctgatccatgtgtaagggagttcactgccactccccgctcattttttctaaaggagaaatatccatcttcttgttgttttgtaccgttggatactttagcatcattctcatactactaggagtgtaggggtgctgctttgtcaccacccttgtgccttgtccaggtgctacttactagcctcttattttgtttctgaattcaggatcttatgctggtcctacaagtaacattaaagcacttccctccctgttggcattaaaacccctggcgtggttgttgtgttgtactagacaaccatcacttccaatttgttgtagtagctttttcttgctacttcatggatcttgggtcttcggttgttgagttatttgcttcagcaattgggcttctgacttagagcttttggatttgtaagcattgctggttgtcttgaagaagatgatggtgggctcttcccaccactagcagctatagaggaagggga

SEQ ID NO: 84175 - DNA, 2143 bp, Zea Mays
cacaaatttaattggttactgagattttgggactgggtcaacaaatgaaaggtgcatttcaagttttgcttctgtgatgtttccacttttattttcagttatttcacctgttttgctaacttattgtctgaaagtctgactaggctcattatacatatttctatgaaaatgaaactgtatggtagttggttgcagactaattgttgattgtaaaatctaggtaacaaagctgctggaagaaccccattggactaggagaccagggtgaagatagctctgggcactgcacgcggaatggcttaccttcactccatgggtagcggcgggaagttcattcacgggaacatgaagtcaagcaacatccttctctcataggaactcggcgcctgcgtcaccgagttcggccttgcccagctcatgtccacgccccacgtccacccactgcacgcggaatggcttaccttcactccgtgtgtctcaagtatgaacgcttatgcttttctggatcaattgaaatgtctttcatcttctatgactatgcatgtgtttttcaagcaatacttggtactcgagcatcagagatcataaagcttgttcctttttgtctccatttatcagtcgagggggagtcaccaacgaacgacccacaattggactagagaggagacgtcagttcttcctcctccgctcatacattggaggggaaataccagaagcttggagctctgccctgactttcttgatcggcttgccaactggcttgtattcatcaccgaaaaccatttcttgtcttgagtgtattggtaaataatttctgtcaacctcaagattttccttcagaggataagaaggtgaacaagaagctgacagccaagctgaccctatactcaggatgtgttgtgccttctggtggtgaaaccgtctctttaagcaactgaactgctttaagtataacagaagagctcagtgatttaccctttagaaaatcctctaccttgctagctctgatggcatggtcagctccataagcaccgaacaccaagcatatatcctccatgatgttcttccctgaagctgcatcagttgaagtccttgccaagagagcagcattgacatatgaagcagcattgccaaatggccgaggcgctgcccggaatgtctcaaaggtgatgccatctcaatcccactttgggatgaatatgctgatcagcagggtcctagaatcacatggagactgctgcaagaactcctccaaagtaaggcacaacctttttggaagccgtctggattgtgactgttgtacctgcagccagtagcacagttgctatgtctgactcgaatggcaacctctgcgccatgattatgttgccacctatggttgctgtgttccgaacaaatggcgaagccactttgcttaggtgattggcaatttttctgaagaccagatttccatctgacaacacctcaatggttgtagcctgtagagatggacacaaccgatccaagctcaattcccttaacgctgctgttgatgactgatagctctggtattcctttgatgtcaatgtacttgtcatagaggtcctgatccatgtgtaagggagttcactgccactccccgctcattttttctaaaggagaaatatccatcttcttgttgttttgtaccgttggatactttagcatcattctcatactactaggagtgtaggtaaggagtccacacatgagtttgtaaacaccatgtgtaagggagttcaccaacgtgatgtgcctcacctacaggggtgctgctttgtcaccacccttgtgccttgtccaggtgctacttactagcctcttattttgtttctgaattcaggatcttatgctggtcctacaagtaacattaaagcacttccctccctgttggcattaaaacccctggcgtggttgttgtgttgtactagacaaccatcacttccaatttgttgtagtagctttttcttgctacttcatggatcttgggtcttcggttgttgagttatttgcttcagcaattgggcttctgacttagagcttttggatttgtaagcattgctggttgtcttgaagaagatgatggtgggctcttcccaccactagcagctatagaggaagggga

SEQ ID NO: 84176 - DNA, 2018 bp, Zea Mays
cacaaatttaattggttactgagattttgggactgggtcaacaaatgaaaggtgcatttcaagttttgcttctgtgatgtttccacttttattttcagttatttcacctgttttgctaacttattgtctgaaagtctgactaggctcattatacatatttctatgaaaatgaaactgtatggtagttggttgcagactaattgttgattgtaaaatctaggtaacaaagctgctggaagaaccccattggactaggagaccagggtgaagatagctctgggcactgcacgcggaatggcttaccttcactccatgggtagcggcgggaagttcattcacgggaacatgaagtcaagcaacatccttctctcataggaactcggcgcctgcgtcaccgagttcggccttgcccagctcatgtccacgccccacgtccacccactgcacgcggaatggcttaccttcactccgtgtgtctcaatcgagggggagtcaccaacgaacgacccacaattggagtttgagcaggactagagaggagacgtcagttcttcctcctccgctcatacattggaggggaaataccagaagcttggagctctgccctgactttcttgatcggcttgccaactggcttgtattcatcaccgaaaaccatttcttgtcttgagtgtattggtaaataatttctgtcaacctcaagattttccttcagaggataagaaggtgaacaagaagctgacagccaagctgaccctatactcaggatgtgttgtgccttctggtggtgaaaccgtctctttaagcaactgaactgctttaagtataacagaagagctcagtgatttaccctttagaaaatcctctaccttgctagctctgatggcatggtcagctccataagcaccgaacaccaagcatatatcctccatgatgttcttccctgaagctgcatcagttgaagtccttgccaagagagcagcattgacatatgaagcagcattgccaaatggccgaggcgctgcccggaatgtctcaaaggtgatgccatctcaatcccactttgggatgaatatgctgatcagcagggtcctagaatcacatggagactgctgcaagaactcctccaaagtaaggcacaacctttttggaagccgtctggattgtgactgttgtacctgcagccagtagcacagttgctatgtctgactcgaatggcaacctctgcgccatgattatgttgccacctatggttgctgtgttccgaacaaatggcgaagccactttgcttaggtgattggcaatttttctgaagaccagatttccatctgacaacacctcaatggttgtagcctgtagagatggacacaaccgatccaagctcaattcccttaacgctgctgttgatgactgatagctctggtattcctttgatgtcaatgtacttgtcatagaggtcctgatccatgtgtaagggagttcactgccactccccgctcattttttctaaaggagaaatatccatcttcttgttgttttgtaccgttggatactttagcatcattctcatactactaggagtgtaggtaaggagtccacacatgagtttgtaaacaccatgtgtaagggagttcaccaacgtgatgtgcctcacctacaggggtgctgctttgtcaccacccttgtgccttgtccaggtgctacttactagcctcttattttgtttctgaattcaggatcttatgctggtcctacaagtaacattaaagcacttccctccctgttggcattaaaacccctggcgtggttgttgtgttgtactagacaaccatcacttccaatttgttgtagtagctttttcttgctacttcatggatcttgggtcttcggttgttgagttatttgcttcagcaattgggcttctgacttagagcttttggatttgtaagcattgctggttgtcttgaagaagatgatggtgggctcttcccaccactagcagctatagaggaagggga

SEQ ID NO: 84177 - DNA, 1995 bp, Zea Mays
cacaaatttaattggttactgagattttgggactgggtcaacaaatgaaaggtgcatttcaagttttgcttctgtgatgtttccacttttattttcagttatttcacctgttttgctaacttattgtctgaaagtctgactaggctcattatacatatttctatgaaaatgaaactgtatggtagttggttgcagactaattgttgattgtaaaatctaggtaacaaagctgctggaagaaccccattggactaggagaccagggtgaagatagctctgggcactgcacgcggaatggcttaccttcactccatgggtagcggcgggaagttcattcacgggaacatgaagtcaagcaacatccttctctcataggaactcggcgcctgcgtcaccgagttcggccttgcccagctcatgtccacgccccacgtccacccactgcacgcggaatggcttaccttcactccgtgtgtctcaatcgagggggagtcaccaacgaacgacccacaattggagtttgagcaggactagagaggagactacattggaggggaaataccagaagcttggagctctgccctgactttcttgatcggcttgccaactggcttgtattcatcaccgaaaaccatttcttgtcttgagtgtattggtaaataatttctgtcaacctcaagattttccttcagaggataagaaggtgaacaagaagctgacagccaagctgaccctatactcaggatgtgttgtgccttctggtggtgaaaccgtctctttaagcaactgaactgctttaagtataacagaagagctcagtgatttaccctttagaaaatcctctaccttgctagctctgatggcatggtcagctccataagcaccgaacaccaagcatatatcctccatgatgttcttccctgaagctgcatcagttgaagtccttgccaagagagcagcattgacatatgaagcagcattgccaaatggccgaggcgctgcccggaatgtctcaaaggtgatgccatctcaatcccactttgggatgaatatgctgatcagcagggtcctagaatcacatggagactgctgcaagaactcctccaaagtaaggcacaacctttttggaagccgtctggattgtgactgttgtacctgcagccagtagcacagttgctatgtctgactcgaatggcaacctctgcgccatgattatgttgccacctatggttgctgtgttccgaacaaatggcgaagccactttgcttaggtgattggcaatttttctgaagaccagatttccatctgacaacacctcaatggttgtagcctgtagagatggacacaaccgatccaagctcaattcccttaacgctgctgttgatgactgatagctctggtattcctttgatgtcaatgtacttgtcatagaggtcctgatccatgtgtaagggagttcactgccactccccgctcattttttctaaaggagaaatatccatcttcttgttgttttgtaccgttggatactttagcatcattctcatactactaggagtgtaggtaaggagtccacacatgagtttgtaaacaccatgtgtaagggagttcaccaacgtgatgtgcctcacctacaggggtgctgctttgtcaccacccttgtgccttgtccaggtgctacttactagcctcttattttgtttctgaattcaggatcttatgctggtcctacaagtaacattaaagcacttccctccctgttggcattaaaacccctggcgtggttgttgtgttgtactagacaaccatcacttccaatttgttgtagtagctttttcttgctacttcatggatcttgggtcttcggttgttgagttatttgcttcagcaattgggcttctgacttagagcttttggatttgtaagcattgctggttgtcttgaagaagatgatggtgggctcttcccaccactagcagctatagaggaagggga

SEQ ID NO: 84178 - DNA, 2136 bp, Zea Mays
ttctgttacctacttaatcttcaagaacgacatggacagttgctgctgtcggcagggaagaaaattgaacgttacggtagaaatctaaaaagaagagtatagagaaaagcttggacaagagatagtggcggtcactcactttggtagaaggttactcttgcatgtagtacgtacaggtacagtactatagaacactgtagcaactgacgtcgtcctgggggctcgttagtgcaggcaatgctggcgggaacaggaggaataataccaggcaggcaccggagactagaacggtcatcagttcccaggcaccggagactagaatggacagttgggggtaacaaagctgctggaagaaccccattggactaggagaccagggtgaagatagctctgggcactgcacgcggaatggcttaccttcactccatgggtagcggcgggaagttcattcacgggaacatgaagtcaagcaacatccttctctcataggaactcggcgcctgcgtcaccgagttcggccttgcccagctcatgtccacgccccacgtccacccactgcacgcggaatggcttaccttcactccgtgtgtctcaatcgagggggagtcaccaacgaacgacccacaattggagtttgagcaggactagagaggagacgtcagttcttcctcctccgctcagcagtacattggaggggaaataccagaagcttggagctctgccctgactttcttgatcggcttgccaactggcttgtattcatcaccgaaaaccatttcttgtcttgagtgtattggtaaataatttctgtcaacctcaagattttccttcagaggataagaaggtgaacaagaagctgacagccaagctgaccctatactcaggatgtgttgtgccttctggtggtgaaaccgtctctttaagcaactgaactgctttaagtataacagaagagctcagtgatttaccctttagaaaatcctctaccttgctagctctgatggcatggtcagctccataagcaccgaacaccaagcatatatcctccatgatgttcttccctgaagctgcatcagttgaagtccttgccaagagagcagcattgacatatgaagcagcattgccaaatggccgaggcgctgcccggaatgtctcaaaggtgatgccatctcaatcccactttgggatgaatatgctgatcagcagggtcctagaatcacatggagactgctgcaagaactcctccaaagtaaggcacaacctttttggaagccgtctggattgtgactgttgtacctgcagccagtagcacagttgctatgtctgactcgaatggcaacctctgcgccatgattatgttgccacctatggttgctgtgttccgaacaaatggcgaagccactttgcttaggtgattggcaatttttctgaagaccagatttccatctgacaacacctcaatggttgtagcctgtagagatggacacaaccgatccaagctcaattcccttaacgctgctgttgatgactgatagctctggtattcctttgatgtcaatgtacttgtcatagaggtcctgatccatgtgtaagggagttcactgccactccccgctcattttttctaaaggagaaatatccatcttcttgttgttttgtaccgttggatactttagcatcattctcatactactaggagtgtaggtaaggagtccacacatgagtttgtaaacaccatgtgtaagggagttcaccaacgtgatgtgcctcacctacaggggtgctgctttgtcaccacccttgtgccttgtccaggtgctacttactagcctcttattttgtttctgaattcaggatcttatgctggtcctacaagtaacattaaagcacttccctccctgttggcattaaaacccctggcgtggttgttgtgttgtactagacaaccatcacttccaatttgttgtagtagctttttcttgctacttcatggatcttgggtcttcggttgttgagttatttgcttcagcaattgggcttctgacttagagcttttggatttgtaagcattgctggttgtcttgaagaagatgatggtgggctcttcccaccactagcagctatagaggaagggga

SEQ ID NO: 84179 - DNA, 2041 bp, Zea Mays
atattttttgacacaaatatctgggcatgcagcacaaagccgaccatggcagatgttatcggtttcgatctaggcacaccgaattcatgcatctccgtattggaatgaaagctccatctgctgttctggaggatggaacaacagtggtggtcaagagattgaaggaagtggtggcgggaatgagggaatttgaacagcagatggagctaattggcaaggtttgccagcatcagaacactgtcccattgcgtgcttactactactccaaggatgagaagctcttggtgtatgtcccactaggtagcctttgtgctgctttgcatggtaacaaagctgctggaagaaccccattggactaggagaccagggtgaagatagctctgggcactgcacgcggaatggcttaccttcactccatgggtagcggcgggaagttcattcacgggaacatgaagtcaagcaacatccttctctcataggaactcggcgcctgcgtcaccgagttcggccttgcccagctcatgtccacgccccacgtccacccactgcacgcggaatggcttaccttcactccgtgtgtctcaagcagtacattggaggggaaataccagaagcttggagctctgccctgactttcttgatcggcttgccaactggcttgtattcatcaccgaaaaccatttcttgtcttgagtgtattggtaaataatttctgtcaacctcaagattttccttcagaggataagaaggtgaacaagaagctgacagccaagctgaccctatactcaggatgtgttgtgccttctggtggtgaaaccgtctctttaagcaactgaactgctttaagtataacagaagagctcagtgatttaccctttagaaaatcctctaccttgctagctctgatggcatggtcagctccataagcaccgaacaccaagcatatatcctccatgatgttcttccctgaagctgcatcagttgaagtccttgccaagagagcagcattgacatatgaagcagcattgccaaatggccgaggcgctgcccggaatgtctcaaaggtgatgccatctcaatcccactttgggatgaatatgctgatcagcagggtcctagaatcacatggagactgctgcaagaactcctccaaagtaaggcacaacctttttggaagccgtctggattgtgactgttgtacctgcagccagtagcacagttgctatgtctgactcgaatggcaacctctgcgccatgattatgttgccacctatggttgctgtgttccgaacaaatggcgaagccactttgcttaggtgattggcaatttttctgaagaccagatttccatctgacaacacctcaatggttgtagcctgtagagatggacacaaccgatccaagctcaattcccttaacgctgctgttgatgactgatagctctggtattcctttgatgtcaatgtacttgtcatagaggtcctgatccatgtgtaagggagttcactgccactccccgctcattttttctaaaggagaaatatccatcttcttgttgttttgtaccgttggatactttagcatcattctcatactactaggagtgtaggtaaggagtccacacatgagtttgtaaacaccatgtgtaagggagttcaccaacgtgatgtgcctcacctacaggggtgctgctttgtcaccacccttgtgccttgtccaggtgctacttactagcctcttattttgtttctgaattcaggatcttatgctggtcctacaagtaacattaaagcacttccctccctgttggcattaaaacccctggcgtggttgttgtgttgtactagacaaccatcacttccaatttgttgtagtagctttttcttgctacttcatggatcttgggtcttcggttgttgagttatttgcttcagcaattgggcttctgacttagagcttttggatttgtaagcattgctggttgtcttgaagaagatgatggtgggctcttcccaccactagcagctatagaggaagggga

SEQ ID NO: 84180 - DNA, 2134 bp, Zea Mays
gtttcttcttagttaaataaagtggggcaatattttctcaccgacttgtatggtttgttgcctatgctaatcatctttactgataagacttccaatattttttgacacaaatatctgggcatgcagcacaaagccgaccatggcagatgttatcggtttcgatctaggcacaccgaattcatgcatctccgtattggaatgaaagctccatctgctgttctggaggatggaacaacagtggtggtcaagagattgaaggaagtggtggcgggaatgagggaatttgaacagcagatggagctaattggcaaggtttgccagcatcagaacactgtcccattgcgtgcttactactactccaaggatgagaagctcttggtgtatgtcccactaggtagcctttgtgctgctttgcatggtaacaaagctgctggaagaaccccattggactaggagaccagggtgaagatagctctgggcactgcacgcggaatggcttaccttcactccatgggtagcggcgggaagttcattcacgggaacatgaagtcaagcaacatccttctctcataggaactcggcgcctgcgtcaccgagttcggccttgcccagctcatgtccacgccccacgtccacccactgcacgcggaatggcttaccttcactccgtgtgtctcaatcgagggggagtcaccaacgaacgacccacaattggcagtacattggaggggaaataccagaagcttggagctctgccctgactttcttgatcggcttgccaactggcttgtattcatcaccgaaaaccatttcttgtcttgagtgtattggaggataagaaggtgaacaagaagctgacagccaagctgaccctatactcaggatgtgttgtgccttctggtggtgaaaccgtctctttaagcaactgaactgctttaagtataacagaagagctcagtgatttaccctttagaaaatcctctaccttgctagctctgatggcatggtcagctccataagcaccgaacaccaagcatatatcctccatgatgttcttccctgaagctgcatcagttgaagtccttgccaagagagcagcattgacatatgaagcagcattgccaaatggccgaggcgctgcccggaatgtctcaaaggtgatgccatctcaatcccactttgggatgaatatgctgatcagcagggtcctagaatcacatggagactgctgcaagaactcctccaaagtaaggcacaacctttttggaagccgtctggattgtgactgttgtacctgcagccagtagcacagttgctatgtctgactcgaatggcaacctctgcgccatgattatgttgccacctatggttgctgtgttccgaacaaatggcgaagccactttgcttaggtgattggcaatttttctgaagaccagatttccatctgacaacacctcaatggttgtagcctgtagagatggacacaaccgatccaagctcaattcccttaacgctgctgttgatgactgatagctctggtattcctttgatgtcaatgtacttgtcatagaggtcctgatccatgtgtaagggagttcactgccactccccgctcattttttctaaaggagaaatatccatcttcttgttgttttgtaccgttggatactttagcatcattctcatactactaggagtgtaggtaaggagtccacacatgagtttgtaaacaccatgtgtaagggagttcaccaacgtgatgtgcctcacctacaggggtgctgctttgtcaccacccttgtgccttgtccaggtgctacttactagcctcttattttgtttctgaattcaggatcttatgctggtcctacaagtaacattaaagcacttccctccctgttggcattaaaacccctggcgtggttgttgtgttgtactagacaaccatcacttccaatttgttgtagtagctttttcttgctacttcatggatcttgggtcttcggttgttgagttatttgcttcagcaattgggcttctgacttagagcttttggatttgtaagcattgctggttgtcttgaagaagatgatggtgggctcttcccaccactagcagctatagaggaagggga

SEQ ID NO: 84181 - DNA, 2130 bp, Zea Mays
gtttcttcttagttaaataaagtggggcaatattttctcaccgacttgtatggtttgttgcctatgctaatcatctttactgataagacttccaatattttttgacacaaatatctgggcatgcagcacaaagccgaccatggcagatgttatcggtttcgatctaggcacaccgaattcatgcatctccgtattggaatgaaagctccatctgctgttctggaggatggaacaacagtggtggtcaagagattgaaggaagtggtggcgggaatgagggaatttgaacagcagatggagctaattggcaaggtttgccagcatcagaacactgtcccattgcgtgcttactactactccaaggatgagaagctcttggtgtatgtcccactaggtagcctttgtgctgctttgcatggtaacaaagctgctggaagaaccccattggactaggagaccagggtgaagatagctctgggcactgcacgcggaatggcttaccttcactccatgggtagcggcgggaagttcattcacgggaacatgaagtcaagcaacatccttctctcataggaactcggcgcctgcgtcaccgagttcggccttgcccagctcatgtccacgccccacgtccacccactgcacgcggaatggcttaccttcactccgtgtgtctcaatcgagggggagtcaccaacgaacgacccacaattgtacattggaggggaaataccagaagcttggagctctgccctgactttcttgatcggcttgccaactggcttgtattcatcaccgaaaaccatttcttgtcttgagtgtattggaggataagaaggtgaacaagaagctgacagccaagctgaccctatactcaggatgtgttgtgccttctggtggtgaaaccgtctctttaagcaactgaactgctttaagtataacagaagagctcagtgatttaccctttagaaaatcctctaccttgctagctctgatggcatggtcagctccataagcaccgaacaccaagcatatatcctccatgatgttcttccctgaagctgcatcagttgaagtccttgccaagagagcagcattgacatatgaagcagcattgccaaatggccgaggcgctgcccggaatgtctcaaaggtgatgccatctcaatcccactttgggatgaatatgctgatcagcagggtcctagaatcacatggagactgctgcaagaactcctccaaagtaaggcacaacctttttggaagccgtctggattgtgactgttgtacctgcagccagtagcacagttgctatgtctgactcgaatggcaacctctgcgccatgattatgttgccacctatggttgctgtgttccgaacaaatggcgaagccactttgcttaggtgattggcaatttttctgaagaccagatttccatctgacaacacctcaatggttgtagcctgtagagatggacacaaccgatccaagctcaattcccttaacgctgctgttgatgactgatagctctggtattcctttgatgtcaatgtacttgtcatagaggtcctgatccatgtgtaagggagttcactgccactccccgctcattttttctaaaggagaaatatccatcttcttgttgttttgtaccgttggatactttagcatcattctcatactactaggagtgtaggtaaggagtccacacatgagtttgtaaacaccatgtgtaagggagttcaccaacgtgatgtgcctcacctacaggggtgctgctttgtcaccacccttgtgccttgtccaggtgctacttactagcctcttattttgtttctgaattcaggatcttatgctggtcctacaagtaacattaaagcacttccctccctgttggcattaaaacccctggcgtggttgttgtgttgtactagacaaccatcacttccaatttgttgtagtagctttttcttgctacttcatggatcttgggtcttcggttgttgagttatttgcttcagcaattgggcttctgacttagagcttttggatttgtaagcattgctggttgtcttgaagaagatgatggtgggctcttcccaccactagcagctatagaggaagggga

SEQ ID NO: 84182 - DNA, 3711 bp, Zea Mays
ccccgcccgcgagtttggccacggcgcgcgtcttccccccccccccacgcgtcgcgctgccgtgatgcccgccgcccgcgcaatcgacaccgcccgcgatcccccggcgcgcgtcttccccccccccacacccgcgaatcacgctcgcacgcgtcgcgccgccgtgatgcccgccgcccgcacaatccacagccgcctctgcatccgccgcaagatccccctgcgctcgcatgcccccgctcgcctgcgcctcccacgcccacacacccagccaccgccgaccacgctcgcggatctcgcccacaacaacgcgtgaccgagcccccgccgcgtctccttccatcctcgcgtatacgtcggcgtctccttccatatatgccaacggaggcgaccgcggaggccgctcccccgcgtgcacaacatcccacgttcccctctccccccaggtcctaccgcagcgcgttgctcagtaccccagccactgcccgctagcccccccccccgccacacacacacacccatcctcgccggcctcagcaccgcaaacgacgtccgcgcgtcacttccccgcccttcaatggtgtcctcctccccatcactcgggggcagcaaggcgaccgatggggacgtgtccaacttcactgccttcctccaggcctcaccgaagtcattcgtggtcgtcgagttcttcacccactggtcggcctcctttttcctttttgttctcgttgatacgatgcagctgggctccttcaaaatcgatcggcgtattagttgggatcgggatcgttcaacctgtggctctacacccaaatgattatctcgtctcgcttgtggtgtgggcggtacctgaacaatatagctccagcgattttttggtggttttccagtatgctagggttgttttgttagtttatgctgaggcctattggatggggtggatgcccagttctgtccgagtagcgtgctgcagccatgcttcatcggtacttttagatgtacaagagcaaatatgaagtcaaaaggattgtaaacataatgtcctcggatataagcactatggatgtcaagctaaaaatagcactgtagcaacatgttaaattgtacgttcagtcaaaaacaatttctacaactatgtgtgttctgtatggtgggcctcatcaagtcttacttcatcattatttttcccgaaattgtactaaagtgatatactgatattactgtcaaatttctacataggaagtaacttaatgtatatgcaaccttgggatgatctcaaacttgttgtgtctcactccaaaatgcacaaactctagatttacctgtcaacctgctttggaattttgaactttacattagtaatgatttatccaatttgtcccctcgctgccaacctataaaataagcactttgtgtttgtttgtgtaggtgcaatggtcaccagcccagaaggtcatggtcgacccacgcgatgcaacccaattggatgaagctgggtttaggggccttcttcgttggtttgactgagtttcttcttagttaaataaagtggggcaatattttctcaccgacttgtatggtttgttgcctatgctaatcatctttactgataagacttccaatattttttgacacaaatatctgggcatgcagcacaaagccgaccatggcagatgttatcggtttcgatctaggcacaccgaattcatgcatctccgtattggaatgaaagctccatctgctgttctggaggatggaacaacagtggtggtcaagagattgaaggaagtggtggcgggaatgagggaatttgaacagcagatggagctaattggcaaggtttgccagcatcagaacactgtcccattgcgtgcttactactactccaaggatgagaagctcttggtgtatgtcccactaggtagcctttgtgctgctttgcatggtaacaaagctgctggaagaaccccattggactaggagaccagggtgaagatagctctgggcactgcacgcggaatggcttaccttcactccatgggtagcggcgggaagttcattcacgggaacatgaagtcaagcaacatccttctctcataggaactcggcgcctgcgtcaccgagttcggccttgcccagctcatgtccacgccccacgtccacccactgcacgcggaatggcttaccttcactccgtgtgtctcaatcgagggggagtcaccaacgaacgacccacaattggagtttgagcaggactagagaggagacgtcagttcttcctcctccgctcagcagtacattggaggggaaataccagaagcttggagctctgccctgactttcttgatcggcttgccaactggcttgtattcatcaccgaaaaccatttcttgtcttgagtgtattggaggataagaaggtgaacaagaagctgacagccaagctgaccctatactcaggatgtgttgtgccttctggtggtgaaaccgtctctttaagcaactgaactgctttaagtataacagaagagctcagtgatttaccctttagaaaatcctctaccttgctagctctgatggcatggtcagctccataagcaccgaacaccaagcatatatcctccatgatgttcttccctgaagctgcatcagttgaagtccttgccaagagagcagcattgacatatgaagcagcattgccaaatggccgaggcgctgcccggaatgtctcaaaggtgatgccatctcaatcccactttgggatgaatatgctgatcagcagggtcctagaatcacatggagactgctgcaagaactcctccaaagtaaggcacaacctttttggaagccgtctggattgtgactgttgtacctgcagccagtagcacagttgctatgtctgactcgaatggcaacctctgcgccatgattatgttgccacctatggttgctgtgttccgaacaaatggcgaagccactttgcttaggtgattggcaatttttctgaagaccagatttccatctgacaacacctcaatggttgtagcctgtagagatggacacaaccgatccaagctcaattcccttaacgctgctgttgatgactgatagctctggtattcctttgatgtcaatgtacttgtcatagaggtcctgatccatgtgtaagggagttcactgccactccccgctcattttttctaaaggagaaatatccatcttcttgttgttttgtaccgttggatactttagcatcattctcatactactaggagtgtaggtaaggagtccacacatgagtttgtaaacaccatgtgtaagggagttcaccaacgtgatgtgcctcacctacaggggtgctgctttgtcaccacccttgtgccttgtccaggtgctacttactagcctcttattttgtttctgaattcaggatcttatgctggtcctacaagtaacattaaagcacttccctccctgttggcattaaaacccctggcgtggttgttgtgttgtactagacaaccatcacttccaatttgttgtagtagctttttcttgctacttcatggatcttgggtcttcggttgttgagttatttgcttcagcaattgggcttctgacttagagcttttggatttgtaagcattgctggttgtcttgaagaagatgatggtgggctcttcccaccactagcagctatagaggaagggga

SEQ ID NO: 84183 - DNA, 3409 bp, Zea Mays
ccccgcccgcgagtttggccacggcgcgcgtcttccccccccccccacgcgtcgcgctgccgtgatgcccgccgcccgcgcaatcgacaccgcccgcgatcccccggcgcgcgtcttccccccccccacacccgcgaatcacgctcgcacgcgtcgcgccgccgtgatgcccgccgcccgcacaatccacagccgcctctgcatccgccgcaagatccccctgcgctcgcatgcccccgctcgcctgcgcctcccacgcccacacacccagccaccgccgaccacgctcgcggatctcgcccacaacaacgcgtgaccgagcccccgccgcgtctccttccatcctcgcgtatacgtcggcgtctccttccatatatgccaacggaggcgaccgcggaggccgctcccccgcgtgcacaacatcccacgttcccctctccccccaggtcctaccgcagcgcgttgctcagtaccccagccactgcccgctagcccccccccccgccacacacacacacccatcctcgccggcctcagcaccgcaaacgacgtccgcgcgtcacttccccgcccttcaatggtgtcctcctccccatcactcgggggcagcaaggcgaccgatggggacgtgtccaacttcactgccttcctccaggcctcaccgaagtcattcgtggtcgtcgagttcttcacccactggtcggcctcctttttcctttttgttctcgttgatacgatgcagctgggctccttcaaaatcgatcggcgtattagttgggatcgggatcgttcaacctgtggctctacacccaaatgattatctcgtctcgcttgtggtgtgggcggtacctgaacaatatagctccagcgattttttggtggttttccagtatgctagggttgttttgttagtttatgctgaggcctattggatggggtggatgcccagttctgtccgagtagcgtgctgcagccatgcttcatcggtacttttagatgtacaagagcaaatatgaagtcaaaaggattgtaaacataatgtcctcggatataagcactatggatgtcaagctaaaaatagcactgtagcaacatgttaaattgtacgttcagtcaaaaacaatttctacaactatgtgtgttctgtatggtgggcctcatcaagtcttacttcatcattatttttcccgaaattgtactaaagtgatatactgatattactgtcaaatttctacataggaagtaacttaatgtatatgcaaccttgggatgatctcaaacttgttgtgtctcactccaaaatgcacaaactctagatttacctgtcaacctgctttggaattttgaactttacattagtaatgatttatccaatttgtcccctcgctgccaacctataaaataagcactttgtgtttgtttgtgtaggtgcaatggtcaccagcccagaaggtcatggtcgacccacgcgatgcaacccaattggatgaagctgggtttaggggccttcttcgttggtttgactgagtttcttcttagttaaataaagtggggcaatattttctcaccgacttgtatggtttgttgcctatgctaatcatctttactgataagacttccaatattttttgacacaaatatctgggcatgcagcacaaagccgaccatggcagatgttatcggtttcgatctaggcacaccgaattcatgcatctccgtattggaatgaaagctccatctgctgttctggaggatggaacaacagtggtggtcaagagattgaaggaagtggtggcgggaatgagggaatttgaacagcagatggagctaattggcaaggtttgccagcatcagaacactgtcccattgcgtgcttactactactccaaggatgagaagctcttggtgtatgtcccactaggtagcctttgtgctgctttgcatggtaacaaagctgctggaagaaccccattggactaggagaccagggtgaagatagctctgggcactgcacgcggaatggcttaccttcactccatgggtagcggcgggaagttcattcacgggaacatgaagtcaagcaacatccttctctcataggaactcggcgcctgcgtcaccgagttcggccttgcccagctcatgtccacgccccacgtccacccactgcacgcggaatggcttaccttcactccgtgtgtctcaatcgagggggagtcaccaacgaacgacccacaattggcagtacattggaggggaaataccagaagcttggagctctgccctgactttcttgatcggcttgccaactggcttgtattcatcaccgaaaaccatttcttgtcttgagtgtattggaggataagaaggtgaacaagaagctgacagccaagctgaccctatactcaggatgtgttgtgccttctggtggtgaaaccgtctctttaagcaactgaactgctttaagtataacagaagagctcagtgatttaccctttagaaaatcctctaccttgctagctctgatggcatggtcagctccataagcaccgaacaccaagcatatatcctccatgatgttcttccctgaagctgcatcagttgaagtccttgccaagagagcagcattgacatatgaagcagcattgccaaatggccgaggcgctgcccggaatgtctcaaaggtgatgccatctcaatcccactttgggatgaatatgctgatcagcagggtcctagaatcacatggagactgctgcaagaactcctccaaagtaaggcacaacctttttggaagccgtctggattgtgactgttgtacctgcagccagtagcacagttgctatgtctgactcgaatggcaacctctgcgccatgattatgttgccacctatggttgctgtgttccgaacaaatggcgaagccactttgcttaggtgattggcaatttttctgaagaccagatttccatctgacaacacctcaatggttgtagcctgtagagatggacacaaccgatccaagctcaattcccttaacgctgctgttgatgactgatagctctggtattcctttgatgtcaatgtacttgtcatagaggtcctgatccatgtgtaagggagttcactgccactccccgctcattttttctaaaggagaaatatccatcttcttgttgttttgtaccgttggatactttagcatcattctcatactactaggagtgtaggtaaggagtccacacatgagtttgtaaacaccatgtgtaagggagttcaccaacgtgatgtgcctcacctacaggggtgctgctttgtcaccacccttgtgccttgtccagcattgctggttgtcttgaagaagatgatggtgggctcttcccaccactagcagctatagaggaagggga

SEQ ID NO: 84184 - DNA, 3405 bp, Zea Mays
ccccgcccgcgagtttggccacggcgcgcgtcttccccccccccccacgcgtcgcgctgccgtgatgcccgccgcccgcgcaatcgacaccgcccgcgatcccccggcgcgcgtcttccccccccccacacccgcgaatcacgctcgcacgcgtcgcgccgccgtgatgcccgccgcccgcacaatccacagccgcctctgcatccgccgcaagatccccctgcgctcgcatgcccccgctcgcctgcgcctcccacgcccacacacccagccaccgccgaccacgctcgcggatctcgcccacaacaacgcgtgaccgagcccccgccgcgtctccttccatcctcgcgtatacgtcggcgtctccttccatatatgccaacggaggcgaccgcggaggccgctcccccgcgtgcacaacatcccacgttcccctctccccccaggtcctaccgcagcgcgttgctcagtaccccagccactgcccgctagcccccccccccgccacacacacacacccatcctcgccggcctcagcaccgcaaacgacgtccgcgcgtcacttccccgcccttcaatggtgtcctcctccccatcactcgggggcagcaaggcgaccgatggggacgtgtccaacttcactgccttcctccaggcctcaccgaagtcattcgtggtcgtcgagttcttcacccactggtcggcctcctttttcctttttgttctcgttgatacgatgcagctgggctccttcaaaatcgatcggcgtattagttgggatcgggatcgttcaacctgtggctctacacccaaatgattatctcgtctcgcttgtggtgtgggcggtacctgaacaatatagctccagcgattttttggtggttttccagtatgctagggttgttttgttagtttatgctgaggcctattggatggggtggatgcccagttctgtccgagtagcgtgctgcagccatgcttcatcggtacttttagatgtacaagagcaaatatgaagtcaaaaggattgtaaacataatgtcctcggatataagcactatggatgtcaagctaaaaatagcactgtagcaacatgttaaattgtacgttcagtcaaaaacaatttctacaactatgtgtgttctgtatggtgggcctcatcaagtcttacttcatcattatttttcccgaaattgtactaaagtgatatactgatattactgtcaaatttctacataggaagtaacttaatgtatatgcaaccttgggatgatctcaaacttgttgtgtctcactccaaaatgcacaaactctagatttacctgtcaacctgctttggaattttgaactttacattagtaatgatttatccaatttgtcccctcgctgccaacctataaaataagcactttgtgtttgtttgtgtaggtgcaatggtcaccagcccagaaggtcatggtcgacccacgcgatgcaacccaattggatgaagctgggtttaggggccttcttcgttggtttgactgagtttcttcttagttaaataaagtggggcaatattttctcaccgacttgtatggtttgttgcctatgctaatcatctttactgataagacttccaatattttttgacacaaatatctgggcatgcagcacaaagccgaccatggcagatgttatcggtttcgatctaggcacaccgaattcatgcatctccgtattggaatgaaagctccatctgctgttctggaggatggaacaacagtggtggtcaagagattgaaggaagtggtggcgggaatgagggaatttgaacagcagatggagctaattggcaaggtttgccagcatcagaacactgtcccattgcgtgcttactactactccaaggatgagaagctcttggtgtatgtcccactaggtagcctttgtgctgctttgcatggtaacaaagctgctggaagaaccccattggactaggagaccagggtgaagatagctctgggcactgcacgcggaatggcttaccttcactccatgggtagcggcgggaagttcattcacgggaacatgaagtcaagcaacatccttctctcataggaactcggcgcctgcgtcaccgagttcggccttgcccagctcatgtccacgccccacgtccacccactgcacgcggaatggcttaccttcactccgtgtgtctcaatcgagggggagtcaccaacgaacgacccacaattgtacattggaggggaaataccagaagcttggagctctgccctgactttcttgatcggcttgccaactggcttgtattcatcaccgaaaaccatttcttgtcttgagtgtattggaggataagaaggtgaacaagaagctgacagccaagctgaccctatactcaggatgtgttgtgccttctggtggtgaaaccgtctctttaagcaactgaactgctttaagtataacagaagagctcagtgatttaccctttagaaaatcctctaccttgctagctctgatggcatggtcagctccataagcaccgaacaccaagcatatatcctccatgatgttcttccctgaagctgcatcagttgaagtccttgccaagagagcagcattgacatatgaagcagcattgccaaatggccgaggcgctgcccggaatgtctcaaaggtgatgccatctcaatcccactttgggatgaatatgctgatcagcagggtcctagaatcacatggagactgctgcaagaactcctccaaagtaaggcacaacctttttggaagccgtctggattgtgactgttgtacctgcagccagtagcacagttgctatgtctgactcgaatggcaacctctgcgccatgattatgttgccacctatggttgctgtgttccgaacaaatggcgaagccactttgcttaggtgattggcaatttttctgaagaccagatttccatctgacaacacctcaatggttgtagcctgtagagatggacacaaccgatccaagctcaattcccttaacgctgctgttgatgactgatagctctggtattcctttgatgtcaatgtacttgtcatagaggtcctgatccatgtgtaagggagttcactgccactccccgctcattttttctaaaggagaaatatccatcttcttgttgttttgtaccgttggatactttagcatcattctcatactactaggagtgtaggtaaggagtccacacatgagtttgtaaacaccatgtgtaagggagttcaccaacgtgatgtgcctcacctacaggggtgctgctttgtcaccacccttgtgccttgtccagcattgctggttgtcttgaagaagatgatggtgggctcttcccaccactagcagctatagaggaagggga

SEQ ID NO: 84185 - DNA, 1513 bp, Zea Mays
ctcatgtctacagaaaacggccaactgggcacagttccaattgactcgattaatcaatgtatattgttgttggggatgagccctttcttctacgtcatggacaaaattttcatccttttgtagttcgagcagcagaaaatgttcaacaagcattagtccatgcaaaattgtctggcaagatgaaggtggtagtaccttgcagtgctgacacattccagaatgcatctactctgcccacgaaagctagcttcagacctgatgttaacaagaccatggcagatctcctctcatttcttgctaacagcagttctccatttatggtcgagctggatccattcttgagctttcaacacaacagaaatttgtcattggactattttcttttccaactaatgtctcatcctgtaaaagatggcgaaaacaagtatgacaactacgttgatgcaagcatagatgctctggttacttctctaaccaaagctggcttcagtgacatggacatcattgttgggagagcaggatggccaacagatggagccatgaacgcaactcctgctattgctcaatcattcatgactggcctagtcaaccacctggccaaaaagtctgggactccacttcgcccaaaagtccctccagttgagatgtatctcttcagccttttagatgaagatcaacggagtatagctagtggaggctatgaaaggcaccatggcatttttacctttgatggccaggcaaagtactatgccaacataggtcaaggtcctaaatcgctcaagaatgcccctgatgtcaattaccttccatcaaaatggtgtgtggtagacaacaacaaggatttgtccaatgtttcttctagtttctcgtcagcttgcgccaatggcgactgcacttctctgttacctggtggctcctgctcaggtcttgcctggcctggcaatgtgtcatacgcgttcaacaactactaccagcagcatgatcagagtgaggatagttgctacttcaatggcctaggtttgataactactgtcgatccatctgtcgacaattgtttgtttcctctcacaattcacgtttctgccgccacttctttgcacctaacattgcccgtgtcgctgttattagttttgtggttttgcattgtctgtatatagtctgatgaggctatagattgagccttcaaaagtgtttcgttgggcctcttgttgaatgtactccaaagtctcggtgcaccatcagacgtattcctagaatggcacaatctggctatcagaactggtaggtttagtccaaatgtaatgatgtgttctaaagtagtcgggctgagtcaaacagcagcttcttctcttgttcaaaattttgaacctggtaatgttgtcatttcatgatagatcatagatacattcttggtttcactatatcttagaaagtccagccaacagaagtactcaagtacaggtgaacctttcagtttagctggagacctgggcagcagtgtacaaagtctaat

SEQ ID NO: 84186 - DNA, 1383 bp, Zea Mays
gtaaacagacacttccgtttttattgtccaccctccgccgccggcgtctctccaaaacccaaccaaaccctagatccgccgcactcagttccggtgagaccctcctttccagcgaaaatgccgaacctcgagtgccggatgtatgagcagcggttcccggaggtggacgccgcggtgatgatccaggtgaagcacatcgctgacatgggcgcgtacgtctcgttgctcgagtacaacaacatcgagggcatgatcctcttctccgagctctcccgccgtcgtatccgctccatctcctccctcatcaaggttggccgccaggagcccgccatcgtgctccgtgtcgaccgcgacaagggctacatcgacctttcgaagcgtcgcgtctccgaggaggaggcgcacgcatgcgaggacaggtacaacaagtccaagctcgtgcactccatcatgcgccacgtcgccgagacgctcgagatcgacctcgagccgctctaccagcggattggctggccgctctaccgcaagtacggccacgccttcgaggccttcaagctcatagttgccgaccctgacgccatcctcgacgcactcacctatgaggagaaggaggtcggcccggatggccaggaggattctctggttaagaacataaggaggaggatgacaccacagcctctcaagatccgtgctgatatagagatgaaatgcttccagtttgatggagtgctccatattaagcaagctatgaagaaagctgaagctgcgggcaatgataactgtcctgtgaagattaagctagttgctcctccactttatgttttgaccacacagacccttgacaaggatcaaggcatttcagttctcactactgcagtcaaggcttgtacagcagagattgaaaagtacaaaggaaagttagtagtgaaggaaccaccaagagctgttagtgagcgggaagacaagctattcctcgaccagattgattccctaatggagcaaaacgcagaggtcgatggtgatgctgacagtgaagaggaggaagatacaggaatgggggacgtcgacattacaaattctggcgtcgctgcttactaaggctacactggttgatttggatgagctttgctgtacagcaccagctaagttctaagccgttctgtttggaagcagtttctttctgttaggttttggtgaattcgctgaaactcgttacctgcgttgttaatgttttgggctcagccggtgttggggtagcgtttacttctgtcgagaatcaccaattttttcttgggactgaaaacaaagcccgttgctataagtgtttatattcacttcatatacgcaagtttggcttcgtgctgcctattcgaattggccttc

SEQ ID NO: 84187 - DNA, 1413 bp, Zea Mays
gtaaacagacacttccgtttttattgtccaccctccgccgccggcgtctctccaaaacccaaccaaaccctagatccgccgcactcagttccggtgagaccctcctttccagcgaaaatgccgaacctcgagtgccggatgtatgagcagcggttcccggaggtggacgccgcggtgatgatccaggtgaagcacatcgctgacatgggcgcgtacgtctcgttgctcgagtacaacaacatcgagggcatgatcctcttctccgagctctcccgccgtcgtatccgctccatctcctccctcatcaaggttggccgccaggagcccgccatcgtgctccgtgtcgaccgcgacaagggctacatcgacctttcgaagcgtcgcgtctccgaggaggaggcgcacgcatgcgaggacaggtacaacaagtccaagctcgtgcactccatcatgcgccacgtcgccgagacgctcgagatcgacctcgagccgctctaccagcggattggctggccgctctaccgcaagtacggccacgccttcgaggccttcaagctcatagttgccgaccctgacgccatcctcgacgcactcacctatgaggagaaggaggtcggcccggatggccaggaggtggtgcctgctgtcacccccgaggttaaggattctctggttaagaacataaggaggaggatgacaccacagcctctcaagatccgtgctgatatagagatgaaatgcttccagtttgatggagtgctccatattaagcaagctatgaagaaagctgaagctgcgggcaatgataactgtcctgtgaagattaagctagttgctcctccactttatgttttgaccacacagacccttgacaaggatcaaggcatttcagttctcactactgcagtcaaggcttgtacagcagagattgaaaagtacaaaggaaagttagtagtgaaggaaccaccaagagctgttagtgagcgggaagacaagctattcctcgaccagattgattccctaatggagcaaaacgcagaggtcgatggtgatgctgacagtgaagaggaggaagatacaggaatgggggacgtcgacattacaaattctggcgtcgctgcttactaaggctacactggttgatttggatgagctttgctgtacagcaccagctaagttctaagccgttctgtttggaagcagtttctttctgttaggttttggtgaattcgctgaaactcgttacctgcgttgttaatgttttgggctcagccggtgttggggtagcgtttacttctgtcgagaatcaccaattttttcttgggactgaaaacaaagcccgttgctataagtgtttatattcacttcatatacgcaagtttggcttcgtgctgcctattcgaattggccttc

SEQ ID NO: 84188 - DNA, 905 bp, Zea Mays
gtaaacagacacttccgtttttattgtccaccctccgccgccggcgtctctccaaaacccaaccaaaccctagatccgccgcactcagttccggtgagaccctcctttccagcgaaaatgccgaacctcgagtgccggatgtatgagcagcggttcccggaggtggacgccgcggtgatgatccaggtgaagcacatcgctgacatgggcgcgtacgtctcgttgctcgagtacaacaacatcgagggcatgatcctcttctccgagctctcccgccgtcgtatccgctccatctcctccctcatcaaggttggccgccaggagcccgccatcgtgctccgtgtcgaccgcgacaagggctacatcgacctttcgaagcgtcgcgtctccgaggaggaggcgcacgcatgcgaggacaggtacaacaagtccaagctcgtgcactccatcatgcgccacgtcgccgagacgctcgagatcgacctcgagccgctctaccagcggattggctggccgctctaccgcaagtacggccacgccttcgaggccttcaagctcatagttgccgaccctgacgccatcctcgacgcactcacctatgaggagaaggaggtgactaaggtggtgcctgctgtcacccccgaggttaaggattctctggttaagaacataaggaggaggatgacaccacagcctctcaagatccgtgctgatatagagatgaaatgcttccagtttgatggagtgctccatattaagcaagctatgaagaaagctgaagctgcgggcaatgataactgtcctgtgaagattaagctagttgctcctccactttatgttttgaccacacagacccttgacaagccttttgcagggtgttcaattgcacaaaatgcagtgaccag

SEQ ID NO: 84189 - DNA, 1179 bp, Zea Mays
gttactttgttgaaatatattatgaattttttctatatgtatttgtatagaactatttgagacaaggatatgcttaaaattactggtaggtgactaaggtggtgcctgctgtcacccccgaggttaaggattctctggttaagaacataaggaggaggatgacaccacagcctctcaagatccgtgctgatatagagatgaaatgcttccagtttgatggagtgctccatattaagcaagctatgaagaaagctgaagctgcgggcaatgataactgtcctgtgaagattaagctagttgctcctccactttatgttttgaccacacagacccttgacaaggttggcattatcttagtacttaataatatgtgtgagcaatttgttatagccgagttatttgataaagtttcatatgtgctcaagcccattctcctcaaatttgtgattacaattttacatcaaacataatgtttgagacttttgaggattgagagtgcatgtttcaattgatcctcatctattttttgggcaaattgatcctcatctattatgtgttctaaattagatatacattacgtccaaatccagtctgcacttatatgttgctaagaatggttgtggctttccaatagttattgtgtcgcttgttctgtttacggatacttctgatcttttgcctcctcaatccttattgggaaagggcctgatttactgtttagccttttgcagggtgttcaattgcacaaaatgcagtgaccagactttaatagtgcagtattatctgcactatctatagtgcaataatctgtcaaaatggttcttatcaatgcggttcacaattattgactacacaaaatgcaattctctgccaaatttgcagtattatctggttccagacttctcatggttcttatcaacatggttcacaatttgtttaccttcgttcacgttgtttgcattgcttatctaacgaaacacctgttttgccctttactatgttgtagtatgatacttgtacatgcatcattttttatatttatccccacatattgcaattcgctcgattttttattttagtatcaaccctagaattatggttaaggctgtatcatatccttcaatgtccagaaaataatgaccattgtttttcttctgtgttgctctttgaacaggatca

SEQ ID NO: 84190 - DNA, 2797 bp, Zea Mays
tggtttatcccttctccagaacccactcatgtggtcaaaactcatattgggacgatgacacacatagcatgcagctctcatttggagttgatgagtttttgataattgctccgctgagtgccagtggtgtgatcctcgatgatccagaatcaactaagcttttgagttctgtagcaattgctctttctaattgtggcagcgtttgtaccagttcacgacccttcacggaaagcctatatagggattcaaaatctgggaactgtatttactcgaagatttgaagctgaccgaattggtagtcaagtgccaataagactcatgcatctggaggggttacatgagctatttctgtcaaaatttgtcctatcctcgtcagattttccagctagggtaaaggttcacttctcaatgaagcttagctacaagaccccagaatatgatcatgataatgaaactttagattctgaagctactgagccattgactgaaaatgaagttgtgaaccaccctagaaaactatgggacgatgattgcccttgggcagagtggtactctgctgaggatcctgttaaaggttttgagttgactgccatctggggagagaggacatttgaagagacccttgagatggctgaagtggaaaatgcctcgtcctttgatgctgatagctggttccttcacccagttgtatctcgatacatggtagatgattctattggaaaatttgttgggtttgcatcccagctacatcttctagtaaatgcatatgaatcatcagtggaggcacaatttctagaagactttgttgcaggtagcagatacttcaggccaggataatgcaaaatctactgctactgtgcctccaccatcagttattgatcgtgttatgaaagatcttttcagtgatgagactggcaactatatggaagcagaaaacaagtatagtcgtgctatgcgaggtgcacctgcagattcactttttggccagttctgtttgcatgcactgtggtttggcaactgcaatatatgcgcaattgctacactatggattgattttgtgcgggaaattcgttggtgctgggaggaatcagaaagattgcctaggatgaaaagcacttcaagcattgatctctcttcttgtcttatccaccaaaagttacaaatgctcacgatatgcattgagaggaagagatcactgaaccgtgagaaaggtactggctacaaagatgagacttcaaatagtacggcagtgaacaagtctaggaaaggatcagctggtgttgtgcctaaaatgatgctcctgaatacgtttcaggaaatgcatgctccatatactcaggatgcacctttgatgaccgaagatatgcatgaagaaaggctccatgcagctgaagcttttggcaatgccattggtctatctggacagctggaaagggatatattatgttccgatatgtctgcttttaaagctgcaaacccagatgctgtctttgaagattttattcggtggcattcacctggtgaatggttgagcgaggacaaaacagatggtaatgcaggctggcctcccaaaggaaagctttctcaccgtatgtcccaacatgggaatgtgtggcgcaaaatctggaatgatgctctgccattgcctgtttctgaacagaagtctttgcttgaccctgttcgggaaggagaaaaggtgcttcattaccttgaaactttaaggccacagcagctccttgaacaaatggtgtgtacagctttcaaatcatcagctgatatcctgaataagaccatgtatggtggcttcaaggaaatgaagacaaaaatggatcgactatatgtcaccatggcgtcaacactgaaatcttttctagggaattctgatgtcaatgatttggttggaggcctgaaacggctttgtcaagtttttgagcacatcgagaagttactgattcttgctgcttccatcaatcggaagcttattgatgctccacgactagctcaagcaatattttacgactactacaacttctaccttccaaaaatgggaactagcctggaaagcatttgctatgagaaggagttcacaactaaggaaaaggtcgggatgtatgagagagatgctgtgtcgaacctgtttcctccccctactgctaatcagtcttggaggaaagttttgagcatgggaaatcttctgaacggccatgaaccgatgcaaagggaaatcatattctcagtccaggagagaataagcaacggtcattattcgagcccaaccccattatgtaccaacaatgagaagatccagacacataggatgtatatatctgggacatctaatgacctttgggttgcattgtctgtaacgtcctgggattgagctgcacgatgtatgagaggagcaattggtgttttaattagcttagaatcccgttggtgcagataaactatcattgtattttttttttgttggatgtaccagaagtccagaaggggccaccaggacatggctagtgacgcactgaggacaagcatccatttttgacatcagatcaaagtattgattatttacgtcttgtagcagtcagaactcagaaatgctaatatattcttggcttcctctagagaaatggttgtagacaagctctatttggctgacgtttttggtctgttaggtggtgggctggtgagttgcaacacacacactggggttgatgtacgtaaacatcttgtatgacttttgcaatgagctaggctttgttcaatactcgagtccatgaaattttcaatatttgat

SEQ ID NO: 84191 - DNA, 3000 bp, Zea Mays
gatctaacgggaacgcgtctcacagcttccacgcgactgcaccgtgccacccgaggctcgcccccgctgagccagcggagcgaatctccatggcctccacatcctcctccaggtacgcgaaacatcgtcggatcggagaggacgatgagttggaggaggttgaggaggaggccgaagaggagcttgagcggttcgatgatttcaccattgcttcgtcatgggaaaagtttatatctgagatagaggctatttgccgtcaatggcttgcagatggcgcaaagatcttaatgcaaaaaggtgcagagggtgttcctccttttgaaaacttatatatgatcaagcgtgaattgaagcatgggaaaagagtctattctatggagtaccatttcatgaaatctgcaaaaggtcaaaactcatattgggacgatgacacacatagcatgcagctctcatttggagttgatgagtttttgataattgctccgctgagtgccagtggtgtgatcctcgatgatccagaatcaactaagcttttgagttctgtagcaattgctctttctaattgtggcaggttagtcctatcctcgtcagattttccagctagggtaaaggttcacttctcaatgaagcttagctacaagaccccagaatatgatcatgataatgaaactttagattctgaagctactgagccattgactgaaaatgaagttgtgaaccaccctagaaaactatgggacgatgattgcccttgggcagagtggtactctgctgaggatcctgttaaaggttttgagttgactgccatctggggagagaggacatttgaagagacccttgagatggctgaagtggaaaatgcctcgtcctttgatgctgatagctggttccttcacccagttgtatctcgatacatatgattctattggaaaatttgttgggtttgcatcccagctacatcttctagtaaatgcatatgaatcatcagtggaggcacaatttctagaagactttgttgcagatacttcaggccaggataatgcaaaatctactgctactgtgcctccaccatcagttattgatcgtgttatgaaagatcttttcagtgatgagactggcaactatatggaagcagaaaacaagtatagtcgtgctatgcgaggtgcacctgcagattcactttttggccagttctgtttgcatgcactgtggtttggcaactgcaatatatgcgcaattgctacactatggattgattttgtgcgggaaattcgttggtgctgggaggaatcagaaagattgcctaggatgaaaagcacttcaagcattgatctctcttcttgtcttatccaccaaaagttacaaatgctcacgatatgcattgagaggaagagatcactgaaccgtgagaaaggtactggctacaaagatgagacttcaaatagtacggcagtgaacaagtctaggaaaggatcagctggtgttgtgcctaaaatgatgctcctgaatacgtttcaggaaatgcatgctccatatactcaggatgcacctttgatgaccgaagatatgcatgaagaaaggctccatgcagctgaagcttttggcaatgccattggtctatctggacagctggaaagggatatattatgttccgatatgtctgcttttaaagctgcaaacccagatgctgtctttgaagattttattcggtggcattcacctggtgaatggttgagcgaggacaaaacagatggtaatgcaggctggcctcccaaaggaaagctttctcaccgtatgtcccaacatgggaatgtgtggcgcaaaatctggaatgatgctctgccattgcctgtttctgaacagaagtctttgcttgaccctgttcgggaaggagaaaaggtgcttcattaccttgaaactttaaggccacagcagctccttgaacaaatggtgtgtacagctttcaaatcatcagctgatatcctgaataagaccatgtatggtggcttcaaggaaatgaagacaaaaatggatcgactatatgtcaccatggcgtcaacactgaaatcttttctagggaattctgatgtcaatgatttggttggaggcctgaaacggctttgtcaagtttttgagcacatcgagaagttactgattcttgctgcttccatcaatcggaagcttattgatgctccacgactagctcaagcaatattttacgactactacaacttctaccttccaaaaatgggaactagcctggaaagcatttgctatgagaaggagttcacaactaaggaaaaggtcgggatgtatgagagagatgctgtgtcgaacctgtttcctccccctactgctaatcagtcttggaggaaagttttgagcatgggaaatcttctgaacggccatgaaccgatgcaaagggaaatcatattctcagtccaggagagaataagcaacggtcattattcgagcccaaccccattatgtaccaacaatgagaagatccagacacataggatgtatatatctgggacatctaatgacctttgggttgcattgtctgtaacgtcctgggattgagctgcacgatgtatgagaggagcaattggtgttttaattagcttagaatcccgttggtgcagataaactatcattgtattttttttttgttggatgtaccagaagtccagaaggggccaccaggacatggctagtgacgcactgaggacaagcatccatttttgacatcagatcaaagtattgattatttacgtcttgtagcagtcagaactcagaaatgctaatatattcttggcttcctctagagaaatggttgtagacaagctctatttggctgacgtttttggtctgttaggtggtgggctggtgagttgcaacacacacactggggttgatgtacgtaaacatcttgtatgacttttgcaatgagctaggctttgttcaatactcgagtccatgaaattttcaatatttgat

SEQ ID NO: 84192 - DNA, 3146 bp, Zea Mays
gctcaccccctcccccttgccgatctaacgggaacgcgtctcacagcttccacgcgactgcaccgtgccacccgaggctcgcccccgctgagccagcggagcgaatctccatggcctccacatcctcctccaggtacgcgaaacatcgtcggatcggagaggacgatgagttggaggaggttgaggaggaggccgaagaggagcttgagcggttcgatgatttcaccattgcttcgtcatgggaaaagtttatatctgagatagaggctatttgccgtcaatggcttgcagatggcgcaaagatcttaatgcaaaaaggtgcagagggtgttcctccttttgaaaacttatatatgatcaagcgtgaattgaagcatgggaaaagagtctattctatggagtaccatttcatgaaatctgcaaaaggtcaaaactcatattgggacgatgacacacatagcatgcagctctcatttggagttgatgagtttttgataattgctccgctgagtgccagtggtgtgatcctcgatgatccagaatcaactaagcttttgagttctgtagcaattgctctttctaattgtggcagcaattggccagcgtttgtaccagttcacgacccttcacggaaagcctatatagggattcaaaatctgggaactgtatttactcgaagatttgaagctgaccgaattggtagtcaagtgccaataagactcatgcatctggaggggttacatgagctatttctgtcaaaatttgtcctatcctcgtcagattttccagctagggtaaaggttcacttctcaatgaagcttagctacaagaccccagaatatgatcatgataatgaaactttagattctgaagctactgagccattgactgaaaatgaagttgtgaaccaccctagaaaactatgggacgatgattgcccttgggcagagtggtactctgctgaggatcctgttaaaggttttgagttgactgccatctggggagagaggacatttgaagagacccttgagatggctgaagtggaaaatgcctcgtcctttgatgctgatagctggttccttcacccagttgtatctcgatacatggtagatgattctattggaaaatttgttgggtttgcatcccagctacatcttctagtagcagatacttcaggccaggataatgcaaaatctactgctactgtgcctccaccatcagttattgatcgtgttatgaaagatcttttcagtgatgagactggcaactatatggaagcagaaaacaagtatagtcgtgctatgcgaggtgcacctgcagattcactttttggccagttctgtttgcatgcactgtggtttggcaactgcaatatatgcgcaattgctacactatggattgattttgtgcgggaaattcgttggtgctgggaggaatcagaaagattgcctaggatgaaaagcacttcaagcattgatctctcttcttgtcttatccaccaaaagttacaaatgctcacgatatgcattgagaggaagagatcactgaaccgtgagaaaggtactggctacaaagatgagacttcaaatagtacggcagtgaacaagtctaggaaaggatcagctggtgttgtgcctaaaatgatgctcctgaatacgtttcaggaaatgcatgctccatatactcaggatgcacctttgatgaccgaagatatgcatgaagaaaggctccatgcagctgaagcttttggcaatgccattggtctatctggacagctggaaagggatatattatgttccgatatgtctgcttttaaagctgcaaacccagatgctgtctttgaagattttattcggtggcattcacctggtgaatggttgagcgaggacaaaacagatggtaatgcaggctggcctcccaaaggaaagctttctcaccgtatgtcccaacatgggaatgtgtggcgcaaaatctggaatgatgctctgccattgcctgtttctgaacagaagtctttgcttgaccctgttcgggaaggagaaaaggtgcttcattaccttgaaactttaaggccacagcagctccttgaacaaatggtgtgtacagctttcaaatcatcagctgatatcctgaataagaccatgtatggtggcttcaaggaaatgaagacaaaaatggatcgactatatgtcaccatggcgtcaacactgaaatcttttctagggaattctgatgtcaatgatttggttggaggcctgaaacggctttgtcaagtttttgagcacatcgagaagttactgattcttgctgcttccatcaatcggaagcttattgatgctccacgactagctcaagcaatattttacgactactacaacttctaccttccaaaaatgggaactagcctggaaagcatttgctatgagaaggagttcacaactaaggaaaaggtcgggatgtatgagagagatgctgtgtcgaacctgtttcctccccctactgctaatcagtcttggaggaaagttttgagcatgggaaatcttctgaacggccatgaaccgatgcaaagggaaatcatattctcagtccaggagagaataagcaacggtcattattcgagcccaaccccattatgtaccaacaatgagaagatccagacacataggatgtatatatctgggacatctaatgacctttgggttgcattgtctgtaacgtcctgggattgagctgcacgatgtatgagaggagcaattggtgttttaattagcttagaatcccgttggtgcagataaactatcattgtattttttttttgttggatgtaccagaagtccagaaggggccaccaggacatggctagtgacgcactgaggacaagcatccatttttgacatcagatcaaagtattgattatttacgtcttgtagcagtcagaactcagaaatgctaatatattcttggcttcctctagagaaatggttgtagacaagctctatttggctgacgtttttggtctgttaggtggtgggctggtgagttgcaacacacacactggggttgatgtacgtaaacatcttgtatgacttttgcaatgagctaggctttgttcaatactcgagtccatgaaattttcaatatttgat

SEQ ID NO: 84193 - DNA, 3032 bp, Zea Mays
gtcgcggctcaccccctcccccttgccgatctaacgggaacgcgtctcacagcttccacgcgactgcaccgtgccacccgaggctcgcccccgctgagccagcggagcgaatctccatggcctccacatcctcctccaggtacgcgaaacatcgtcggatcggagaggacgatgagttggaggaggttgaggaggaggccgaagaggagcttgagcggttcgatgatttcaccattgcttcgtcatgggaaaagtttatatctgagatagaggctatttgccgtcaatggcttgcagatggcgcaaagatcttaatgcaaaaaggtgcagagggtgttcctccttttgaaaacttatatatgatcaagcgtgaattgaagcatgggaaaagagtctattctatggagtaccatttcatgaaatctgcaaaaggtcaaaactcatattgggacgatgacacacatagcatgcagctctcatttggagttgatgagtttttgataattgctccgctgagtgccagtggtgtgatcctcgatgatccagaatcaactaagcttttgagttctgtagcaattgctctttctaattgtggcaggttagtcctatcctcgtcagattttccagctagggtaaaggttcacttctcaatgaagcttagctacaagaccccagaatatgatcatgataatgaaactttagattctgaagctactgagccattgactgaaaatgaagttgtgaaccaccctagaaaactatgggacgatgattgcccttgggcagagtggtactctgctgaggatcctgttaaaggttttgagttgactgccatctggggagagaggacatttgaagagacccttgagatggctgaagtggaaaatgcctcgtcctttgatgctgatagctggttccttcacccagttgtatctcgatacatggtagatgattctattggaaaatttgttgggtttgcatcccagctacatcttctagtaaatgcatatgaatcatcagtggaggcacaatttctagaagactttgttgcagatacttcaggccaggataatgcaaaatctactgctactgtgcctccaccatcagttattgatcgtgttatgaaagatcttttcagtgatgagactggcaactatatggaagcagaaaacaagtatagtcgtgctatgcgaggtgcacctgcagattcactttttggccagttctgtttgcatgcactgtggtttggcaactgcaatatatgcgcaattgctacactatggattgattttgtgcgggaaattcgttggtgctgggaggaatcagaaagattgcctaggatgaaaagcacttcaagcattgatctctcttcttgtcttatccaccaaaagttacaaatgctcacgatatgcattgagaggaagagatcactgaaccgtgagaaaggtactggctacaaagatgagacttcaaatagtacggcagtgaacaagtctaggaaaggatcagctggtgttgtgcctaaaatgatgctcctgaatacgtttcaggaaatgcatgctccatatactcaggatgcacctttgatgaccgaagatatgcatgaagaaaggctccatgcagctgaagcttttggcaatgccattggtctatctggacagctggaaagggatatattatgttccgatatgtctgcttttaaagctgcaaacccagatgctgtctttgaagattttattcggtggcattcacctggtgaatggttgagcgaggacaaaacagatggtaatgcaggctggcctcccaaaggaaagctttctcaccgtatgtcccaacatgggaatgtgtggcgcaaaatctggaatgatgctctgccattgcctgtttctgaacagaagtctttgcttgaccctgttcgggaaggagaaaaggtgcttcattaccttgaaactttaaggccacagcagctccttgaacaaatggtgtgtacagctttcaaatcatcagctgatatcctgaataagaccatgtatggtggcttcaaggaaatgaagacaaaaatggatcgactatatgtcaccatggcgtcaacactgaaatcttttctagggaattctgatgtcaatgatttggttggaggcctgaaacggctttgtcaagtttttgagcacatcgagaagttactgattcttgctgcttccatcaatcggaagcttattgatgctccacgactagctcaagcaatattttacgactactacaacttctaccttccaaaaatgggaactagcctggaaagcatttgctatgagaaggagttcacaactaaggaaaaggtcgggatgtatgagagagatgctgtgtcgaacctgtttcctccccctactgctaatcagtcttggaggaaagttttgagcatgggaaatcttctgaacggccatgaaccgatgcaaagggaaatcatattctcagtccaggagagaataagcaacggtcattattcgagcccaaccccattatgtaccaacaatgagaagatccagacacataggatgtatatatctgggacatctaatgacctttgggttgcattgtctgtaacgtcctgggattgagctgcacgatgtatgagaggagcaattggtgttttaattagcttagaatcccgttggtgcagataaactatcattgtattttttttttgttggatgtaccagaagtccagaaggggccaccaggacatggctagtgacgcactgaggacaagcatccatttttgacatcagatcaaagtattgattatttacgtcttgtagcagtcagaactcagaaatgctaatatattcttggcttcctctagagaaatggttgtagacaagctctatttggctgacgtttttggtctgttaggtggtgggctggtgagttgcaacacacacactggggttgatgtacgtaaacatcttgtatgacttttgcaatgagctaggctttgttcaatactcgagtccatgaaattttcaatatttgat

SEQ ID NO: 84194 - DNA, 3015 bp, Zea Mays
gagaactcggaccgtcggtcgacgaggcatcggccatcgacgcaacactctcctccgcttcccttctcctcagtcgcggctcaccccctcccccttgccgatctaacgggaacgcgtctcacagcttccacgcgactgcaccgtgccacccgaggctcgcccccgctgagccagcggagcgaatctccatggcctccacatcctcctccaggtacgcgaaacatcgtcggatcggagaggacgatgagttggaggaggttgaggaggaggccgaagaggagcttgagcggttcgatgatttcaccattgcttcgtcatgggaaaagtttatatctgagatagaggctatttgccgtcaatggcttgcagatggcgcaaagatcttaatgcaaaaaggtgcagagggtgttcctccttttgaaaacttatatatgatcaagcgtgaattgaagcatgggaaaagagtctattctatggagtaccatttcatgaaatctgcaaaaggtcaaaactcatattgggacgatgacacacatagcatgcagctctcatttggagttgatgagtttttgataattgctccgctgagtgccagtggtgtgatcctcgatgatccagaatcaactaagcttttgagttctgtagcaattgctctttctaattgtggcagcaattggccagcgtttgtaccagttcacgacccttcacggaaagcctatatagggattcaaaatctgggaactgtatttactcgaagatttgaagctgaccgaattggtagtcaagtgccaataagactcatgcatctggaggggttacatgagctatttctgtcaaaatttgtcctatcctcgtcagattttccagctagggtaaaggttcacttctcaatgaagcttagctacaagaccccagaatatgatcatgataatgaaactttagattctgaagctactgagccattgactgaaaatgaagttgtgaaccaccctagaaaactatgggacgatgattgcccttgggcagagtggtactctgctgaggatcctgttaaaggttttgagttgactgccatctggggagagaggacatttgaagagacccttgagatggctgaagtggaaaatgcctcgtcctttgatgctgatagctggttccttcacccagttgtatctcgatacatggtagatgattctattggaaaatttgttgggtttgcatcccagctacatcttctagtaaatgcatatgaatcatcagtggaggcacaatttctagaagactttgttgcagatacttcaggccaggataatgcaaaatctactgctactgtgcctccaccatcagttattgatcgtgttatgaaagatcttttcagtgatgctcacgatatgcattgagaggaagagatcactgaaccgtgagaaaggtactggctacaaagatgagacttcaaatagtacggcagtgaacaagtctaggaaaggatcagctggtgttgtgcctaaaatgatgctcctgaatacgtttcaggaaatgcatgctccatatactcaggatgcacctttgatgaccgaagatatgcatgaagaaaggctccatgcagctgaagcttttggcaatgccattggtctatctggacagctggaaagggatatattatgttccgatatgtctgcttttaaagctgcaaacccagatgctgtctttgaagattttattcggtggcattcacctggtgaatggttgagcgaggacaaaacagatggtaatgcaggctggcctcccaaaggaaagctttctcaccgtatgtcccaacatgggaatgtgtggcgcaaaatctggaatgatgctctgccattgcctgtttctgaacagaagtctttgcttgaccctgttcgggaaggagaaaaggtgcttcattaccttgaaactttaaggccacagcagctccttgaacaaatggtgtgtacagctttcaaatcatcagctgatatcctgaataagaccatgtatggtggcttcaaggaaatgaagacaaaaatggatcgactatatgtcaccatggcgtcaacactgaaatcttttctagggaattctgatgtcaatgatttggttggaggcctgaaacggctttgtcaagtttttgagcacatcgagaagttactgattcttgctgcttccatcaatcggaagcttattgatgctccacgactagctcaagcaatattttacgactactacaacttctaccttccaaaaatgggaactagcctggaaagcatttgctatgagaaggagttcacaactaaggaaaaggtcgggatgtatgagagagatgctgtgtcgaacctgtttcctccccctactgctaatcagtcttggaggaaagttttgagcatgggaaatcttctgaacggccatgaaccgatgcaaagggaaatcatattctcagtccaggagagaataagcaacggtcattattcgagcccaaccccattatgtaccaacaatgagaagatccagacacataggatgtatatatctgggacatctaatgacctttgggttgcattgtctgtaacgtcctgggattgagctgcacgatgtatgagaggagcaattggtgttttaattagcttagaatcccgttggtgcagataaactatcattgtattttttttttgttggatgtaccagaagtccagaaggggccaccaggacatggctagtgacgcactgaggacaagcatccatttttgacatcagatcaaagtattgattatttacgtcttgtagcagtcagaactcagaaatgctaatatattcttggcttcctctagagaaatggttgtagacaagctctatttggctgacgtttttggtctgttaggtggtgggctggtgagttgcaacacacacactggggttgatgtacgtaaacatcttgtatgacttttgcaatgagctaggctttgttcaatactcgagtccatgaaattttcaatatttgat

SEQ ID NO: 84195 - DNA, 3342 bp, Zea Mays
agaagcacgaacagagaactcggaccgtcggtcgacgaggcatcggccatcgacgcaacactctcctccgcttcccttctcctcagtcgcggctcaccccctcccccttgccgatctaacgggaacgcgtctcacagcttccacgcgactgcaccgtgccacccgaggctcgcccccgctgagccagcggagcgaatctccatggcctccacatcctcctccaggtacgcgaaacatcgtcggatcggagaggacgatgagttggaggaggttgaggaggaggccgaagaggagcttgagcggttcgatgatttcaccattgcttcgtcatgggaaaagtttatatctgagatagaggctatttgccgtcaatggcttgcagatggcgcaaagatcttaatgcaaaaaggtgcagagggtgttcctccttttgaaaacttatatatgatcaagcgtgaattgaagcatgggaaaagagtctattctatggagtaccatttcatgaaatctgcaaaaggtcaaaactcatattgggacgatgacacacatagcatgcagctctcatttggagttgatgagtttttgataattgctccgctgagtgccagtggtgtgatcctcgatgatccagaatcaactaagcttttgagttctgtagcaattgctctttctaattgtggcagcaattggccagcgtttgtaccagttcacgacccttcacggaaagcctatatagggattcaaaatctgggaactgtatttactcgaagatttgaagctgaccgaattggtagtcaagtgccaataagactcatgcatctggaggggttacatgagctatttctgtcaaaatttgtcctatcctcgtcagattttccagctagggtaaaggttcacttctcaatgaagcttagctacaagaccccagaatatgatcatgataatgaaactttagattctgaagctactgagccattgactgaaaatgaagttgtgaaccaccctagaaaactatgggacgatgattgcccttgggcagagtggtactctgctgaggatcctgttaaaggttttgagttgactgccatctggggagagaggacatttgaagagacccttgagatggctgaagtggaaaatgcctcgtcctttgatgctgatagctggttccttcacccagttgtatctcgatacatggtagatgattctattggaaaatttgttgggtttgcatcccagctacatcttctagtaaatgcatatgaatcatcagtggaggcacaatttctagaagactttgttgcagatacttcaggccaggataatgcaaaatctactgctactgtgcctccaccatcagttattgatcgtgttatgaaagatcttttcagtgatgagactggcaactatatggaagcagaaaacaagtatagtcgtgctatgcgaggtgcacctgcagattcactttttggccagttctgtttgcatgcactgtggtttggcaactgcaatatatgcgcaattgctacactatggattgattttgtgcgggaaattcgttggtgctgggaggaatcagaaagattgcctaggatgaaaagcacttcaagcattgatctctcttcttgtcttatccaccaaaagttacaaatgctcacgatatgcattgagaggaagagatcactgaaccgtgagaaaggtactggctacaaagatgagacttcaaatagtacggcagtgaacaagtctaggaaaggatcagctggtgttgtgcctaaaatgatgctcctgaatacgtttcaggaaatgcatgctccatatactcaggttctgtttgcccttttcttcaggtttaatattgtgatccacatgcacccccttatgtttccattagttccttaggatgcacctttgatgaccgaagatatgcatgaagaaaggctccatgcagctgaagcttttggcaatgccattggtctatctggacagctggaaagggatatattatgttccgctgcaaacccagatgctgtctttgaagattttattcggtggcattcacctggtgaatggttgagcgaggacaaaacagatggtaatgcaggctggcctcccaaaggaaagctttctcaccgtatgtcccaacatgggaatgtgtggcgcaaaatctggaatgatgctctgccattgcctgtttctgaacagaagtctttgcttgaccctgttcgggaaggagaaaaggtgcttcattaccttgaaactttaaggccacagcagctccttgaacaaatggtgtgtacagctttcaaatcatcagctgatatcctgaataagaccatgtatggtggcttcaaggaaatgaagacaaaaatggatcgactatatgtcaccatggcgtcaacactgaaatcttttctagggaattctgatgtcaatgatttggttggaggcctgaaacggctttgtcaagtttttgagcacatcgagaagttactgattcttgctgcttccatcaatcggaagcttattgatgctccacgactagctcaagcaatattttacgactactacaacttctaccttccaaaaatgggaactagcctggaaagcatttgctatgagaaggagttcacaactaaggaaaaggtcgggatgtatgagagagatgctgtgtcgaacctgtttcctccccctactgctaatcagtcttggaggaaagttttgagcatgggaaatcttctgaacggccatgaaccgatgcaaagggaaatcatattctcagtccaggagagaataagcaacggtcattattcgagcccaaccccattatgtaccaacaatgagaagatccagacacataggatgtatatatctgggacatctaatgacctttgggttgcattgtctgtaacgtcctgggattgagctgcacgatgtatgagaggagcaattggtgttttaattagcttagaatcccgttggtgcagataaactatcattgtattttttttttgttggatgtaccagaagtccagaaggggccaccaggacatggctagtgacgcactgaggacaagcatccatttttgacatcagatcaaagtattgattatttacgtcttgtagcagtcagaactcagaaatgctaatatattcttggcttcctctagagaaatggttgtagacaagctctatttggctgacgtttttggtctgttaggtggtgggctggtgagttgcaacacacacactggggttgatgtacgtaaacatcttgtatgacttttgcaatgagctaggctttgttcaatactcgagtccatgaaattttcaatatttgat

SEQ ID NO: 84196 - DNA, 3236 bp, Zea Mays
caatcaccgtcaccagaagcacgaacagagaactcggaccgtcggtcgacgaggcatcggccatcgacgcaacactctcctccgcttcccttctcctcagtcgcggctcaccccctcccccttgccgatctaacgggaacgcgtctcacagcttccacgcgactgcaccgtgccacccgaggctcgcccccgctgagccagcggagcgaatctccatggcctccacatcctcctccaggtacgcgaaacatcgtcggatcggagaggacgatgagttggaggaggttgaggaggaggccgaagaggagcttccatgccttgttgggtaccatttgccacactgtttcgattgggagcatcaaaaaggtgcagagggtgttcctccttttgaaaacttatatatgatcaagcgtgaattgaagcatgggaaaagagtctattctatggagtaccatttcatgaaatctgcaaaaggtgagtttatttggttaaactataatactttcagcaagcttgtagaagggcagacctggtgatgtagaagggcagaccatttcatgaaatcgaagcagcctcttcacatttgcggagggaagacttgccttggtttatcccttctccagaacccactcatgtggtaggctttggaactaggtcaaaactcatattgggacgatgacacacatagcatgcagctctcatttggagttgatgagtttttgataattgctccgctgagtgccagtggtgtgatcctcgatgatccagaatcaactaagcttttgagttctgtagcaattgctctttctaattgtggcagcgtttgtaccagttcacgacccttcacggaaagcctatatagggattcaaaatctgggaactgtatttactcgaagatttgaagctgaccgaattggtagtcaagtgccaataagactcatgcatctggaggggttacatgagctatttctgtcaaaatttgtcctatcctcgtcagattttccagctagggtaaaggttcacttctcaatgaagcttagctacaagaccccagaatatgatcatgataatgaaactttagattctgaagctactgagccattgactgaaaatgaagttgtgaaccaccctagaaaactatgggacgatgattgcccttgggcagagtggtactctgctgaggatcctgttaaaggttttgagttgactgccatctggggagagaggacatttgaagagacccttgagatggctgaagtggaaaatgcctcgtcctttgatgctgatagctggttccttcacccagttgtatctcgatacatggtagatgattctattggaaaatttgttgggtttgcatcccagctacatcttctagtaaatgcatatgaatcatcagtggaggcacaatttctagaagactttgttgcaggtagcagatacttcaggccaggataatgcaaaatctactgctactgtgcctccaccatcagttattgatcgtgttatgaaagatcttttcagtgatgctcacgatatgcattgagaggaagagatcactgaaccgtgagaaaggtactggctacaaagatgagacttcaaatagtacggcagtgaacaagtctaggaaaggatcagctggtgttgtgcctaaaatgatgctcctgaatacgtttcaggaaatgcatgctccatatactcaggttctgtttgcccttttcttcaggtttaatattgtgatccacatgcacccccttatgtttccattagttccttaggatgcacctttgatgaccgaagatatgcatgaagaaaggctccatgcagctgaagcttttggcaatgccattggtctatctggacagctggaaagggatatattatgttccgatatgtctgcttttaaagctgcaaacccagatgctgtctttgaagattttattcggtggcattcacctggtgaatggttgagcgaggacaaaacagatggtaatgcaggctggcctcccaaaggaaagctttctcaccgtatgtcccaacatgggaatgtgtggcgcaaaatctggaatgatgctctgccattgcctgtttctgaacagaagtctttgcttgaccctgttcgggaaggagaaaaggtgcttcattaccttgaaactttaaggccacagcagctccttgaacaaatggtgtgtacagctttcaaatcatcagctgatatcctgaataagaccatgtatggtggcttcaaggaaatgaagacaaaaatggatcgactatatgtcaccatggcgtcaacactgaaatcttttctagggaattctgatgtcaatgatttggttggaggcctgaaacggctttgtcaagtttttgagcacatcgagaagttactgattcttgctgcttccatcaatcggaagcttattgatgctccacgactagctcaagcaatattttacgactactacaacttctaccttccaaaaatgggaactagcctggaaagcatttgctatgagaaggagttcacaactaaggaaaaggtcgggatgtatgagagagatgctgtgtcgaacctgtttcctccccctactgctaatcagtcttggaggaaagttttgagcatgggaaatcttctgaacggccatgaaccgatgcaaagggaaatcatattctcagtccaggagagaataagcaacggtcattattcgagcccaaccccattatgtaccaacaatgagaagatccagacacataggatgtatatatctgggacatctaatgacctttgggttgcattgtctgtaacgtcctgggattgagctgcacgatgtatgagaggagcaattggtgttttaattagcttagaatcccgttggtgcagataaactatcattgtattttttttttgttggatgtaccagaagtccagaaggggccaccaggacatggctagtgacgcactgaggacaagcatccatttttgacatcagatcaaagtattgattatttacgtcttgtagcagtcagaactcagaaatgctaatatattcttggcttcctctagagaaatggttgtagacaagctctatttggctgacgtttttggtctgttaggtggtgggctggtgagttgcaacacacacactggggttgatgtacgtaaacatcttgtatgacttttgcaatgagctaggctttgttcaatactcgagtccatgaaattttcaatatttgat

SEQ ID NO: 84197 - DNA, 3289 bp, Zea Mays
acaatcaccgtcaccagaagcacgaacagagaactcggaccgtcggtcgacgaggcatcggccatcgacgcaacactctcctccgcttcccttctcctcagtcgcggctcaccccctcccccttgccgatctaacgggaacgcgtctcacagcttccacgcgactgcaccgtgccacccgaggctcgcccccgctgagccagcggagcgaatctccatggcctccacatcctcctccaggtacgcgaaacatcgtcggatcggagaggacgatgagttggaggaggttgaggaggaggccgaagaggagcttgagcggttcgatgatttcaccattgcttcgtcatgggaaaagtttatatctgagatagaggctatttgccgtcaatggcttgcagatggcgcaaagatcttaatgcaaaaaggtgcagagggtgttcctccttttgaaaacttatatatgatcaagcgtgaattgaagcatgggaaaagagtctattctatggagtaccatttcatgaaatctgcaaaaggtcaaaactcatattgggacgatgacacacatagcatgcagctctcatttggagttgatgagtttttgataattgctccgctgagtgccagtggtgtgatcctcgatgatccagaatcaactaagcttttgagttctgtagcaattgctctttctaattgtggcagcgtttgtaccagttcacgacccttcacggaaagcctatatagggattcaaaatctgggaactgtatttactcgaagatttgaagctgaccgaattggtagtcaagtgccaataagactcatgcatctggaggggttacatgagctatttctgtcaaaatttgtcctatcctcgtcagattttccagctagggtaaaggttcacttctcaatgaagcttagctacaagaccccagaatatgatcatgataatgaaactttagattctgaagctactgagccattgactgaaaatgaagttgtgaaccaccctagaaaactatgggacgatgattgcccttgggcagagtggtactctgctgaggatcctgttaaaggttttgagttgactgccatctggggagagaggacatttgaagagacccttgagatggctgaagtggaaaatgcctcgtcctttgatgctgatagctggttccttcacccagttgtatctcgatacatggtagatgattctattggaaaatttgttgggtttgcatcccagctacatcttctagtaaatgcatatgaatcatcagtggaggcacaatttctagaagactttgttgcagatacttcaggccaggataatgcaaaatctactgctactgtgcctccaccatcagttattgatcgtgttatgaaagatcttttcagtgatgagactggcaactatatggaagcagaaaacaagtatagtcgtgctatgcgaggtgcacctgcagattcactttttggccagttctgtttgcatgcactgtggtttggcaactgcaatatatgcgcaattgctacactatggattgattttgtgcgggaaattcgttggtgctgggaggaatcagaaagattgcctaggatgaaaagcacttcaagcattgatctctcttcttgtcttatccaccaaaagttacaaatgctcacgatatgcattgagaggaagagatcactgaaccgtgagaaaggtactggctacaaagatgagacttcaaatagtacggcagtgaacaagtctaggaaaggatcagctggtgttgtgcctaaaatgatgctcctgaatacgtttcaggaaatgcatgctccatatactcaggatgcacctttgatgaccgaagatatgcatgaagaaaggctccatgcagctgaagcttttggcaatgccattggtctatctggacagctggaaagggatatattatgttccgatatgtctgcttttaaagctgcaaacccagatgctgtctttgaagattttattcggtggcattcacctggtgaatggttgagcgaggacaaaacagatggtaatgcaggctggcctcccaaaggaaagctttctcaccgtatgtcccaacatgggaatgtgtggcgcaaaatctggaatgatgctctgccattgcctgtttctgaacagaagtctttgcttgaccctgttcgggaaggagaaaaggtgcttcattaccttgaaactttaaggccacagcagctccttgaacaaatggtgtgtacagctttcaaatcatcagctgatatcctgaataagaccatgtatggtggcttcaaggaaatgaagacaaaaatggatcgactatatgtcaccatggcgtcaacactgaaatcttttctagggaattctgatgtcaatgatttggttggaggcctgaaacggctttgtcaagtttttgagcacatcgagaagttactgattcttgctgcttccatcaatcggaagcttattgatgctccacgactagctcaagcaatattttacgactactacaacttctaccttccaaaaatgggaactagcctggaaagcatttgctatgagaaggagttcacaactaaggaaaaggtcgggatgtatgagagagatgctgtgtcgaacctgtttcctccccctactgctaatcagtcttggaggaaagttttgagcatgggaaatcttctgaacggccatgaaccgatgcaaagggaaatcatattctcagtccaggagagaataagcaacggtcattattcgagcccaaccccattatgtaccaacaatgagaagatccagacacataggatgtatatatctgggacatctaatgacctttgggttgcattgtctgtaacgtcctgggattgagctgcacgatgtatgagaggagcaattggtgttttaattagcttagaatcccgttggtgcagataaactatcattgtattttttttttgttggatgtaccagaagtccagaaggggccaccaggacatggctagtgacgcactgaggacaagcatccatttttgacatcagatcaaagtattgattatttacgtcttgtagcagtcagaactcagaaatgctaatatattcttggcttcctctagagaaatggttgtagacaagctctatttggctgacgtttttggtctgttaggtggtgggctggtgagttgcaacacacacactggggttgatgtacgtaaacatcttgtatgacttttgcaatgagctaggctttgttcaatactcgagtccatgaaattttcaatatttgat

SEQ ID NO: 84198 - DNA, 3330 bp, Zea Mays
ccacaatcaccgtcaccagaagcacgaacagagaactcggaccgtcggtcgacgaggcatcggccatcgacgcaacactctcctccgcttcccttctcctcagtcgcggctcaccccctcccccttgccgatctaacgggaacgcgtctcacagcttccacgcgactgcaccgtgccacccgaggctcgcccccgctgagccagcggagcgaatctccatggcctccacatcctcctccaggtacgcgaaacatcgtcggatcggagaggacgatgagttggaggaggttgaggaggaggccgaagaggagcttgagcggttcgatgatttcaccattgcttcgtcatgggaaaagtactgcaaatctgcaataatgcttacagtttatatctgagatagaggctatttgccgtcaatggcttgcagatggcgcaaagatcttaatgcaaaaaggtgcagagggtgttcctccttttgaaaacttatatatgatcaagcgtgaattgaagcatgggaaaagagtctattctatggagtaccatttcatgaaatctgcaaaaggtcaaaactcatattgggacgatgacacacatagcatgcagctctcatttggagttgatgagtttttgataattgctccgctgagtgccagtggtgtgatcctcgatgatccagaatcaactaagcttttgagttctgtagcaattgctctttctaattgtggcagcaattggccagcgtttgtaccagttcacgacccttcacggaaagcctatatagggattcaaaatctgggaactgtatttactcgaagatttgaagctgaccgaattggtagtcaagtgccaataagactcatgcatctggaggggttacatgagctatttctgtcaaaatttgtcctatcctcgtcagattttccagctagggtaaaggttcacttctcaatgaagcttagctacaagaccccagaatatgatcatgataatgaaactttagattctgaagctactgagccattgactgaaaatgaagttgtgaaccaccctagaaaactatgggacgatgattgcccttgggcagagtggtactctgctgaggatcctgttaaaggttttgagttgactgccatctggggagagaggacatttgaagagacccttgagatggctgaagtggaaaatgcctcgtcctttgatgctgatagctggttccttcacccagttgtatctcgatacatggtagatgattctattggaaaatttgttgggtttgcatcccagctacatcttctagtaaatgcatatgaatcatcagtggaggcacaatttctagaagactttgttgcagatacttcaggccaggataatgcaaaatctactgctactgtgcctccaccatcagttattgatcgtgttatgaaagatcttttcagtgatgagactggcaactatatggaagcagaaaacaagtatagtcgtgctatgcgaggtgcacctgcagattcactttttggccagttctgtttgcatgcactgtggtttggcaactgcaatatatgcgcaattgctacactatggattgattttgtgcgggaaattcgttggtgctgggaggaatcagaaagattgcctaggatgaaaagcacttcaagcattgatctctcttcttgtcttatccaccaaaagttacaaatgctcacgatatgcattgagaggaagagatcactgaaccgtgagaaaggtactggctacaaagatgagacttcaaatagtacggcagtgaacaagtctaggaaaggatcagctggtgttgtgcctaaaatgatgctcctgaatacgtttcaggaaatgcatgctccatatactcaggatgcacctttgatgaccgaagatatgcatgaagaaaggctccatgcagctgaagcttttggcaatgccattggtctatctggacagctggaaagggatatattatgttccgatatgtctgcttttaaagctgcaaacccagatgctgtctttgaagattttattcggtggcattcacctggtgaatggttgagcgaggacaaaacagatggtaatgcaggctggcctcccaaaggaaagctttctcaccgtatgtcccaacatgggaatgtgtggcgcaaaatctggaatgatgctctgccattgcctgtttctgaacagaagtctttgcttgaccctgttcgggaaggagaaaaggtgcttcattaccttgaaactttaaggccacagcagctccttgaacaaatggtgtgtacagctttcaaatcatcagctgatatcctgaataagaccatgtatggtggcttcaaggaaatgaagacaaaaatggatcgactatatgtcaccatggcgtcaacactgaaatcttttctagggaattctgatgtcaatgatttggttggaggcctgaaacggctttgtcaagtttttgagcacatcgagaagttactgattcttgctgcttccatcaatcggaagcttattgatgctccacgactagctcaagcaatattttacgactactacaacttctaccttccaaaaatgggaactagcctggaaagcatttgctatgagaaggagttcacaactaaggaaaaggtcgggatgtatgagagagatgctgtgtcgaacctgtttcctccccctactgctaatcagtcttggaggaaagttttgagcatgggaaatcttctgaacggccatgaaccgatgcaaagggaaatcatattctcagtccaggagagaataagcaacggtcattattcgagcccaaccccattatgtaccaacaatgagaagatccagacacataggatgtatatatctgggacatctaatgacctttgggttgcattgtctgtaacgtcctgggattgagctgcacgatgtatgagaggagcaattggtgttttaattagcttagaatcccgttggtgcagataaactatcattgtattttttttttgttggatgtaccagaagtccagaaggggccaccaggacatggctagtgacgcactgaggacaagcatccatttttgacatcagatcaaagtattgattatttacgtcttgtagcagtcagaactcagaaatgctaatatattcttggcttcctctagagaaatggttgtagacaagctctatttggctgacgtttttggtctgttaggtggtgggctggtgagttgcaacacacacactggggttgatgtacgtaaacatcttgtatgacttttgcaatgagctaggctttgttcaatactcgagtccatgaaattttcaatatttgat

SEQ ID NO: 84199 - DNA, 3588 bp, Zea Mays
ccacaatcaccgtcaccagaagcacgaacagagaactcggaccgtcggtcgacgaggcatcggccatcgacgcaacactctcctccgcttcccttctcctcagtcgcggctcaccccctcccccttgccgatctaacgggaacgcgtctcacagcttccacgcgactgcaccgtgccacccgaggctcgcccccgctgagccagcggagcgaatctccatggcctccacatcctcctccaggtacgcgaaacatcgtcggatcggagaggacgatgagttggaggaggttgaggaggaggccgaagaggagcttgagcggttcgatgatttcaccattgcttcgtcatgggaaaagtttatatctgagatagaggctatttgccgtcaatggcttgcagatggcgcaaagatcttaatgcaaaaaggtgcagagggtgttcctccttttgaaaacttatatatgatcaagcgtgaattgaagcatgggaaaagagtctattctatggagtaccatttcatgaaatctgcaaaaggtcaaaactcatattgggacgatgacacacatagcatgcagctctcatttggagttgatgagtttttgataattgctccgctgagtgccagtggtgtgatcctcgatgatccagaatcaactaagcttttgagttctgtagcaattgctctttctaattgtggcagcaattggccagcgtttgtaccagttcacgacccttcacggaaagcctatatagggattcaaaatctgggaactgtatttactcgaagatttgaagctgaccgaattggtagtcaagtgccaataagactcatgcatctggaggggttacatgagctatttctgtcaaaatttgtcctatcctcgtcagattttccagctagggtaaaggttcacttctcaatgaagcttagctacaagaccccagaatatgatcatgataatgaaactttagattctgaagctactgagccattgactgaaaatgaagttgtgaaccaccctagaaaactatgggacgatgattgcccttgggcagagtggtactctgctgaggatcctgttaaaggttttgagttgactgccatctggggagagaggacatttgaagagacccttgagatggctgaagtggaaaatgcctcgtcctttgatgctgatagctggttccttcacccagttgtatctcgatacatggtagatgattctattggaaaatttgttgggtttgcatcccagctacatcttctagtaaatgcatatgaatcatcagtggaggcacaatttctagaagactttgttgcagatacttcaggccaggataatgcaaaatctactgctactgtgcctccaccatcagttattgatcgtgttatgaaagatcttttcagtgatgagactggcaactatatggaagcagaaaacaagtatagtcgtgctatgcgaggtgcacctgcagattcactttttggccagttctgtttgcatgcactgtggtttggcaactgcaatatatgcgcaattgctacactatggattgattttgtgcgggaaattcgttggtgctgggaggaatcagaaagattgcctaggatgaaaagcacttcaagcattgatctctcttcttgtcttatccaccaaaagttacaaatgctcacgatatgcattgagaggaagagatcactgaaccgtgagaaaggtactggctacaaagatgagacttcaaatagtacggcagtgaacaagtctaggaaaggatcagctggtgttgtgcctaaaatgatgctcctgaatacgtttcaggaaatgcatgctccatatactcaggttctgtttgcccttttcttcaggtttaatattgtgatccacatgcacccccttatgtttccattagttccttaggatgcacctttgatgaccgaagatatgcatgaagaaaggctccatgcagctgaagcttttggcaatgccattggtctatctggacagctggaaagggatatattatgttccggtaagattttgtgggaacaacatgacatttcacttgttacataacttgttaatgtttctcgagtctatcttcaggaattttcttttacttcatctaatttatgagcaatgaccaaagcttttgaagaagttattctacttttcctctttgttgcatgtattgtggaactttttcatttgctactaattaggaagctctgctccttgattagatatgtctgcttttaaagctgcaaacccagatgctgtctttgaagattttattcggtggcattcacctggtgaatggttgagcgaggacaaaacagatggtaatgcaggctggcctcccaaaggaaagctttctcaccgtatgtcccaacatgggaatgtgtggcgcaaaatctggaatgatgctctgccattgcctgtttctgaacagaagtctttgcttgaccctgttcgggaaggagaaaaggtgcttcattaccttgaaactttaaggccacagcagctccttgaacaaatggtgtgtacagctttcaaatcatcagctgatatcctgaataagaccatgtatggtggcttcaaggaaatgaagacaaaaatggatcgactatatgtcaccatggcgtcaacactgaaatcttttctagggaattctgatgtcaatgatttggttggaggcctgaaacggctttgtcaagtttttgagcacatcgagaagttactgattcttgctgcttccatcaatcggaagcttattgatgctccacgactagctcaagcaatattttacgactactacaacttctaccttccaaaaatgggaactagcctggaaagcatttgctatgagaaggagttcacaactaaggaaaaggtcgggatgtatgagagagatgctgtgtcgaacctgtttcctccccctactgctaatcagtcttggaggaaagttttgagcatgggaaatcttctgaacggccatgaaccgatgcaaagggaaatcatattctcagtccaggagagaataagcaacggtcattattcgagcccaaccccattatgtaccaacaatgagaagatccagacacataggatgtatatatctgggacatctaatgacctttgggttgcattgtctgtaacgtcctgggattgagctgcacgatgtatgagaggagcaattggtgttttaattagcttagaatcccgttggtgcagataaactatcattgtattttttttttgttggatgtaccagaagtccagaaggggccaccaggacatggctagtgacgcactgaggacaagcatccatttttgacatcagatcaaagtattgattatttacgtcttgtagcagtcagaactcagaaatgctaatatattcttggcttcctctagagaaatggttgtagacaagctctatttggctgacgtttttggtctgttaggtggtgggctggtgagttgcaacacacacactggggttgatgtacgtaaacatcttgtatgacttttgcaatgagctaggctttgttcaatactcgagtccatgaaattttcaatatttgat

SEQ ID NO: 84200 - DNA, 3465 bp, Zea Mays
ccacaatcaccgtcaccagaagcacgaacagagaactcggaccgtcggtcgacgaggcatcggccatcgacgcaacactctcctccgcttcccttctcctcagtcgcggctcaccccctcccccttgccgatctaacgggaacgcgtctcacagcttccacgcgactgcaccgtgccacccgaggctcgcccccgctgagccagcggagcgaatctccatggcctccacatcctcctccaggtacgcgaaacatcgtcggatcggagaggacgatgagttggaggaggttgaggaggaggccgaagaggagcttgagcggttcgatgatttcaccattgcttcgtcatgggaaaagtttatatctgagatagaggctatttgccgtcaatggcttgcagatggcgcaaagatcttaatgcaaaaaggtgcagagggtgttcctccttttgaaaacttatatatgatcaagcgtgaattgaagcatgggaaaagagtctattctatggagtaccatttcatgaaatctgcaaaaggtgagtttatttggttaaactataatactttcagcaagcttgtagaagggcagacctggtgatgtagaagggcagaccatttcatgaaatcgaagcagcctcttcacatttgcggagggaagacttgccttggtttatcccttctccagaacccactcatgtggtcaaaactcatattgggacgatgacacacatagcatgcagctctcatttggagttgatgagtttttgataattgctccgctgagtgccagtggtgtgatcctcgatgatccagaatcaactaagcttttgagttctgtagcaattgctctttctaattgtggcagcaattggccagcgtttgtaccagttcacgacccttcacggaaagcctatatagggattcaaaatctgggaactgtatttactcgaagatttgaagctgaccgaattggtagtcaagtgccaataagactcatgcatctggaggggttacatgagctatttctgtcaaaatttgtcctatcctcgtcagattttccagctagggtaaaggttcacttctcaatgaagcttagctacaagaccccagaatatgatcatgataatgaaactttagattctgaagctactgagccattgactgaaaatgaagttgtgaaccaccctagaaaactatgggacgatgattgcccttgggcagagtggtactctgctgaggatcctgttaaaggttttgagttgactgccatctggggagagaggacatttgaagagacccttgagatggctgaagtggaaaatgcctcgtcctttgatgctgatagctggttccttcacccagttgtatctcgatacatggtagatgattctattggaaaatttgttgggtttgcatcccagctacatcttctagtaaatgcatatgaatcatcagtggaggcacaatttctagaagactttgttgcagatacttcaggccaggataatgcaaaatctactgctactgtgcctccaccatcagttattgatcgtgttatgaaagatcttttcagtgatgagactggcaactatatggaagcagaaaacaagtatagtcgtgctatgcgaggtgcacctgcagattcactttttggccagttctgtttgcatgcactgtggtttggcaactgcaatatatgcgcaattgctacactatggattgattttgtgcgggaaattcgttggtgctgggaggaatcagaaagattgcctaggatgaaaagcacttcaagcattgatctctcttcttgtcttatccaccaaaagttacaaatgctcacgatatgcattgagaggaagagatcactgaaccgtgagaaaggtactggctacaaagatgagacttcaaatagtacggcagtgaacaagtctaggaaaggatcagctggtgttgtgcctaaaatgatgctcctgaatacgtttcaggaaatgcatgctccatatactcaggatgcacctttgatgaccgaagatatgcatgaagaaaggctccatgcagctgaagcttttggcaatgccattggtctatctggacagctggaaagggatatattatgttccgatatgtctgcttttaaagctgcaaacccagatgctgtctttgaagattttattcggtggcattcacctggtgaatggttgagcgaggacaaaacagatggtaatgcaggctggcctcccaaaggaaagctttctcaccgtatgtcccaacatgggaatgtgtggcgcaaaatctggaatgatgctctgccattgcctgtttctgaacagaagtctttgcttgaccctgttcgggaaggagaaaaggtgcttcattaccttgaaactttaaggccacagcagctccttgaacaaatggtgtgtacagctttcaaatcatcagctgatatcctgaataagaccatgtatggtggcttcaaggaaatgaagacaaaaatggatcgactatatgtcaccatggcgtcaacactgaaatcttttctagggaattctgatgtcaatgatttggttggaggcctgaaacggctttgtcaagtttttgagcacatcgagaagttactgattcttgctgcttccatcaatcggaagcttattgatgctccacgactagctcaagcaatattttacgactactacaacttctaccttccaaaaatgggaactagcctggaaagcatttgctatgagaaggagttcacaactaaggaaaaggtcgggatgtatgagagagatgctgtgtcgaacctgtttcctccccctactgctaatcagtcttggaggaaagttttgagcatgggaaatcttctgaacggccatgaaccgatgcaaagggaaatcatattctcagtccaggagagaataagcaacggtcattattcgagcccaaccccattatgtaccaacaatgagaagatccagacacataggatgtatatatctgggacatctaatgacctttgggttgcattgtctgtaacgtcctgggattgagctgcacgatgtatgagaggagcaattggtgttttaattagcttagaatcccgttggtgcagataaactatcattgtattttttttttgttggatgtaccagaagtccagaaggggccaccaggacatggctagtgacgcactgaggacaagcatccatttttgacatcagatcaaagtattgattatttacgtcttgtagcagtcagaactcagaaatgctaatatattcttggcttcctctagagaaatggttgtagacaagctctatttggctgacgtttttggtctgttaggtggtgggctggtgagttgcaacacacacactggggttgatgtacgtaaacatcttgtatgacttttgcaatgagctaggctttgttcaatactcgagtccatgaaattttcaatatttgat

SEQ ID NO: 84201 - DNA, 3094 bp, Zea Mays
gtacggtgccacaatcaccgtcaccagaagcacgaacagagaactcggaccgtcggtcgacgaggcatcggccatcgacgcaacactctcctccgcttcccttctcctcagtcgcggctcaccccctcccccttgccgatctaacgggaacgcgtctcacagcttccacgcgactgcaccgtgccacccgaggctcgcccccgctgagccagcggagcgaatctccatggcctccacatcctcctccaggtacgcgaaacatcgtcggatcggagaggacgatgagttggaggaggttgaggaggaggccgaagaggagcttgagcggttcgatgatttcaccattgcttcgtcatgggaaaagtttatatctgagatagaggctatttgccgtcaatggcttgcagatggcgcaaagatcttaatgcaaaaaggtgcagagggtgttcctccttttgaaaacttatatatgatcaagcgtgaattgaagcatgggaaaagagtctattctatggagtaccatttcatgaaatctgcaaaaggtcaaaactcatattgggacgatgacacacatagcatgcagctctcatttggagttgatgagtttttgataattgctccgctgagtgccagtggtgtgatcctcgatgatccagaatcaactaagcttttgagttctgtagcaattgctctttctaattgtggcaggttagtcctatcctcgtcagattttccagctagggtaaaggttcacttctcaatgaagcttagctacaagaccccagaatatgatcatgataatgaaactttagattctgaagctactgagccattgactgaaaatgaagttgtgaaccaccctagaaaactatgggacgatgattgcccttgggcagagtggtactctgctgaggatcctgttaaaggttttgagttgactgccatctggggagagaggacatttgaagagacccttgagatggctgaagtggaaaatgcctcgtcctttgatgctgatagctggttccttcacccagttgtatctcgatacatggtagatgattctattggaaaatttgttgggtttgcatcccagctacatcttctagtagcagatacttcaggccaggataatgcaaaatctactgctactgtgcctccaccatcagttattgatcgtgttatgaaagatcttttcagtgatgagactggcaactatatggaagcagaaaacaagtatagtcgtgctatgcgaggtgcacctgcagattcactttttggccagttctgtttgcatgcactgtggtttggcaactgcaatatatgcgcaattgctacactatggattgattttgtgcgggaaattcgttggtgctgggaggaatcagaaagattgcctaggatgaaaagcacttcaagcattgatctctcttcttgtcttatccaccaaaagttacaaatgctcacgatatgcattgagaggaagagatcactgaaccgtgagaaaggtactggctacaaagatgagacttcaaatagtacggcagtgaacaagtctaggaaaggatcagctggtgttgtgcctaaaatgatgctcctgaatacgtttcaggaaatgcatgctccatatactcaggatgcacctttgatgaccgaagatatgcatgaagaaaggctccatgcagctgaagcttttggcaatgccattggtctatctggacagctggaaagggatatattatgttccgatatgtctgcttttaaagctgcaaacccagatgctgtctttgaagattttattcggtggcattcacctggtgaatggttgagcgaggacaaaacagatggtaatgcaggctggcctcccaaaggaaagctttctcaccgtatgtcccaacatgggaatgtgtggcgcaaaatctggaatgatgctctgccattgcctgtttctgaacagaagtctttgcttgaccctgttcgggaaggagaaaaggtgcttcattaccttgaaactttaaggccacagcagctccttgaacaaatggtgtgtacagctttcaaatcatcagctgatatcctgaataagaccatgtatggtggcttcaaggaaatgaagacaaaaatggatcgactatatgtcaccatggcgtcaacactgaaatcttttctagggaattctgatgtcaatgatttggttggaggcctgaaacggctttgtcaagtttttgagcacatcgagaagttactgattcttgctgcttccatcaatcggaagcttattgatgctccacgactagctcaagcaatattttacgactactacaacttctaccttccaaaaatgggaactagcctggaaagcatttgctatgagaaggagttcacaactaaggaaaaggtcgggatgtatgagagagatgctgtgtcgaacctgtttcctccccctactgctaatcagtcttggaggaaagttttgagcatgggaaatcttctgaacggccatgaaccgatgcaaagggaaatcatattctcagtccaggagagaataagcaacggtcattattcgagcccaaccccattatgtaccaacaatgagaagatccagacacataggatgtatatatctgggacatctaatgacctttgggttgcattgtctgtaacgtcctgggattgagctgcacgatgtatgagaggagcaattggtgttttaattagcttagaatcccgttggtgcagataaactatcattgtattttttttttgttggatgtaccagaagtccagaaggggccaccaggacatggctagtgacgcactgaggacaagcatccatttttgacatcagatcaaagtattgattatttacgtcttgtagcagtcagaactcagaaatgctaatatattcttggcttcctctagagaaatggttgtagacaagctctatttggctgacgtttttggtctgttaggtggtgggctggtgagttgcaacacacacactggggttgatgtacgtaaacatcttgtatgacttttgcaatgagctaggctttgttcaatactcgagtccatgaaattttcaatatttgat

SEQ ID NO: 84202 - DNA, 3368 bp, Zea Mays
gtttaccagcgtacggtgccacaatcaccgtcaccagaagcacgaacagagaactcggaccgtcggtcgacgaggcatcggccatcgacgcaacactctcctccgcttcccttctcctcagtcgcggctcaccccctcccccttgccgatctaacgggaacgcgtctcacagcttccacgcgactgcaccgtgccacccgaggctcgcccccgctgagccagcggagcgaatctccatggcctccacatcctcctccaggtacgcgaaacatcgtcggatcggagaggacgatgagttggaggaggttgaggaggaggccgaagaggagcttccatgccttgttgggtaccatttgccacactgtttcgattgggagcatcaaaaaggtgcagagggtgttcctccttttgaaaacttatatatgatcaagcgtgaattgaagcatgggaaaagagtctattctatggagtaccatttcatgaaatctgcaaaagaccatttcatgaaatcgaagcagcctcttcacatttgcggagggaagacttgccttggtttatcccttctccagaacccactcatgtggtaggctttggaactaggtcaaaactcatattgggacgatgacacacatagcatgcagctctcatttggagttgatgagtttttgataattgctccgctgagtgccagtggtgtgatcctcgatgatccagaatcaactaagcttttgagttctgtagcaattgctctttctaattgtggcagcaattggccagcgtttgtaccagttcacgacccttcacggaaagcctatatagggattcaaaatctgggaactgtatttactcgaagatttgaagctgaccgaattggtagtcaagtgccaataagactcatgcatctggaggggttacatgagctatttctgtcaaaatttgtcctatcctcgtcagattttccagctagggtaaaggttcacttctcaatgaagcttagctacaagaccccagaatatgatcatgataatgaaactttagattctgaagctactgagccattgactgaaaatgaagttgtgaaccaccctagaaaactatgggacgatgattgcccttgggcagagtggtactctgctgaggatcctgttaaaggttttgagttgactgccatctggggagagaggacatttgaagagacccttgagatggctgaagtggaaaatgcctcgtcctttgatgctgatagctggttccttcacccagttgtatctcgatacatggtagatgattctattggaaaatttgttgggtttgcatcccagctacatcttctagtaaatgcatatgaatcatcagtggaggcacaatttctagaagactttgttgcagatacttcaggccaggataatgcaaaatctactgctactgtgcctccaccatcagttattgatcgtgttatgaaagatcttttcagtgatgagactggcaactatatggaagcagaaaacaagtatagtcgtgctatgcgaggtgcacctgcagattcactttttggccagttctgtttgcatgcactgtggtttggcaactgcaatatatgcgcaattgctacactatggattgattttgtgcgggaaattcgttggtgctgggaggaatcagaaagattgcctaggatgaaaagcacttcaagcattgatctctcttcttgtcttatccaccaaaagttacaaatgctcacgatatgcattgagaggaagagatcactgaaccgtgagaaaggtactggctacaaagatgagacttcaaatagtacggcagtgaacaagtctaggaaaggatcagctggtgttgtgcctaaaatgatgctcctgaatacgtttcaggaaatgcatgctccatatactcaggatgcacctttgatgaccgaagatatgcatgaagaaaggctccatgcagctgaagcttttggcaatgccattggtctatctggacagctggaaagggatatattatgttccgatatgtctgcttttaaagctgcaaacccagatgctgtctttgaagattttattcggtggcattcacctggtgaatggttgagcgaggacaaaacagatggtaatgcaggctggcctcccaaaggaaagctttctcaccgtatgtcccaacatgggaatgtgtggcgcaaaatctggaatgatgctctgccattgcctgtttctgaacagaagtctttgcttgaccctgttcgggaaggagaaaaggtgcttcattaccttgaaactttaaggccacagcagctccttgaacaaatggtgtgtacagctttcaaatcatcagctgatatcctgaataagaccatgtatggtggcttcaaggaaatgaagacaaaaatggatcgactatatgtcaccatggcgtcaacactgaaatcttttctagggaattctgatgtcaatgatttggttggaggcctgaaacggctttgtcaagtttttgagcacatcgagaagttactgattcttgctgcttccatcaatcggaagcttattgatgctccacgactagctcaagcaatattttacgactactacaacttctaccttccaaaaatgggaactagcctggaaagcatttgctatgagaaggagttcacaactaaggaaaaggtcgggatgtatgagagagatgctgtgtcgaacctgtttcctccccctactgctaatcagtcttggaggaaagttttgagcatgggaaatcttctgaacggccatgaaccgatgcaaagggaaatcatattctcagtccaggagagaataagcaacggtcattattcgagcccaaccccattatgtaccaacaatgagaagatccagacacataggatgtatatatctgggacatctaatgacctttgggttgcattgtctgtaacgtcctgggattgagctgcacgatgtatgagaggagcaattggtgttttaattagcttagaatcccgttggtgcagataaactatcattgtattttttttttgttggatgtaccagaagtccagaaggggccaccaggacatggctagtgacgcactgaggacaagcatccatttttgacatcagatcaaagtattgattatttacgtcttgtagcagtcagaactcagaaatgctaatatattcttggcttcctctagagaaatggttgtagacaagctctatttggctgacgtttttggtctgttaggtggtgggctggtgagttgcaacacacacactggggttgatgtacgtaaacatcttgtatgacttttgcaatgagctaggctttgttcaatactcgagtccatgaaattttcaatatttgat

SEQ ID NO: 84203 - DNA, 3351 bp, Zea Mays
agaaactgtcgtgtgtgtgacgagtttaccagcgtacggtgccacaatcaccgtcaccagaagcacgaacagagaactcggaccgtcggtcgacgaggcatcggccatcgacgcaacactctcctccgcttcccttctcctcagtcgcggctcaccccctcccccttgccgatctaacgggaacgcgtctcacagcttccacgcgactgcaccgtgccacccgaggctcgcccccgctgagccagcggagcgaatctccatggcctccacatcctcctccaggtacgcgaaacatcgtcggatcggagaggacgatgagttggaggaggttgaggaggaggccgaagaggagcttgagcggttcgatgatttcaccattgcttcgtcatgggaaaagtttatatctgagatagaggctatttgccgtcaatggcttgcagatggcgcaaagatcttaatgcaaaaaggtgcagagggtgttcctccttttgaaaacttatatatgatcaagcgtgaattgaagcatgggaaaagagtctattctatggagtaccatttcatgaaatctgcaaaaggtcaaaactcatattgggacgatgacacacatagcatgcagctctcatttggagttgatgagtttttgataattgctccgctgagtgccagtggtgtgatcctcgatgatccagaatcaactaagcttttgagttctgtagcaattgctctttctaattgtggcagcaattggccagcgtttgtaccagttcacgacccttcacggaaagcctatatagggattcaaaatctgggaactgtatttactcgaagatttgaagctgaccgaattggtagtcaagtgccaataagactcatgcatctggaggggttacatgagctatttctgtcaaaatttgtcctatcctcgtcagattttccagctagggtaaaggttcacttctcaatgaagcttagctacaagaccccagaatatgatcatgataatgaaactttagattctgaagctactgagccattgactgaaaatgaagttgtgaaccaccctagaaaactatgggacgatgattgcccttgggcagagtggtactctgctgaggatcctgttaaaggttttgagttgactgccatctggggagagaggacatttgaagagacccttgagatggctgaagtggaaaatgcctcgtcctttgatgctgatagctggttccttcacccagttgtatctcgatacatggtagatgattctattggaaaatttgttgggtttgcatcccagctacatcttctagtaaatgcatatgaatcatcagtggaggcacaatttctagaagactttgttgcagatacttcaggccaggataatgcaaaatctactgctactgtgcctccaccatcagttattgatcgtgttatgaaagatcttttcagtgatgagactggcaactatatggaagcagaaaacaagtatagtcgtgctatgcgaggtgcacctgcagattcactttttggccagttctgtttgcatgcactgtggtttggcaactgcaatatatgcgcaattgctacactatggattgattttgtgcgggaaattcgttggtgctgggaggaatcagaaagattgcctaggatgaaaagcacttcaagcattgatctctcttcttgtcttatccaccaaaagttacaaatgctcacgatatgcattgagaggaagagatcactgaaccgtgagaaaggtactggctacaaagatgagacttcaaatagtacggcagtgaacaagtctaggaaaggatcagctggtgttgtgcctaaaatgatgctcctgaatacgtttcaggaaatgcatgctccatatactcagttccttaggatgcacctttgatgaccgaagatatgcatgaagaaaggctccatgcagctgaagcttttggcaatgccattggtctatctggacagctggaaagggatatattatgttccgatatgtctgcttttaaagctgcaaacccagatgctgtctttgaagattttattcggtggcattcacctggtgaatggttgagcgaggacaaaacagatggtaatgcaggctggcctcccaaaggaaagctttctcaccgtatgtcccaacatgggaatgtgtggcgcaaaatctggaatgatgctctgccattgcctgtttctgaacagaagtctttgcttgaccctgttcgggaaggagaaaaggtgcttcattaccttgaaactttaaggccacagcagctccttgaacaaatggtgtgtacagctttcaaatcatcagctgatatcctgaataagaccatgtatggtggcttcaaggaaatgaagacaaaaatggatcgactatatgtcaccatggcgtcaacactgaaatcttttctagggaattctgatgtcaatgatttggttggaggcctgaaacggctttgtcaagtttttgagcacatcgagaagttactgattcttgctgcttccatcaatcggaagcttattgatgctccacgactagctcaagcaatattttacgactactacaacttctaccttccaaaaatgggaactagcctggaaagcatttgctatgagaaggagttcacaactaaggaaaaggtcgggatgtatgagagagatgctgtgtcgaacctgtttcctccccctactgctaatcagtcttggaggaaagttttgagcatgggaaatcttctgaacggccatgaaccgatgcaaagggaaatcatattctcagtccaggagagaataagcaacggtcattattcgagcccaaccccattatgtaccaacaatgagaagatccagacacataggatgtatatatctgggacatctaatgacctttgggttgcattgtctgtaacgtcctgggattgagctgcacgatgtatgagaggagcaattggtgttttaattagcttagaatcccgttggtgcagataaactatcattgtattttttttttgttggatgtaccagaagtccagaaggggccaccaggacatggctagtgacgcactgaggacaagcatccatttttgacatcagatcaaagtattgattatttacgtcttgtagcagtcagaactcagaaatgctaatatattcttggcttcctctagagaaatggttgtagacaagctctatttggctgacgtttttggtctgttaggtggtgggctggtgagttgcaacacacacactggggttgatgtacgtaaacatcttgtatgacttttgcaatgagctaggctttgttcaatactcgagtccatgaaattttcaatatttgat

SEQ ID NO: 84204 - DNA, 3411 bp, Zea Mays
ataccggcccagccctgcataggactactcccatcctgtgagcccgcggctgtagaaactgtcgtgtgtgtgacgagtttaccagcgtacggtgccacaatcaccgtcaccagaagcacgaacagagaactcggaccgtcggtcgacgaggcatcggccatcgacgcaacactctcctccgcttcccttctcctcagtcgcggctcaccccctcccccttgccgatctaacgggaacgcgtctcacagcttccacgcgactgcaccgtgccacccgaggctcgcccccgctgagccagcggagcgaatctccatggcctccacatcctcctccaggtacgcgaaacatcgtcggatcggagaggacgatgagttggaggaggttgaggaggaggccgaagaggagcttgagcggttcgatgatttcaccattgcttcgtcatgggaaaagtttatatctgagatagaggctatttgccgtcaatggcttgcagatggcgcaaagatcttaatgcaaaaaggtgcagagggtgttcctccttttgaaaacttatatatgatcaagcgtgaattgaagcatgggaaaagagtctattctatggagtaccatttcatgaaatctgcaaaaggtcaaaactcatattgggacgatgacacacatagcatgcagctctcatttggagttgatgagtttttgataattgctccgctgagtgccagtggtgtgatcctcgatgatccagaatcaactaagcttttgagttctgtagcaattgctctttctaattgtggcagcaattggccagcgtttgtaccagttcacgacccttcacggaaagcctatatagggattcaaaatctgggaactgtatttactcgaagatttgaagctgaccgaattggtagtcaagtgccaataagactcatgcatctggaggggttacatgagctatttctgtcaaaatttgtcctatcctcgtcagattttccagctagggtaaaggttcacttctcaatgaagcttagctacaagaccccagaatatgatcatgataatgaaactttagattctgaagctactgagccattgactgaaaatgaagttgtgaaccaccctagaaaactatgggacgatgattgcccttgggcagagtggtactctgctgaggatcctgttaaaggttttgagttgactgccatctggggagagaggacatttgaagagacccttgagatggctgaagtggaaaatgcctcgtcctttgatgctgatagctggttccttcacccagttgtatctcgatacatggtagatgattctattggaaaatttgttgggtttgcatcccagctacatcttctagtaaatgcatatgaatcatcagtggaggcacaatttctagaagactttgttgcaggtagcagatacttcaggccaggataatgcaaaatctactgctactgtgcctccaccatcagttattgatcgtgttatgaaagatcttttcagtgatgagactggcaactatatggaagcagaaaacaagtatagtcgtgctatgcgaggtgcacctgcagattcactttttggccagttctgtttgcatgcactgtggtttggcaactgcaatatatgcgcaattgctacactatggattgattttgtgcgggaaattcgttggtgctgggaggaatcagaaagattgcctaggatgaaaagcacttcaagcattgatctctcttcttgtcttatccaccaaaagttacaaatgctcacgatatgcattgagaggaagagatcactgaaccgtgagaaaggtactggctacaaagatgagacttcaaatagtacggcagtgaacaagtctaggaaaggatcagctggtgttgtgcctaaaatgatgctcctgaatacgtttcaggaaatgcatgctccatatactcagttccttaggatgcacctttgatgaccgaagatatgcatgaagaaaggctccatgcagctgaagcttttggcaatgccattggtctatctggacagctggaaagggatatattatgttccgatatgtctgcttttaaagctgcaaacccagatgctgtctttgaagattttattcggtggcattcacctggtgaatggttgagcgaggacaaaacagatggtaatgcaggctggcctcccaaaggaaagctttctcaccgtatgtcccaacatgggaatgtgtggcgcaaaatctggaatgatgctctgccattgcctgtttctgaacagaagtctttgcttgaccctgttcgggaaggagaaaaggtgcttcattaccttgaaactttaaggccacagcagctccttgaacaaatggtgtgtacagctttcaaatcatcagctgatatcctgaataagaccatgtatggtggcttcaaggaaatgaagacaaaaatggatcgactatatgtcaccatggcgtcaacactgaaatcttttctagggaattctgatgtcaatgatttggttggaggcctgaaacggctttgtcaagtttttgagcacatcgagaagttactgattcttgctgcttccatcaatcggaagcttattgatgctccacgactagctcaagcaatattttacgactactacaacttctaccttccaaaaatgggaactagcctggaaagcatttgctatgagaaggagttcacaactaaggaaaaggtcgggatgtatgagagagatgctgtgtcgaacctgtttcctccccctactgctaatcagtcttggaggaaagttttgagcatgggaaatcttctgaacggccatgaaccgatgcaaagggaaatcatattctcagtccaggagagaataagcaacggtcattattcgagcccaaccccattatgtaccaacaatgagaagatccagacacataggatgtatatatctgggacatctaatgacctttgggttgcattgtctgtaacgtcctgggattgagctgcacgatgtatgagaggagcaattggtgttttaattagcttagaatcccgttggtgcagataaactatcattgtattttttttttgttggatgtaccagaagtccagaaggggccaccaggacatggctagtgacgcactgaggacaagcatccatttttgacatcagatcaaagtattgattatttacgtcttgtagcagtcagaactcagaaatgctaatatattcttggcttcctctagagaaatggttgtagacaagctctatttggctgacgtttttggtctgttaggtggtgggctggtgagttgcaacacacacactggggttgatgtacgtaaacatcttgtatgacttttgcaatgagctaggctttgttcaatactcgagtccatgaaattttcaatatttgat

SEQ ID NO: 84205 - DNA, 3318 bp, Zea Mays
aataaaagaaaatctgtacagagccttgaattataccggcccagccctgcataggactactcccatcctgtgagcccgcggctgtagaaactgtcgtgtgtgtgacgagtttaccagcgtacggtgccacaatcaccgtcaccagaagcacgaacagagaactcggaccgtcggtcgacgaggcatcggccatcgacgcaacactctcctccgcttcccttctcctcagtcgcggctcaccccctcccccttgccgatctaacgggaacgcgtctcacagcttccacgcgactgcaccgtgccacccgaggctcgcccccgctgagccagcggagcgaatctccatggcctccacatcctcctccaggtacgcgaaacatcgtcggatcggagaggacgatgagttggaggaggttgaggaggaggccgaagaggagcttgagcggttcgatgatttcaccattgcttcgtcatgggaaaagtttatatctgagatagaggctatttgccgtcaatggcttgcagatggcgcaaagatcttaatgcaaaaaggtgcagagggtgttcctccttttgaaaacttatatatgatcaagcgtgaattgaagcatgggaaaagagtctattctatggagtaccatttcatgaaatctgcaaaaggtcaaaactcatattgggacgatgacacacatagcatgcagctctcatttggagttgatgagtttttgataattgctccgctgagtgccagtggtgtgatcctcgatgatccagaatcaactaagcttttgagttctgtagcaattgctctttctaattgtggcagcaattggccagcgtttgtaccagttcacgacccttcacggaaagcctatatagggattcaaaatctgggaactgtatttactcgaagatttgaagctgaccgaattggtagtcaagtgccaataagactcatgcatctggaggggttacatgagctatttctgtcaaaatttgtcctatcctcgtcagattttccagctagggtaaaggttcacttctcaatgaagcttagctacaagaccccagaatatgatcatgataatgaaactttagattctgaagctactgagccattgactgaaaatgaagttgtgaaccaccctagaaaactatgggacgatgattgcccttgggcagagtggtactctgctgaggatcctgttaaaggttttgagttgactgccatctggggagagaggacatttgaagagacccttgagatggctgaagtggaaaatgcctcgtcctttgatgctgatagctggttccttcacccagttgtatctcgatacatggtagatgattctattggaaaatttgttgggtttgcatcccagctacatcttctagtaaatgcatatgaatcatcagtggaggcacaatttctagaagactttgttgcagatacttcaggccaggataatgcaaaatctactgctactgtgcctccaccatcagttattgatcgtgttatgaaagatcttttcagtgatgagactggcaactatatggaagcagaaaacaagtatagtcgtgctatgcgaggtgcacctgcagattcactttttggccagttctgtttgcatgcactgtggtttggcaactgcaatatatgcgcaattgctacactatggattgattttgtgcgggaaattcgttggtgctgggaggaatcagaaagattgcctaggatgaaaagcacttcaagcattgatctctcttcttgtcttatccaccaaaagttacaaatgctcacgatatgcattgagaggaagagatcactgaaccgtgagaaaggtactggctacaaagatgagacttcaaatagtacggcagtgaacaagtctaggaaaggatcagctggtgttgtgcctaaaatgatgctcctgaatacgtttcaggaaatgcatgctccatatactcaggatgcacctttgatgaccgaagatatgcatgaagaaaggctccatgcagctgaagcttttggcaatgccattggtctatctggacagctggaaagggatatattatgttccgatatgtctgcttttaaagctgcaaacccagatgctgtctttgaagattttattcggtggcattcacctggtgaatggttgagcgaggacaaaacagatgaagtctttgcttgaccctgttcgggaaggagaaaaggtgcttcattaccttgaaactttaaggccacagcagctccttgaacaaatggtgtgtacagctttcaaatcatcagctgatatcctgaataagaccatgtatggtggcttcaaggaaatgaagacaaaaatggatcgactatatgtcaccatggcgtcaacactgaaatcttttctagggaattctgatgtcaatgatttggttggaggcctgaaacggctttgtcaagtttttgagcacatcgagaagttactgattcttgctgcttccatcaatcggaagcttattgatgctccacgactagctcaagcaatattttacgactactacaacttctaccttccaaaaatgggaactagcctggaaagcatttgctatgagaaggagttcacaactaaggaaaaggtcgggatgtatgagagagatgctgtgtcgaacctgtttcctccccctactgctaatcagtcttggaggaaagttttgagcatgggaaatcttctgaacggccatgaaccgatgcaaagggaaatcatattctcagtccaggagagaataagcaacggtcattattcgagcccaaccccattatgtaccaacaatgagaagatccagacacataggatgtatatatctgggacatctaatgacctttgggttgcattgtctgtaacgtcctgggattgagctgcacgatgtatgagaggagcaattggtgttttaattagcttagaatcccgttggtgcagataaactatcattgtattttttttttgttggatgtaccagaagtccagaaggggccaccaggacatggctagtgacgcactgaggacaagcatccatttttgacatcagatcaaagtattgattatttacgtcttgtagcagtcagaactcagaaatgctaatatattcttggcttcctctagagaaatggttgtagacaagctctatttggctgacgtttttggtctgttaggtggtgggctggtgagttgcaacacacacactggggttgatgtacgtaaacatcttgtatgacttttgcaatgagctaggctttgttcaatactcgagtccatgaaattttcaatatttgat

SEQ ID NO: 84206 - DNA, 3383 bp, Zea Mays
ctattcttaacaaataaaagaaaatctgtacagagccttgaattataccggcccagccctgcataggactactcccatcctgtgagcccgcggctgtagaaactgtcgtgtgtgtgacgagtttaccagcgtacggtgccacaatcaccgtcaccagaagcacgaacagagaactcggaccgtcggtcgacgaggcatcggccatcgacgcaacactctcctccgcttcccttctcctcagtcgcggctcaccccctcccccttgccgatctaacgggaacgcgtctcacagcttccacgcgactgcaccgtgccacccgaggctcgcccccgctgagccagcggagcgaatctccatggcctccacatcctcctccaggtacgcgaaacatcgtcggatcggagaggacgatgagttggaggaggttgaggaggaggccgaagaggagcttccatgccttgttgggtaccatttgccacactgtttcgattgggagcatcaaaaaggtgcagagggtgttcctccttttgaaaacttatatatgatcaagcgtgaattgaagcatgggaaaagagtctattctatggagtaccatttcatgaaatctgcaaaaggtcaaaactcatattgggacgatgacacacatagcatgcagctctcatttggagttgatgagtttttgataattgctccgctgagtgccagtggtgtgatcctcgatgatccagaatcaactaagcttttgagttctgtagcaattgctctttctaattgtggcagcaattggccagcgtttgtaccagttcacgacccttcacggaaagcctatatagggattcaaaatctgggaactgtatttactcgaagatttgaagctgaccgaattggtagtcaagtgccaataagactcatgcatctggaggggttacatgagctatttctgtcaaaatttgtcctatcctcgtcagattttccagctagggtaaaggttcacttctcaatgaagcttagctacaagaccccagaatatgatcatgataatgaaactttagattctgaagctactgagccattgactgaaaatgaagttgtgaaccaccctagaaaactatgggacgatgattgcccttgggcagagtggtactctgctgaggatcctgttaaaggttttgagttgactgccatctggggagagaggacatttgaagagacccttgagatggctgaagtggaaaatgcctcgtcctttgatgctgatagctggttccttcacccagttgtatctcgatacatggtagatgattctattggaaaatttgttgggtttgcatcccagctacatcttctagtaaatgcatatgaatcatcagtggaggcacaatttctagaagactttgttgcagatacttcaggccaggataatgcaaaatctactgctactgtgcctccaccatcagttattgatcgtgttatgaaagatcttttcagtgatgagactggcaactatatggaagcagaaaacaagtatagtcgtgctatgcgaggtgcacctgcagattcactttttggccagttctgtttgcatgcactgtggtttggcaactgcaatatatgcgcaattgctacactatggattgattttgtgcgggaaattcgttggtgctgggaggaatcagaaagattgcctaggatgaaaagcacttcaagcattgatctctcttcttgtcttatccaccaaaagttacaaatgctcacgatatgcattgagaggaagagatcactgaaccgtgagaaaggtactggctacaaagatgagacttcaaatagtacggcagtgaacaagtctaggaaaggatcagctggtgttgtgcctaaaatgatgctcctgaatacgtttcaggaaatgcatgctccatatactcaggatgcacctttgatgaccgaagatatgcatgaagaaaggctccatgcagctgaagcttttggcaatgccattggtctatctggacagctggaaagggatatattatgttccgatatgtctgcttttaaagctgcaaacccagatgctgtctttgaagattttattcggtggcattcacctggtgaatggttgagcgaggacaaaacagatggtaatgcaggctggcctcccaaaggaaagctttctcaccgtatgtcccaacatgggaatgtgtggcgcaaaatctggaatgatgctctgccattgcctgtttctgaacagaagtctttgcttgaccctgttcgggaaggagaaaaggtgcttcattaccttgaaactttaaggccacagcagctccttgaacaaatggtgtgtacagctttcaaatcatcagctgatatcctgaataagaccatgtatggtggcttcaaggaaatgaagacaaaaatggatcgactatatgtcaccatggcgtcaacactgaaatcttttctagggaattctgatgtcaatgatttggttggaggcctgaaacggctttgtcaagtttttgagcacatcgagaagttactgattcttgctgcttccatcaatcggaagcttattgatgctccacgactagctcaagcaatattttacgactactacaacttctaccttccaaaaatgggaactagcctggaaagcatttgctatgagaaggagttcacaactaaggaaaaggtcgggatgtatgagagagatgctgtgtcgaacctgtttcctccccctactgctaatcagtcttggaggaaagttttgagcatgggaaatcttctgaacggccatgaaccgatgcaaagggaaatcatattctcagtccaggagagaataagcaacggtcattattcgagcccaaccccattatgtaccaacaatgagaagatccagacacataggatgtatatatctgggacatctaatgacctttgggttgcattgtctgtaacgtcctgggattgagctgcacgatgtatgagaggagcaattggtgttttaattagcttagaatcccgttggtgcagataaactatcattgtattttttttttgttggatgtaccagaagtccagaaggggccaccaggacatggctagtgacgcactgaggacaagcatccatttttgacatcagatcaaagtattgattatttacgtcttgtagcagtcagaactcagaaatgctaatatattcttggcttcctctagagaaatggttgtagacaagctctatttggctgacgtttttggtctgttaggtggtgggctggtgagttgcaacacacacactggggttgatgtacgtaaacatcttgtatgacttttgcaatgagctaggctttgttcaatactcgagtccatgaaattttcaatatttgat

SEQ ID NO: 84207 - DNA, 3508 bp, Zea Mays
ataaaatgtagggactaaacattagtccctagaaaccaaacacccctttaatctataccatctattcttaacaaataaaagaaaatctgtacagagccttgaattataccggcccagccctgcataggactactcccatcctgtgagcccgcggctgtagaaactgtcgtgtgtgtgacgagtttaccagcgtacggtgccacaatcaccgtcaccagaagcacgaacagagaactcggaccgtcggtcgacgaggcatcggccatcgacgcaacactctcctccgcttcccttctcctcagtcgcggctcaccccctcccccttgccgatctaacgggaacgcgtctcacagcttccacgcgactgcaccgtgccacccgaggctcgcccccgctgagccagcggagcgaatctccatggcctccacatcctcctccaggtacgcgaaacatcgtcggatcggagaggacgatgagttggaggaggttgaggaggaggccgaagaggagcttgagcggttcgatgatttcaccattgcttcgtcatgggaaaagtttatatctgagatagaggctatttgccgtcaatggcttgcagatggcgcaaagatcttaatgcaaaaaggtgcagagggtgttcctccttttgaaaacttatatatgatcaagcgtgaattgaagcatgggaaaagagtctattctatggagtaccatttcatgaaatctgcaaaaggtcaaaactcatattgggacgatgacacacatagcatgcagctctcatttggagttgatgagtttttgataattgctccgctgagtgccagtggtgtgatcctcgatgatccagaatcaactaagcttttgagttctgtagcaattgctctttctaattgtggcagcaattggccagcgtttgtaccagttcacgacccttcacggaaagcctatatagggattcaaaatctgggaactgtatttactcgaagatttgaagctgaccgaattggtagtcaagtgccaataagactcatgcatctggaggggttacatgagctatttctgtcaaaatttgtcctatcctcgtcagattttccagctagggtaaaggttcacttctcaatgaagcttagctacaagaccccagaatatgatcatgataatgaaactttagattctgaagctactgagccattgactgaaaatgaagttgtgaaccaccctagaaaactatgggacgatgattgcccttgggcagagtggtactctgctgaggatcctgttaaaggttttgagttgactgccatctggggagagaggacatttgaagagacccttgagatggctgaagtggaaaatgcctcgtcctttgatgctgatagctggttccttcacccagttgtatctcgatacatggtagatgattctattggaaaatttgttgggtttgcatcccagctacatcttctagtaaatgcatatgaatcatcagtggaggcacaatttctagaagactttgttgcaggtagcagatacttcaggccaggataatgcaaaatctactgctactgtgcctccaccatcagttattgatcgtgttatgaaagatcttttcagtgatgagactggcaactatatggaagcagaaaacaagtatagtcgtgctatgcgaggtgcacctgcagattcactttttggccagttctgtttgcatgcactgtggtttggcaactgcaatatatgcgcaattgctacactatggattgattttgtgcgggaaattcgttggtgctgggaggaatcagaaagattgcctaggatgaaaagcacttcaagcattgatctctcttcttgtcttatccaccaaaagttacaaatgctcacgatatgcattgagaggaagagatcactgaaccgtgagaaaggtactggctacaaagatgagacttcaaatagtacggcagtgaacaagtctaggaaaggatcagctggtgttgtgcctaaaatgatgctcctgaatacgtttcaggaaatgcatgctccatatactcaggatgcacctttgatgaccgaagatatgcatgaagaaaggctccatgcagctgaagcttttggcaatgccattggtctatctggacagctggaaagggatatattatgttccgatatgtctgcttttaaagctgcaaacccagatgctgtctttgaagattttattcggtggcattcacctggtgaatggttgagcgaggacaaaacagatggtaatgcaggctggcctcccaaaggaaagctttctcaccgtatgtcccaacatgggaatgtgtggcgcaaaatctggaatgatgctctgccattgcctgtttctgaacagaagtctttgcttgaccctgttcgggaaggagaaaaggtgcttcattaccttgaaactttaaggccacagcagctccttgaacaaatggtgtgtacagctttcaaatcatcagctgatatcctgaataagaccatgtatggtggcttcaaggaaatgaagacaaaaatggatcgactatatgtcaccatggcgtcaacactgaaatcttttctagggaattctgatgtcaatgatttggttggaggcctgaaacggctttgtcaagtttttgagcacatcgagaagttactgattcttgctgcttccatcaatcggaagcttattgatgctccacgactagctcaagcaatattttacgactactacaacttctaccttccaaaaatgggaactagcctggaaagcatttgctatgagaaggagttcacaactaaggaaaaggtcgggatgtatgagagagatgctgtgtcgaacctgtttcctccccctactgctaatcagtcttggaggaaagttttgagcatgggaaatcttctgaacggccatgaaccgatgcaaagggaaatcatattctcagtccaggagagaataagcaacggtcattattcgagcccaaccccattatgtaccaacaatgagaagatccagacacataggatgtatatatctgggacatctaatgacctttgggttgcattgtctgtaacgtcctgggattgagctgcacgatgtatgagaggagcaattggtgttttaattagcttagaatcccgttggtgcagataaactatcattgtattttttttttgttggatgtaccagaagtccagaaggggccaccaggacatggctagtgacgcactgaggacaagcatccatttttgacatcagatcaaagtattgattatttacgtcttgtagcagtcagaactcagaaatgctaatatattcttggcttcctctagagaaatggttgtagacaagctctatttggctgacgtttttggtctgttaggtggtgggctggtgagttgcaacacacacactggggttgatgtacgtaaacatcttgtatgacttttgcaatgagctaggctttgttcaatactcgagtccatgaaattttcaatatttgat

SEQ ID NO: 84208 - DNA, 3452 bp, Zea Mays
tcgaggcctggtaggttgctctaaaactttcaaatgagcccaggtaaagcccacgaaggcaggaaccacctgtccccaccttcatccctgccgtcagtggtcagtccgtctcgtcctcccttcccgtcaggtgtggccgtctcgcttcggcttctcccacttccttccccagatctccaagaccaggagccccggcgaagccaccacgcacgcagcgatgtcggcgagcagcacgcccgtagacgctttgggggagccgatcccgacgtcgtcggtgctgatggcagcgtcgaagcacatcgcagtccggtgccgcccggagaacgtcgccttcctcaactgcaagaagaaggaccctaatcctgagaagtgcctcgagaagggtcgccaggtcacaagctgcgtccttagcctgcttcggtacgttagcgaagcggtttgtgaggttactgatgatacagttgaacagctacctggcattgcttatctgggtaaccatcagcagtatatgcaaatgctatgcagagacatgatttgataacttcgacgaagatagaaaattatgaattatgttcatatataatacagtattagagattttttattgcattgcaaggatgcactagtttttttttcttcaacgcgcatgagagctgagggtcattatatttagaagacgagaaggaaactaaaaagacccaagcatgcccataagggcaggttttaatacgtggttgtagccaatgaactagcaaattagaataatcggcaacctatacatgtcaagctatggccagatgctactgtagcctttagcccccgctaggggctggacagattagctagagcactttgaactggttatgttcattgttagacagctcacagctcatttggattcagggccatccatcaaacttagcaaaggtttttgtaccttgattgtttaggttggtttcatccaaacaacagcccttctttgcagttgcagccaataaatactgcgatatccttagtgagttccccttaagttctatgataggaaggctacaggcacacaaaacctggtatttagcttagtaacatttctgttacttgatattcaaattcttttctatatctgaatgttgtctcaggttcatattctgcttctggtatgctcattttcaacagtacacgtttgcttgaaccatactgcttttagtttttcctttatctcattttgactattattttattgaccataatcaaatagatttcaggaggagaaaatgtaataggtgaagcccttagaaagcattgccaagatgataaaattatagctaacaagagactgtaatccttaactctgtacttggtcgttacagctaaaatgcatataactggtacctaccatatcatcttacaatggttgatttggtgcaactgtcccaaactggaagcttggctagctagaaccaattgccggaaaccctagttgtgccacacaaccacttcttccagtagaaggctaagaacttctctgctttgtagatcttccttgcaattgctttccacattgctctttagtaagaaaattagcgtgatgacacttgctgtttgcagctaaggtcacatttctgcctaattgatctgagctgcattcgttaaatttttatccaccgttgatactcatcctgtgattagattgttcttctgtggcccgaaaatcatatgtcaccatgagtacactactatactgtggaaaatccacaacaagtgaatttaaatataatgacagcaagtgattcagggataaagagcaggcctggtgcagtggtgagagctatctcacatagtcatcaggtcgcgtgtgcaaagcagcctctccacatttgtggggggaaggcttgcctcggtttatcccttcagcctcaatttatcccttcactagacctcactcttgtgggaacctctgcagtgggtctgccctagtgactcagaaatgcaaatttgcactgaagtcaacaagaatccaccttcagggatatactagtttatgacactgagtttaaattgataagatggtgatgacactgcgttaacaccatgaatcgcaatggaggaactgttggtgccttaaccaactttatactttcttttagacagtacattttattgagaggaaatggaatgagaaaaggctttcgcaaattcattcaacatcatcacatattcacatgtttttataacatgaagaactagtgatttctacctggcttgatatcttactctgtttggctcctgtcaaaatgaaccccttatagtttatcaatttatcgactagaaacctgaagtggttgaattagtgctgtcttttccttcttcttgggcattgagaccagggagttaatgcttataggttacacaggacataaagtaagaaaaagaaaagtacattatcagtgttgacatattattgagatctaccagatcctcaattccggagtattgagttgcataggccacctgtcattcttaaaagctggagaacatgcaccaaagaagtgcatgttcaacaatacgacacttgttgaggcattgagtatgtgtttttattatttcttgtttggtaatcaatgtgttaaagaatgtaggttgttttagttttgtcttaagtataacttctctaatttctaccaagtttgtagaaaaatgctccaatatccaacataaagttagtttcattaaatccaccttgaaatgtgtcttgataatgtattattgtatttatttggtactgtagatggaatatatttttcggtaaacctaatcaaagttaaagaagatttatttagaacaaaactaaaccaacatattttagaatgtagtaattgataacatgcagacctatcttttcatcccaaaatcaaccaggaatttcattttcttttgggtattttgtgggaggggcatcctattatcctgtctaattctgaaatgaagtgcagattaccacccaatggtgtagctattttttagttgaatagcatgtgtagagtatgcttctgttatagactcttttgtgggccggcaatatgccaggtgccagaataattaggcccaaccatttgttagatggcggctgggtgttagagaagtttaaggaggcttatcctccctggagcttatgtccttaataatctccggagttgttccctggagcttatctccttaataatctcctgagttgttaggccccggagctataagggtgcctcagattgtaatagggtttttttatcaaagaagtcgcacctgcgtgggtggctgcttgatcacggtggcgacccccacgccccctggtgatcgtattcctcagccgccacactgcgtgccctattccctgcgctcctccactcgatccaccctactaactcacccttcgtggtgtacgcctccccgtcatgcgc

SEQ ID NO: 84209 - DNA, 1088 bp, Zea Mays
atggcgccgtcgcgccgccacccgccggcggcgtggacgaccgagccgtggagcgacggggagacgtccacgctgctcgacgcgtggggcgcgcgccacctccgcgagtgcggcggcgcgctccgccccgctgactggcgggcgtgcgccgacgccgtcacctcccgccgcgccgcggccgggcgggccccgcgcaccgtcgaccagtgcaagaaccgcctggattatctcaagaagctgctcagggccgagcgctccagggctaagggagcccggccgacgacgccgccgttctcggggtgtctcgaccgcctccgcacgctgctgcacctcgccccctccgctcctcccgggttcgggcaccgtatcggcgccacgaggacgtggacgaaggtggaggaggaggaggaggaggaggaggaggaggaggatgaggaggagaaggcgagcggcggggctcctctgccccgctactggccgccggtgcccaagcggccgaggacggcggtgtcgctgtcgccgttgagcgccgcctccggggagcaccctggaggcggcgggaggagctgcacggaagtggcggcagctctggataggcttgccgggacgtacgagcgggtggaggcgtcgaagcagagggaggcgatgcgtgatctcgagatcgagcgtgtgcggctcctcgtcgacgtcgaagtcaccgcctccgccggtgtcgatggcgccgccgctgccacaaccgcagccggcgacatctagttgagggacttggataacaggctggccaaggtagccaattccagcctatatataatttttctcaaagagacgatctcgtcatggagatacaagtcacttgatgtgatgttcttctgaaaagttaaatcggtttaggttacaggaaaagcttagccagatttaggataccacatgttgagattttgtagcctgaaaagtatctctgttaatgttagctattcaggcttcacttcggtaactagcgctgtgatccctcttgatgtacagcctattcggctgctcagtttctagacgttctgatcatccggttcatatgatatcttggatgcttt

SEQ ID NO: 84210 - DNA, 1619 bp, Zea Mays
cttgcttgcacatttgtaagtttctctagccaagcgtcaaacaatgatacaacacctcacttacaaaacatgacctttaacgctaccactatatgagcgagaacgaggaggcaggagaaatatatagtgagaggaatcaataccaccatactgtgacgttctctcctcctctgatgagaaagagatgatgagggagggcgatgcatgtgttacgcttctaagaagcaagctccatggcctggtcgagaggaaccgtgctctggaagaggagaacaagcaactgagacaccaagtgagccgactaaaaggtcagatctcttctctcgaaggccaggacactgacaagaggatgctatggaagaagctgctggagagttctgcgaccagcatcagctactccaaggagaagcagtttgtccaaagcaacgatgacgcgaaggaaaccacggatctcagcagctcactgtgtcacagaaggcagcagcagttctccagggtagcactcgtgagatcaagggcgccaagggttccgaatccaccgcccaatccgacatgcacccagccaaagacaaccgtccgaaaggaaggatgcatggcccctcctcctcctccaccacctccgctaccttccaagttgcagaggagcgcaaaggcgatacaaagggtgcccgaggtagtcgagctgtaccggtcgttggtgcggcctgaaggcaaaaacgatgcgaagtctggatccgtaggaattccagcagcgacgagcagcagagagatgattggggaaattgagaacagatcagcttatgttttagctatcaaatcagacgtagaaaatcaaggcaactttgtgaacttcctcgcaagcgaagttcaaaatgcagcgtacagagagatagctgacgttgaagagtttgtcaagtggcttgacggggaactgtcataccttgtggacgagagagcggtgctcaagcacttccccaactggcccgagaagaaagcagacgccatgagagaagcagcgttcaactaccgagatctgaagaacctggagtcagaagcgtcatccttccacgacgacaggagggtggctacgccgatggctctcaagcgcatgcaagccttgcaggacaagcggaaggtacaaggatcttaagataccatgggaatggatgctcgactctggagtcataagccaactgaagatggcttccttgaagcttgcaaaggagtacatgaaccgcatcgcgagcactctgaagtcagatccatttgcgaacgacgaggagctacttctgcaaggcgtccgctttgccttccgcgtacaccagcttgctggtggctttgacgaaggatgcagaaaggcgtttcaagagctaaaaacttacgcaagcaagtctgagtgatccgaatccacgcgcgttcaaaataaaagctgggatcacgcatagataaatgtgaaacacatagattattaagttttgccgaggataatgctgcattttttttataaagcttaatttattttgggcatcagcagcagcaggtgctggtctctcggatacaggttcaggatctgaaagtttctaaacgaatcgtacaaataagcacacacctactaggtc

SEQ ID NO: 84211 - DNA, 1697 bp, Zea Mays
acaagtaattagcccagcgacagctcccaccaaactcaatgcttcacccgttcttgcttgcacatttgtaagtttctctagccaagcgtcaaacaatgatacaacacctcacttacaaaacatgacctttaacgctaccactatatgagcgagaacgaggaggcaggagaaatatatagtgagaggaatcaataccaccatactgtgacgttctctcctcctctgatgagaaagagatgatgagggagggcgatgcatgtgttacgcttctaagaagcaagctccatggcctggtcgagaggaaccgtgctctggaagaggagaacaagcaactgagacaccaagtgagccgactaaaaggtcagatctcttctctcgaaggccaggacactgacaagaggatgctatggaagaagctgctggagagttctgcgaccagcatcagctactccaaggagaagcagtttgtccaaagcaacgatgacgcgaaggaaaccacggatctcagcagctcactgtgtcacagaaggcagcagcagttctccagggtagcactcgtgagatcaagggcgccaagggttccgaatccaccgcccaatccgacatgcacccagccaaagacaaccgtccgaaaggaaggatgcatggcccctcctcctcctccaccacctccgctaccttccaagttgcagaggagcgcaaaggcgatacaaagggtgcccgaggtagtcgagctgtaccggtcgttggtgcggcctgaaggcaaaaacgatgcgaagtctggatccgtaggaattccagcagcgacgagcagcagagagatgattggggaaattgagaacagatcagcttatgttttagctatcaaatcagacgtagaaaatcaaggcaactttgtgaacttcctcgcaagcgaagttcaaaatgcagcgtacagagagatagctgacgttgaagagtttgtcaagtggcttgacggggaactgtcataccttgtggacgagagagcggtgctcaagcacttccccaactggcccgagaagaaagcagacgccatgagagaagcagcgttcaactaccgagatctgaagaacctggagtcagaagcgtcatccttccacgacgacaggagggtggctacgccgatggctctcaagcgcatgcaagccttgcaggacaaaattgaacaaggtatccataacactgaacgagtaagggacagtgcaggcggaaggtacaaggatcttaagataccatgggaatggatgctcgactctggagtcataagccaacttgcaaaggagtacatgaaccgcatcgcgagcactctgaagtcagatccatttgcgaacgacgaggagctacttctgcaaggcgtccgctttgccttccgcgtacaccagcttgctggtggctttgacgaaggatgcagaaaggcgtttcaagagctaaaaacttacgcaagcaagtctgagtgatccgaatccacgcgcgttcaaaataaaagctgggatcacgcatagataaatgtgaaacacatagattattaagttttgccgaggataatgctgcattttttttataaagcttaatttattttgggcatcagcagcagcaggtgctggtctctcggatacaggttcaggatctgaaagtttctaaacgaatcgtacaaataagcacacacctactaggtc

SEQ ID NO: 84212 - DNA, 3657 bp, Zea Mays
caacctctcaagtgccacgtgtaccatacgtcgcgaaacatctcgacccaaccgacgccccgcctcttaaaacggcgaccttcctccatggccaaatcgttgtcctcctccgcttccctccaaatccaccctggatccaaccccgattttccccagcagaagcaaacccgagcaaattgagcgcttgcagcttcacccggcgaagcagaatcgaatcggagccgctcgccactccgcgatggggatcctcctccggtccctcctcgtcgcctcgctcgtcctcagttcgctcgtcttgcacgtcgcagcggctaaaactatagatccttacaaggttctaggagttgacaagaatgctagccaacgggatattcagaaagcctttcacaaactttctctaaaataccaccctgacaagaataaagggaagggcgcacaggaaaaatttgaagaaataaacaatgcatatgagattctatctgatgaagagaagaggaaaaactatgacctctacggggatgagaagggtaaccctgaatttggtggtggaaattttggaaatcatgggggttctacatacttcactggtggtggccctaagtccagtcaattcacatctggtaatggatggcagacgatgggtggtcaaggaaatacaaaaacgttttcattttcatttggtggtaaacctggggccagtggtggaaacccgtttggtggtggttttgatcttggtgatgttttctcgaacctttttggtggtggaccaatgggtgatagccatattggtggatcaagtggctcagctagagccaacactggaacttctggtcagcattctggcactaccaagattgaggatatcaccacacaagttttcaataaagaagtagctgatcaaggaactacttggcttctgttattttatactccccaatctaaaagtcagtttgtgctagagagtgtcatgcaagacgtggtccattcactagatggtgttcttagggctggtaagatcaactgtgacaatgaaaaatctctttgcaaaaggtctggtgtttcaatagggaaatcggcccgtctcttcatctattcatatgctactgcagagaaagggtctttgcacgagtattctggggaacatgatgctaagagcttgaagacattttgtcaagaacacctgccaagattctccaaacgggtagatattagccaattcagcttccctttaaatgttctaccaaaccttcctcaagtgctcttactatcgagtaagaaggacacaccagcaatgtggcgtgctatcagtgggatgttccgcaatcggataatcttttatgatgctgaggttcacgatgtttctcatcctctgctgaaaagtcttggcgtgaagaatctcccagctgtaattggccgaaccgtgaatggtgaggagctccttctgaaggatggcatttcggtgaaagatctcagatctggtgtcaaggaattgaagacactgctagatagttttgagaagaagaataagaagttattatcgaatctagctaataagaaaccttccggtcaatgggaagaaatcaagaagattcctctcctcacagcttccaactttgaggaaacatgtggagagaagacttcagtatgcatcattggtgttttcgggtcaaacaaagccaaggggcagcttgaagcagtcctgtctgagatatctatgaagactttgataagggggcagaactataattccagaaatgctgtctcctatgctttgctggataaggacaaacaatctggattcctgtcatcgtttgacaagtctggatacaggtcatctgacaagctgctcatcgcctacaagccccgccgggggaagttcgcggtgtacgacggcgaggtgacactggaagaagctgaaaggttcgtgggatccgttttgaacggagacgttcaactgtcgccgacgaaacaaaaacctgtccttcggtagacgattattgcaagttgcaagggttttagatctaacacttattatcttaattaaggccttaattaaggcttgtacatagatggacgaagagagtaaaatcatagagcgtttgctggacagtttagtcgttcggtaaaccagagttgctacatctctccctcaaccgtgccaatgtaaattgtgcaaatgctgcagtcctgtcgagatattgaatatatacaggcatacagcggaccatttctatactagccaagtctactaccttttgtttccacaatatcctgttgtcttgttcaaagtatactagcaaacatttttttttcttttggtctgccttgagatagagttgcttctgagaacatgacgcgactgttactcacagaatcagttgtgaggaatcaacccatttcacagcaaaattgtatgaaaaaaaaaaacatatatttactggaatcagcttattttacagaaaaaatgcaggaaaaaatcatatgttccaaaagggagccttaaatgccgtggagatcgaagaagaaatgaattgctgttgaatttatgccaaaattgctgtcgatttgattgtataccgaaagacaactctgggcttacggatgatacaaaattcggcccagcccaacgtgcttgtcggatctatccagtcgcacgccaccgcctcacaccacacggctctacacggctccctcttcgacagcctaattctcagacgaatgctatcttcactggcctcgacctcgagcacaaaacgctgtggccgagcggatgagaggaggatggcttccaccagcctcagctcctccttgcgcagggctactgcaaactagcaggagtcccaagatcttcgtcgtaccacacccagctgacctgttgctcgaggaatccctcccagaacgcggaggcagagctcctccggttgagctacccggcgaggaaataacaagcatgcaaaagaccagctgccggcgggccacggatggcgaccaagcggcgccgtccgcggcgcaagaaacaaccgacacccctcctcctcctccggcctttcacgttcccagcgccgagagattcccggtgacgcctggcaacggacagccgccgcagtagttagccaacgccaacggcgtcgcgccgagcgagccgctgacggcgcgggagcggctgcgggcggcgcgcgtgctgggcaagtacgcggagccgccggcgtcgaaaccggccaagccgagttcgggagcggcgtgctggacgcgctgcggggaggcggacgcgaagaaggccggggggtgggggcgggcggcgcgggtcgcgtcgcggatgcccgaggcgccgccgcgccgggcaacctgttcgacgacagcaggcgtgggatgcccaaggaggggtggacgtcttcctcgtcctcgtctccttcacgctcatcaccagcgtcatgttcgacaccgccttcctcgtgtggaagtggaagctcggcgcaatacacttcaacgagtactagctagccttttgactgactatagattggggaataaaagggcgattatgcagtgattcttgcggttgacaacaagggcaaccttgagccgccacaatctatatgtatactgatctggcgcagattgttgagagaacataaaaatgttgcaattaaacaaaac

SEQ ID NO: 84213 - DNA, 3651 bp, Zea Mays
caacctctcaagtgccacgtgtaccatacgtcgcgaaacatctcgacccaaccgacgccccgcctcttaaaacggcgaccttcctccatggccaaatcgttgtcctcctccgcttccctccaaatccaccctggatccaaccccgattttccccagcagaagcaaacccgagcaaattgagcgcttgcagcttcacccggcgaagcagaatcgaatcggagccgctcgccactccgcgatggggatcctcctccggtccctcctcgtcgcctcgctcgtcctcagttcgctcgtcttgcacgtcgcagcggctaaaactatagatccttacaaggttctaggagttgacaagaatgctagccaacgggatattcagaaagcctttcacaaactttctctaaaataccaccctgacaagaataaagggaagggcgcacaggaaaaatttgaagaaataaacaatgcatatgagattctatctgatgaagagaagaggaaaaactatgacctctacggggatgagaagggtaaccctgaatttggtggtggaaattttggaaatcatgggggttctacatacttcactggtggtggccctaagtccagtcaattcacatctggtaatggatggcagacgatgggtggtcaaggaaatacaaaaacgttttcattttcatttggtggtaaacctggggccagtggtggaaacccgtttggtggtggttttgatcttggtgatgttttctcgaacctttttggtggtggaccaatgggtgatagccatattggtggatcaagtggctcagctagagccaacactggaacttctggtcagcattctggcactaccaagattgaggatatcaccacacaagttttcaataaagaagtagctgatcaaggaactacttggcttctgttattttatactccccaatctaaaagtcagtttgtgctagagagtgtcatgcaagacgtggtccattcactagatggtgttcttagggctggtaagatcaactgtgacaatgaaaaatctctttgcaaaaggtctggtgtttcaatagggaaatcggcccgtctcttcatctattcatatgctactgcagagaaagggtctttgcacgagtattctggggaacatgatgctaagagcttgaagacattttgtcaagaacacctgccaagattctccaaacgggtagatattagccaattcagcttccctttaaatgttctaccaaaccttcctcaagtgctcttactatcgagtaagaaggacacaccagcaatgtggcgtgctatcagtgggatgttccgcaatcggataatcttttatgatgctgaggttcacgatgtttctcatcctctgctgaaaagtcttggcgtgaagaatctcccagctgtaattggccgaaccgtgaatggtgaggagctccttctgaaggatggcatttcggtgaaagatctcagatctggtgtcaaggaattgaagacactgctagatagttttgagaagaagaataagaagttattatcgaatctagctaataagaaaccttccggtcaatgggaagaaatcaagaagattcctctcctcacagcttccaactttgaggaaacatgtggagagaagacttcagtatgcatcattggtgttttcgggtcaaacaaagccaaggggcagcttgaagcagtcctgtctgagatatctatgaagactttgataagggggcagaactataattccagaaatgctgtctcctatgctttgctggataaggacaaacaatctggattcctgtcatcgtttgacaagtctggatacaggtcatctgacaagctgctcatcgcctacaagccccgccgggggaagttcgcggtgtacgacggcgaggtgacactggaagaagctgaaaggttcgtgggatccgttttgaacggagacgttcaactgtcgccgacgaaacaaaaacctgtccttcggtagacgattattgcaagttgcaagggttttagatctaacacttattatcttaattaaggccttaattaaggcttgtacatagatggacgaagagagtaaaatcatagagcgtttgctggacagtttagtcgttcggtaaaccagagttgctacatctctccctcaaccgtgccaatgtaaattgtgcaaatgctgcagtcctgtcgagatattgaatatatacaggcatacagcggaccatttctatactagccaagtctactaccttttgtttccacaatatcctgttgtcttgttcaaagtatactagcaaacatttttttttcttttggtctgccttgagatagagttgcttctgagaacatgacgcgactgttactcacagaatcagttgtgaggaatcaacccatttcacagcaaaattgtatgaaaaaaaaaaacatatatttactggaatcagcttattttacagaaaaaatgcaggaaaaaatcatatgttccaaaagggagccttaaatgccgtggagatcgaagaagaaatgaattgctgttgaatttatgccaaaattgctgtcgatttgattgtataccgaaagacaactctgggcttacggatgatacaaaattcggcccagcccaacgtgcttgtcggatctatccagtcgcacgccaccgcctcacaccacacggctctacacggctccctcttcgacagcctaattctcagacgaatgctatcttcactggcctcgacctcgagcacaaaacgctgtggccgagcggatgagaggaggatggcttccaccagcctcagctcctccttgcgcagggctactgcaaacgagtcccaagatcttcgtcgtaccacacccagctgacctgttgctcgaggaatccctcccagaacgcggaggcagagctcctccggttgagctacccggcgaggaaataacaagcatgcaaaagaccagctgccggcgggccacggatggcgaccaagcggcgccgtccgcggcgcaagaaacaaccgacacccctcctcctcctccggcctttcacgttcccagcgccgagagattcccggtgacgcctggcaacggacagccgccgcagtagttagccaacgccaacggcgtcgcgccgagcgagccgctgacggcgcgggagcggctgcgggcggcgcgcgtgctgggcaagtacgcggagccgccggcgtcgaaaccggccaagccgagttcgggagcggcgtgctggacgcgctgcggggaggcggacgcgaagaaggccggggggtgggggcgggcggcgcgggtcgcgtcgcggatgcccgaggcgccgccgcgccgggcaacctgttcgacgacagcaggcgtgggatgcccaaggaggggtggacgtcttcctcgtcctcgtctccttcacgctcatcaccagcgtcatgttcgacaccgccttcctcgtgtggaagtggaagctcggcgcaatacacttcaacgagtactagctagccttttgactgactatagattggggaataaaagggcgattatgcagtgattcttgcggttgacaacaagggcaaccttgagccgccacaatctatatgtatactgatctggcgcagattgttgagagaacataaaaatgttgcaattaaacaaaac

SEQ ID NO: 84214 - DNA, 1564 bp, Zea Mays
ccttatccatactctcccgtaggcgcgtccaccgcaagtccgcaacgcgtgctggtctgtcacccgtatataatccccttttcaaatggccattttccgcaatcagaaaccagtcctctacttgctaggaggtggttacccgaaaacctacccccgccgccttggcccttggcctcacgtcacgatgtcttgcacggtgaccatcccgaactcgccagtattctcgccttcacgccgcccgctgtcctgcaaggccgctcccgcgtcgccggagcccgccgtcgccgtctccgcctcttccgcggcgcccgcgcccgcgcccgccgccgccggctcgccgctccgccccttcgcgctccgcgcgctgctccgggaggaggtattcccgtctccatcgccccagctggcctctgccgcagcggtggcctcggtaccaagcggggccgtgctgaagcggcggcgacctgcgccgctccttgtgccggcgtccggcgcgactgctgctgctgcggtggctgccgtggaggcagatccgacgaacgaggtggaggaggagggggaggagttcgcagcgtactgccggagggggaaggggaggagaagggtggaaatggaggaccggcatgtggccgaggtcgctctcggcggagatccccaagtggcgctctttggtgtattcgatggtcacgggggcaaaaatgcggcagagttcgctgcggagaacatgcccaagtttttggccgaggagttcaagaaggtgaacggcggaggagagatcgaaggagctgtcaacaggggttacctcaagacggacgaggaattcctcaagagggacgagagcgggggcgcgtgctgcgtcacagccgttctccaaaagggtggtctggtcgtctccaacgctggagactgccgtgcggtgctcagccgagcagggaaagcagatgtgctcacctcggaccaccgggcctcccgggaggatgagaaggagagaattgaaaatttgggtggatttgtggtgaattaccatgggacatggcgagtccagggttccctggcagtgtctaggggcattggggatggacacctaaagcagtgggttgtggctaacccagacactaggacgctcctcgtcgaccaccagtgcgagttcttgatacttgcttctgatggcctatgggataagatcgataatcaggaggcagtagaccttgcacgtcctctatgcattaacaatgacaagacctctcgcctggctgcctgcaggatgctcactgagacgtcgatttccaggggctcaactgatgatatcagtgtcatgattgtgcaattgcagaagttttcaagttcctaacttaattggagaaacttgaccaaaactctaggcattagcaccaacagactggtggaaggtgtcagccttggacaatattgcttacgggagctgttgcgtttgcctgtatttgggtgcttatccaatctgttgtaattattgctgaggtttcttttgtaatatgtgcatggtggtacatatttctctactaccacggtcctacccaaggttttg

SEQ ID NO: 84215 - DNA, 2716 bp, Zea Mays
acccctcccaactgcccctagcctaactcgggccacagagcggccgcccccttcaccggagaggtggcatcccacgtcggacgcagaggtgcacctgcgtcggcgccacgacacttgacccaggtgacaatggtctctaagtaaggcgagaatggccacccatgggaatcactggatctgtttgcgctcgtcatctggtccagcactaggtcttgagcatgagtagtgtaggagctccaggaccagttcttccccttctcacagaatcgccctccctgaggttttgttcatgctatttgattcttgagatttgaatccgaagcgaacgcaggaacctggcgaaaaacaacttctctggtaatcttccgtactgcatatccaacttggtctcgcttgagtacctgtaagttactattccattggtaaagatgtgatttgttcagtgatgatatttttggttagcacaatctaactgcagtgaaccactgcctgcaacaaccttagccacaactcgttgtttcaggaaattggagaattgtttggaagcctcagttcactcgcagaactgtaaggcatactgaaccgctgttttcgtacgcaagctcgacttgagtattgtgtggttgaaatttttgatcctgtacaaactatttcagtattgactgttttcttcattagaaaataagtgtaattttgagcacatatataatattcaaaatataacattgccaccaaataaaaatgcaacatacttcatctggccacaaatttaagcccttctacgtctgtcctaagtcaaaaaaaagttaactctgactaacaatatattatctgagattaaaatttattatattataaaattagtttgtttgcagatacaactttttttaggaaaatgtttttttaaaaaaatgcattcacaatcacttgatctgtccaagtgaggatgatgatattgtcagtatgatgattaactgctcttaaccctatgaatttcatcgtattataactacaatccttggagagacatatcttacaacaacctcacgagaatcttcctttctcaatgggctctctgtcaaaactttctagcctctaagtattattcagatgctccccatatatctgtatttctttctcgtggctctgatagtttccttcttgtgcctgttatgcaaaacaatcagctgtcgggcatggttgatgtcgtcagcaacataagccttgcaacactgtaagtagcttcccacacacacaccttggttcgcactcgcaccgaaaacaattttgagctaatattattggtgactatgcattccactcaacttccgcacggtgcttctaattaaatgaagttaaccaattgcagaatggaactgattctgcattccaggctgttgacaataaaccatcccaaacatgctacctaatggctctagatcatgctacaaacaattatggaacaagttgtcgcatctttttccctttctttataataacaattagattgaatttgcttaaaatttcccttgtcccattgtaatttctgaaacttagattgaatttgcatcttttccctttctttgttcatttaatcattgtgtactaacattttgtcaaatagttcatgttcatttaaacttttcttctattagactgatagtatttcacatactatactaaatgagtgtgagtccactgttctgttctttaacctctctctaggaagaatccatggtctgtattgttttactgaaaaggggatgtgctaacttgttgagattacacatggcatttacatttgtatatgttttgtccatttccatttcttaaataaaatatcctttgcagatttttatcacagtttacttcttcaaagcaaccatggatgaaaatttcagtttagctgatattgaggtagctctgatcccaatcttgacagggtcatgtgaatacgttagtgccttagtggagattatttgatacgaccttcaaagttcaaacatttcttacaataataattgatatctgttactcagaaccacattcgaaccttgtatatgacttaaaggtttttaataaaactagactccactccactaggtatgacccccctaatccccgtcctcaccttcatgccatcagtattttcatgttagtacactaactgcgccctcatgtaggctttctgtgcgctcctggacaagcaattgcagtttggaaggataagcaattgtggtctcatgtgttgtactgtttcttataattttccagcaactttgattgggaggaattttgtttgagcttgtgggcccaattcatatcagttcccttacagatatgacaggtgtacacatctgacttaacatcacttttcttatggacctgtctaaggtgcaaaggccacacaaagggatttgggggtgatatatagagatcatagtacatgtggagaaggttgactatctttggtatttcagcaatgctcttttgcttcactcagtgttcaatgcaaacttatgtttgattatttgttaaaactgtgtacgcatttgctggaccctcgatccatttctccttgttttgacaatgctgttatgacaaaatttacactgcattaccaggagctgggccaacatttaccatcctaatcaattgtagattcttagcaattcttgacatcattgtaataattgtattatgctgtaaatttttt

SEQ ID NO: 84216 - DNA, 1135 bp, Zea Mays
cggattcgcgccggcctttttgcacgacgtggatgttgcagccggagttcttgacgacggtgcccaacgaggaatagaaagggggaaaaaaagaaacgcgtatctgaattccacacggccggcgaagacacttgaacagtcttgctggcaatgggaaacaagggaccagtgccaacacaggaatcgacgaatggttctgttctgtctccctcactctctgatctctcttgtcatcccatccctgtttacgcccctggcgcatacttgagacgcaatccataatccaccgcagatgacgccgaggcaccgtcgtctacgtctgctgcgagcaatactaagagcaagacagtgataatagtgtccgctgctacccgctagacgtggagcgagagcagctgttcgaaggatcaagcgacgacgacgccgcccacacgccacggaagagaagcacccaggagatcctcaccaaatacaagttcaaaggggacgccgcggctgccgcggctcacgcgaagcagaagctcatggagcggcaggagaaactcgcgagaatcacggagcagtccgcggagctggagagcgaggccgagaacttcgccgcgctcgcgcagcagatcaggaagaacacggagacctggtggtggaagcggtgatcaacaacgtaagccatcgcctgcttacgtagctcatgcgtcgtcagcagactggcatgggacgccacgggatcatatgcatggctgtaacccggccacgctgctcggttcctctctgcacaagcgtcagcagactgtggcgctagtacgtgccgctctctctgcatctgcatcacatcactacgagccccagcaagcagaacgaaaagcaatgcgattgtgacggttcagccagcgtcggccctgctgcccctgcagcagcagcagcatgtctgttttcctacggatctttgttttaaggcttcaacaatgagagagatgtgacctgccccccagctgccggtgcataaattcagcatggctctctgatggatggtagaaagacaccaggacgtcacgcgtctcctacctttaatttttaattaattaaagattcacaatacgatcagaaagaaatccgctagtagcgccgtaagctgatt

SEQ ID NO: 84217 - DNA, 1320 bp, Zea Mays
aataattctaacttatatagcgaggtgatgaaggagatttgagcaatgcatttgctgctgaaatggacagaattcctggtgtcaggtatatacattttgatttccatcatgtttgtcgtggaggtaactttgacaatttgcaagctctctacaatcaaattgaggaagctattcataagcaaggatattttcttatgaacactaaaggagagattttgctggagcaaagtggtgtagttaggtccaattgcattgattgcctggaccgtacaaatgtgacacagagtttccttgcaagaaaatcattggattctcaattgcagctgatgggagcattattgtcatctgaaagcatttctctctctgataacattcatgatacattcaaaaaattatgggttgagcacggtgatgagctgagcctggagtatgctggctcttatgctttgaaaggggatctagtgagatatggaaggcagacattgcctggactaattaaagatggaatgagtgctctttcaagatattatttgaataattttcatgacggagtgcggcaagatgctcttgaccttattagcggttattatacagtcagccaaggcagctcttctccttttcataatggtgttgattcttcttcgtatctgccggtggcttcagcaatcatagttggtgggattaccgcgacaactttcactctcagtcaagttggacggaacgcgcagcacttgatctcctccattatctgtgcgggcttaacagtcggagtagtagccttggtgaaagccaatgggaaacagttttgctctaggccccgtctgtgtggtctaatctaatccttggtcttttccccccttccctttcatattgccctttgttagaaattgaatgtaaaaggattagaatgttgttttattcgttgcaagagtaaggttaaataaggaggcaggatggcctgccggtcccgtaatctgaagctgctaatttgtaagcctatagtttggatttgcacattctatttgttatactttttatgtatccatgaatagaaaattacgcctcgaaattccaaatttgtaataaatccgagagaccacatatttttttagtgtgactggttggtagcgacggtcttggcgtcttgcatagttgctgacacagaaaagacacctccgtccctctgtctggtacagtgagggtggggcatcaaaaacacaaagatgctgttcttatcaggcacagatgtttgccaagtataattccacgttgcgctatacagtcgggtttgctcgtatgcatttatgatctagatactta

SEQ ID NO: 84218 - DNA, 1373 bp, Zea Mays
gacaaaaattggaggaagaggcttaatcccttgtttcttgcctctaataattctaacttatatagcgaggtgatgaaggagatttgagcaatgcatttgctgctgaaatggacagaattcctggtgtcaggtatatacattttgatttccatcatgtttgtcgtggaggtaactttgacaatttgcaagctctctacaatcaaattgaggaagctattcataagcaaggctgagcagatattttcttatgaacactaaaggagagattttgctggagcaaagtggtgtagttaggtccaattgcattgattgcctggaccgtacaaatgtgacacagagtttccttgcaagaaaatcattggattctcaattgcagctgatgggagcattattgtcatctgaaagcatttctctctctgataacattcatgatacattcaaaaaattatgggttgagcacggtgatgagctgagcctggagtatgctggctcttatgctttgaaaggggatctagtgagatatggaaggcagacattgcctggactaattaaagatggaatgagtgctctttcaagatattatttgaataattttcatgacggagtgcggcaagatgctcttgaccttattagcggttattatacagtcagccaaggcagctcttctccttttcataatggtgttgattcttcttcgtatctgccggtggcttcagcaatcatagttggtgggattaccgcgacaactttcactctcagtcaagttggacggaacgcgcagcacttgatctcctccattatctgtgcgggcttaacagtcggagtagtagccttggtgaaagccaatgggaaacagttttgctctaggccccgtctgtgtggtctaatctaatccttggtcttttccccccttccctttcatattgccctttgttagaaattgaatgtaaaaggattagaatgttgttttattcgttgcaagagtaaggttaaataaggaggcaggatggcctgccggtcccgtaatctgaagctgctaatttgtaagcctatagtttggatttgcacattctatttgttatactttttatgtatccatgaatagaaaattacgcctcgaaattccaaatttgtaataaatccgagagaccacatatttttttagtgtgactggttggtagcgacggtcttggcgtcttgcatagttgctgacacagaaaagacacctccgtccctctgtctggtacagtgagggtggggcatcaaaaacacaaagatgctgttcttatcaggcacagatgtttgccaagtataattccacgttgcgctatacagtcgggtttgctcgtatgcatttatgatctagatactta

SEQ ID NO: 84219 - DNA, 2101 bp, Zea Mays
ttgaatataagccctggacggtttaacgatttgtggaatataaatataacaggctgatccacgttttgtttggaacaaaaatttgttagaggaacttattgaagctaagcttgatgagttcatcatcccactgatacaaggaaatatccaaaaaatgatagttccatgtcactgtttatgtatatatttggtttgcatgcataatgtggggcctataccttgccatcatccaaccatattagaaggatatatttcaaaaagttgcaatgcattcccattgttttctatacttggaggacgaacatgatcaggaagctggtgtcctttaactcctatagacccatacgttttcagtcagcacaatttaccttgaaggatagaccagtgaggataacattgttctcaaggagatgcaacaggcgtttaggtttcttttctttttctttttttcctttttccttttttccttttcttgaaacattagtatagaacacaatgatacttctaaattgtaatgcgctcattgcaggaacaagaatgtggagaaggggtgcgaatcttgaaggcgccacagcaaattttgtagaaacagaacagttggttgagtatgaagatctcacatcctcatttatacagcttcgaggttcaattccacttctctgggagcaaatagtggatttaagctacaaaccacggcttagcattattgaacatgaagaaactcataaggttgttcaacgccactttcatgatctttcacaacgatatggcaagataattgttgctgacttgactgataaacgaggtgatgaaggagatttgagcaatgcatttgctgctgaaatggacagaattcctggtgtcaggtatatacattttgatttccatcatgtttgtcgtggaggtaactttgacaatttgcaagctctctacaatcaaattgaggaagctattcataagcaaggatattttcttatgaacactaaaggagagattttgctggagcaaagtggtgtagttaggtccaattgcattgattgcctggaccgtacaaatgtgacacagagtttccttgcaagaaaatcattggattctcaattgcagctgatgggagcattattgtcatctgaaagcatttctctctctgataacattcatgatacattcaaaaaattatgggttgagcacggtgatgagctgagcctggagtatgctggctcttatgctttgaaaggggatctagtgagatatggaaggcagacattgcctggactaattaaagatggaatgagtgctctttcaagatattatttgaataattttcatgacggagtgcggcaagatgctcttgaccttattagcggttattatacagtcagccaaggcagctcttctccttttcataatggtgttgattcttcttcgtatctgccggtggcttcagcaatcatagttggtgggattaccgcgacaactttcactctcagtcaagttggacggaacgcgcagcacttgatctcctccattatctgtgcgggcttaacagtcggagtagtagccttggtgaaagccaatgggaaacagttttgctctaggccccgtctgtgtggtctaatctaatccttggtcttttccccccttccctttcatattgccctttgttagaaattgaatgtaaaaggattagaatgttgttttattcgttgcaagagtaaggttaaataaggaggcaggatggcctgccggtcccgtaatctgaagctgctaatttgtaagcctatagtttggatttgcacattctatttgttatactttttatgtatccatgaatagaaaattacgcctcgaaattccaaatttgtaataaatccgagagaccacatatttttttagtgtgactggttggtagcgacggtcttggcgtcttgcatagttgctgacacagaaaagacacctccgtccctctgtctggtacagtgagggtggggcatcaaaaacacaaagatgctgttcttatcaggcacagatgtttgccaagtataattccacgttgcgctatacagtcgggtttgctcgtatgcatttatgatctagatactta

SEQ ID NO: 84220 - DNA, 2877 bp, Zea Mays
aaaacagccacctcgcgggggccaagtacaagcatattgatactcatccatgaataaaacacccaaaggaagctatgtactcgttatcacttctcagaaagatgctggctcttatctgggctcccctgtgtaccaagtgaactcaatgaaattcttatgctgcaacgaggctatcaagcacttgactccacaggaaagaagggatgaggcatacttcatgtctctcctgagaattgcagaaactacttgtggattgtattattcatatgacagggatttgacactaaagtaagtgctttgtcatgcatgtatctgaataaggcaaccaaaagacattggcttaatattcagaaaaggccaacaacctttgtgtagtgattatgcacatccttaagatatttttttttctcaaacaacacatgagaactgtgtgcatttcattaagtagagaaaaaaaaccaaaggagaagcagtgtgtggcgctgttagccttgtactaggtggcctagggaagttggcctcctggaaaaaagccgaaacagtcagagcaccctgaatgtcctggatccagagattctgatctaaatcctcctgtaccgttcatctcctcgtcgacatttgtaactaatcgattgcctgttagttccattgttccttgcagatgtgtagtaggttcttgaagtatggatctattgagcacttcttaagaggttctagttgtatgactgttatcatgtactgaatgcctctgtggtgcatttatttttcttttgttatactggattgtatctaactgatgagatagaaataatgcgatgatggaatgctcctcaatgtaaagctataaacactatgattatgtagcttgcagagggcatccaagttggctgctgggagggtacataaaccactatggaagcaggctgatccacgttttgtttggaacaaaaatttgttagaggaacttattgaagctaagcttgatgagttcatcatcccactgatacaaggaaatatccaaaaaatgatagttccatgtcactgtttatgtatatatttggtttgcatgcataatgtggggcctataccttgccatcatccaaccatattagaaggatatatttcaaaaagttgcaatgcattcccattgttttctatacttggaggacgaacatgatcaggaagctggtgtcctttaactcctatagacccatacgttttcagtcagcacaatttaccttgaaggatagaccagtgaggataacattgttctcaaggagatgcaacaggcgtttaggaacaagaatgtggagaaggggtgcgaatcttgaaggcgccacagcaaattttgtagaaacagaacagttggttgagtatgaagatctcacatcctcatttatacagcttcgaggttcaattccacttctctgggagcaaatagtggatttaagctacaaaccacggcttagcattattgaacatgaagaaactcataaggttgttcaacgccactttcatgatctttcacaacgatatggcaagataattgttgctgacttgactgataaacgaggtgatgaaggagatttgagcaatgcatttgctgctgaaatggacagaattcctggtgtcaggtatatacattttgatttccatcatgtttgtcgtggaggtaactttgacaatttgcaagctctctacaatcaaattgaggaagctattcataagcaaggctgagcagatattttcttatgaacactaaaggagagattttgctggagcaaagtggtgtagttaggtccaattgcattgattgcctggaccgtacaaatgtgacacagagtttccttgcaagaaaatcattggattctcaattgcagctgatgggagcattattgtcatctgaaagcatttctctctctgataacattcatgatacattcaaaaaattatgggttgagcacggtgatgagctgagcctggagtatgctggctcttatgctttgaaaggggatctagtgagatatggaaggcagacattgcctggactaattaaagatggaatgagtgctctttcaagatattatttgaataattttcatgacggagtgcggcaagatgctcttgaccttattagcggttattatacagtcagccaaggcagctcttctccttttcataatggtgttgattcttcttcgtatctgccggtggcttcagcaatcatagttggtgggattaccgcgacaactttcactctcagtcaagttggacggaacgcgcagcacttgatctcctccattatctgtgcgggcttaacagtcggagtagtagccttggtgaaagccaatgggaaacagttttgctctaggccccgtctgtgtggtctaatctaatccttggtcttttccccccttccctttcatattgccctttgttagaaattgaatgtaaaaggattagaatgttgttttattcgttgcaagagtaaggttaaataaggaggcaggatggcctgccggtcccgtaatctgaagctgctaatttgtaagcctatagtttggatttgcacattctatttgttatactttttatgtatccatgaatagaaaattacgcctcgaaattccaaatttgtaataaatccgagagaccacatatttttttagtgtgactggttggtagcgacggtcttggcgtcttgcatagttgctgacacagaaaagacacctccgtccctctgtctggtacagtgagggtggggcatcaaaaacacaaagatgctgttcttatcaggcacagatgtttgccaagtataattccacgttgcgctatacagtcgggtttgctcgtatgcatttatgatctagatactta

SEQ ID NO: 84221 - DNA, 2043 bp, Zea Mays
cagcatttctgtggattaattgaagctatgtactcgttatcacttctcagaaagatgctggctcttatctgggctcccctgtgtaccaagtgaactcaatgaaattcttatgctgcaacgaggctatcaagcacttgactccacaggaaagaagggatgaggcatacttcatgtctctcctgagaattgcagaaactacttgtggattgtattattcatatgacagggatttgacactaaacttgcagagggcatccaagttggctgctgggagggtacataaaccactatggaagcaggctgatccacgttttgtttggaacaaaaatttgttagaggaacttattgaagctaagcttgatgagttcatcatcccactgatacaaggaagttttcagtcagcacaatttaccttgaaggatagaccagtgaggataacattgttctcaaggagatgcaacaggcgtttaggaacaagaatgtggagaaggggtgcgaatcttgaaggcgccacagcaaattttgtagaaacagaacagttggttgagtatgaagatctcacatcctcatttatacagcttcgaggttcaattccacttctctgggagcaaatagtggatttaagctacaaaccacggcttagcattattgaacatgaagaaactcataaggttgttcaacgccactttcatgatctttcacaacgatatggcaagataattgttgctgacttgactgataaacgaggtgatgaaggagatttgagcaatgcatttgctgctgaaatggacagaattcctggtgtcaggtatatacattttgatttccatcatgtttgtcgtggaggtaactttgacaatttgcaagctctctacaatcaaattgaggaagctattcataagcaaggatattttcttatgaacactaaaggagagattttgctggagcaaagtggtgtagttaggtccaattgcattgattgcctggaccgtacaaatgtgacacagagtttccttgcaagaaaatcattggattctcaattgcagctgatgggagcattattgtcatctgaaagcatttctctctctgataacattcatgatacattcaaaaaattatgggttgagcacggtgatgagctgagcctggagtatgctggctcttatgctttgaaaggggatctagtgagatatggaaggcagacattgcctggactaattaaagatggaatgagtgctctttcaagatattatttgaataattttcatgacggagtgcggcaagatgctcttgaccttattagcggttattatacagtcagccaaggcagctcttctccttttcataatggtgttgattcttcttcgtatctgccggtggcttcagcaatcatagttggtgggattaccgcgacaactttcactctcagtcaagttggacggaacgcgcagcacttgatctcctccattatctgtgcgggcttaacagtcggagtagtagccttggtgaaagccaatgggaaacagttttgctctaggccccgtctgtgtggtctaatctaatccttggtcttttccccccttccctttcatattgccctttgttagaaattgaatgtaaaaggattagaatgttgttttattcgttgcaagagtaaggttaaataaggaggcaggatggcctgccggtcccgtaatctgaagctgctaatttgtaagcctatagtttggatttgcacattctatttgttatactttttatgtatccatgaatagaaaattacgcctcgaaattccaaatttgtaataaatccgagagaccacatatttttttagtgtgactggttggtagcgacggtcttggcgtcttgcatagttgctgacacagaaaagacacctccgtccctctgtctggtacagtgagggtggggcatcaaaaacacaaagatgctgttcttatcaggcacagatgtttgccaagtataattccacgttgcgctatacagtcgggtttgctcgtatgcatttatgatctagatactta

SEQ ID NO: 84222 - DNA, 2527 bp, Zea Mays
cgttacacacagttcctttcaggcttcacccgttttgctctcgagtctctcccggttcggatccaaattcagcaatccgacctgagaccaagaccgcgcaccacgcggctcgccgccgatggcgaacgccgacgccgacgaagcgccgctgctctctgtggaacacctccgtccaggatcctgcagccgcgagctcgagctgcgggagttccgcgaccgctacgtgatccgttcgctcgacggcgccgccgctttcgccgtccttcgctccggcggctccatccgccctctctccccagaggaagccgtagctgagagcgactgcaaggtttccagaatatacggcgtggtcggcaccataagattgctcgctggaagctatgtactcgttatcacttctcagaaagatgctggctcttatctgggctcccctgtgtaccaagtgaactcaatgaaattcttatgctgcaacgaggctatcaagcacttgactccacaggaaagaagggatgaggcatacttcatgtctctcctgagaattgcagaaactacttgtggattgtattattcatatgacagggatttgacactaaacttgcagagggcatccaagttggctgctgggagggtacataaaccactatggaagcaggctgatccacgttttgtttggaacaaaaatttgttagaggaacttattgaagctaagcttgatgagttcatcatcccactgatacaaggaagttttcagtcagcacaatttaccttgaaggatagaccagtgaggataacattgttctcaaggagatgcaacaggcgtttaggaacaagaatgtggagaaggggtgcgaatcttgaaggcgccacagcaaattttgtagaaacagaacagttggttgagtatgaagatctcacatcctcatttatacagcttcgaggttcaattccacttctctgggagcaaatagtggatttaagctacaaaccacggcttagcattattgaacatgaagaaactcataaggttgttcaacgccactttcatgatctttcacaacgatatggcaagataattgttgctgacttgactgataaagcaggagagctgcattctcatttcattaagaggagaaaaaaacaagggagaggctgaaccatctcgttttaacagttgttctatttgtccatcgagcgacaacggttcatctaatctgttgttacttgcagcgaggtgatgaaggagatttgagcaatgcatttgctgctgaaatggacagaattcctggtgtcaggtatatacattttgatttccatcatgtttgtcgtggaggtaactttgacaatttgcaagctctctacaatcaaattgaggaagctattcataagcaaggatattttcttatgaacactaaaggagagattttgctggagcaaagtggtgtagttaggtccaattgcattgattgcctggaccgtacaaatgtgacacagagtttccttgcaagaaaatcattggattctcaattgcagctgatgggagcattattgtcatctgaaagcatttctctctctgataacattcatgatacattcaaaaaattatgggttgagcacggtgatgagctgagcctggagtatgctggctcttatgctttgaaaggggatctagtgagatatggaaggcagacattgcctggactaattaaagatggaatgagtgctctttcaagatattatttgaataattttcatgacggagtgcggcaagatgctcttgaccttattagcggttattatacagtcagccaaggcagctcttctccttttcataatggtgttgattcttcttcgtatctgccggtggcttcagcaatcatagttggtgggattaccgcgacaactttcactctcagtcaagttggacggaacgcgcagcacttgatctcctccattatctgtgcgggcttaacagtcggagtagtagccttggtgaaagccaatgggaaacagttttgctctaggccccgtctgtgtggtctaatctaatccttggtcttttccccccttccctttcatattgccctttgttagaaattgaatgtaaaaggattagaatgttgttttattcgttgcaagagtaaggttaaataaggaggcaggatggcctgccggtcccgtaatctgaagctgctaatttgtaagcctatagtttggatttgcacattctatttgttatactttttatgtatccatgaatagaaaattacgcctcgaaattccaaatttgtaataaatccgagagaccacatatttttttagtgtgactggttggtagcgacggtcttggcgtcttgcatagttgctgacacagaaaagacacctccgtccctctgtctggtacagtgagggtggggcatcaaaaacacaaagatgctgttcttatcaggcacagatgtttgccaagtataattccacgttgcgctatacagtcgggtttgctcgtatgcatttatgatctagatactta

SEQ ID NO: 84223 - DNA, 2607 bp, Zea Mays
cgttacacacagttcctttcaggcttcacccgttttgctctcgagtctctcccggttcggatccaaattcagcaatccgacctgagaccaagaccgcgcaccacgcggctcgccgccgatggcgaacgccgacgccgacgaagcgccgctgctctctgtggaacacctccgtccaggatcctgcagccgcgagctcgagctgcgggagttccgcgaccgctacgtgatccgttcgctcgacggcgccgccgctttcgccgtccttcgctccggcggctccatccgccctctctccccagaggaagccgtagctgagagcgactgcaaggtttccagaatatacggcgtggtcggcaccataagattgctcgctggaagctatgtactcgttatcacttctcagaaagatgctggctcttatctgggctcccctgtgtaccaagtgaactcaatgaaattcttatgctgcaacgaggctatcaagcacttgactccacaggaaagaagggatgaggcatacttcatgtctctcctgagaattgcagaaactacttgtggattgtattattcatatgacagggatttgacactaaacttgcagagggcatccaagttggctgctgggagggtacataaaccactatggaagcaggctgatccacgttttgtttggaacaaaaatttgttagaggaacttattgaagctaagcttgatgagttcatcatcccactgatacaaggaaatatccaaaaaatgatagttccatgtcactgtttatgtatatatttggtttgcatgcataatgtggggcctataccttgccatcatccaaccatattagaaggatatatttcaaaaagttgcaatgcattcccattgttttctatacttggaggacgaacatgatcaggaagctggtgtcctttaactcctatagacccatacgttttcagtcagcacaatttaccttgaaggatagaccagtgaggataacattgttctcaaggagatgcaacaggcgtttaggaacaagaatgtggagaaggggtgcgaatcttgaaggcgccacagcaaattttgtagaaacagaacagttggttgagtatgaagatctcacatcctcatttatacagcttcgaggttcaattccacttctctgggagcaaatagtggatttaagctacaaaccacggcttagcattattgaacatgaagaaactcataaggttgttcaacgccactttcatgatctttcacaacgatatggcaagataattgttgctgacttgactgataaacgaggtgatgaaggagatttgagcaatgcatttgctgctgaaatggacagaattcctggtgtcaggtatatacattttgatttccatcatgtttgtcgtggaggtaactttgacaatttgcaagctctctacaatcaaattgaggaagctattcataagcaaggctgagcagatattttcttatgaacactaaaggagagattttgctggagcaaagtggtgtagttaggtccaattgcattgattgcctggaccgtacaaatgtgacacagagtttccttgcaagaaaatcattggattctcaattgcagctgatgggagcattattgtcatctgaaagcatttctctctctgataacattcatgatacattcaaaaaattatgggttgagcacggtgatgagctgagcctggagtatgctggctcttatgctttgaaaggggatctagtgagatatggaaggcagacattgcctggactaattaaagatggaatgagtgctctttcaagatattatttgaataattttcatgacggagtgcggcaagatgctcttgaccttattagcggttattatacagtcagccaaggcagctcttctccttttcataatggtgttgattcttcttcgtatctgccggtggcttcagcaatcatagttggtgggattaccgcgacaactttcactctcagtcaagttggacggaacgcgcagcacttgatctcctccattatctgtgcgggcttaacagtcggagtagtagccttggtgaaagccaatgggaaacagttttgctctaggccccgtctgtgtggtctaatctaatccttggtcttttccccccttccctttcatattgccctttgttagaaattgaatgtaaaaggattagaatgttgttttattcgttgcaagagtaaggttaaataaggaggcaggatggcctgccggtcccgtaatctgaagctgctaatttgtaagcctatagtttggatttgcacattctatttgttatactttttatgtatccatgaatagaaaattacgcctcgaaattccaaatttgtaataaatccgagagaccacatatttttttagtgtgactggttggtagcgacggtcttggcgtcttgcatagttgctgacacagaaaagacacctccgtccctctgtctggtacagtgagggtggggcatcaaaaacacaaagatgctgttcttatcaggcacagatgtttgccaagtataattccacgttgcgctatacagtcgggtttgctcgtatgcatttatgatctagatactta

SEQ ID NO: 84224 - DNA, 3094 bp, Zea Mays
cgttacacacagttcctttcaggcttcacccgttttgctctcgagtctctcccggttcggatccaaattcagcaatccgacctgagaccaagaccgcgcaccacgcggctcgccgccgatggcgaacgccgacgccgacgaagcgccgctgctctctgtggaacacctccgtccaggatcctgcagccgcgagctcgagctgcgggagttccgcgaccgctacgtgatccgttcgctcgacggcgccgccgctttcgccgtccttcgctccggcggctccatccgccctctctccccagaggaagccgtagctgagagcgactgcaaggtttccagaatatacggcgtggtcggcaccataagattgctcgctggaagctatgtactcgttatcacttctcagaaagatgctggctcttatctgggctcccctgtgtaccaagtgaactcaatgaaattcttatgctgcaacgaggctatcaagcacttgactccacaggaaagaagggatgaggcatacttcatgtctctcctgagaattgcagaaactacttgtggattgtattattcatatgacagggatttgacactaaagtaagtgctttgtcatgcatgtatctgaataaggcaaccaaaagacattggcttaatattcagaaaaggccaacaacctttgtgtagtgattatgcacatccttaagatatttttttttctcaaacaacacatgagaactgtgtgcatttcattaagtagagaaaaaaaaccaaaggagaagcagtgtgtggcgctgttagccttgtactaggtggcctagggaagttggcctcctggaaaaaagccgaaacagtcagagcaccctgaatgtcctggatccagagattctgatctaaatcctcctgtaccgttcatctcctcgtcgacatttgtaactaatcgattgcctgttagttccattgttccttgcagatgtgtagtaggttcttgaagtatggatctattgagcacttcttaagaggttctagttgtatgactgttatcatgtactgaatgcctctgtggtgcatttatttttcttttgttatactggattgtatctaactgatgagatagaaataatgcgatgatggaatgctcctcaatgtaaagctataaacactatgattatgtagcttgcagagggcatccaagttggctgctgggagggtacataaaccactatggaagcaggctgatccacgttttgtttggaacaaaaatttgttagaggaacttattgaagctaagcttgatgagttcatcatcccactgatacaaggaagttttcagtcagcacaatttaccttgaaggatagaccagtgaggataacattgttctcaaggagatgcaacaggcgtttaggaacaagaatgtggagaaggggtgcgaatcttgaaggcgccacagcaaattttgtagaaacagaacagttggttgagtatgaagatctcacatcctcatttatacagcttcgaggttcaattccacttctctgggagcaaatagtggatttaagctacaaaccacggcttagcattattgaacatgaagaaactcataaggttgttcaacgccactttcatgatctttcacaacgatatggcaagataattgttgctgacttgactgataaagcaggagagctgcattctcatttcattaagaggagaaaaaaacaagggagaggctgaaccatctcgttttaacagttgttctatttgtccatcgagcgacaacggttcatctaatctgttgttacttgcagcgaggtgatgaaggagatttgagcaatgcatttgctgctgaaatggacagaattcctggtgtcaggtatatacattttgatttccatcatgtttgtcgtggaggtaactttgacaatttgcaagctctctacaatcaaattgaggaagctattcataagcaaggctgagcagatattttcttatgaacactaaaggagagattttgctggagcaaagtggtgtagttaggtccaattgcattgattgcctggaccgtacaaatgtgacacagagtttccttgcaagaaaatcattggattctcaattgcagctgatgggagcattattgtcatctgaaagcatttctctctctgataacattcatgatacattcaaaaaattatgggttgagcacggtgatgagctgagcctggagtatgctggctcttatgctttgaaaggggatctagtgagatatggaaggcagacattgcctggactaattaaagatggaatgagtgctctttcaagatattatttgaataattttcatgacggagtgcggcaagatgctcttgaccttattagcggttattatacagtcagccaaggcagctcttctccttttcataatgtatctgccggtggcttcagcaatcatagttggtgggattaccgcgacaactttcactctcagtcaagttggacggaacgcgcagcacttgatctcctccattatctgtgcgggcttaacagtcggagtagtagccttggtgaaagccaatgggaaacagttttgctctaggccccgtctgtgtggtctaatctaatccttggtcttttccccccttccctttcatattgccctttgttagaaattgaatgtaaaaggattagaatgttgttttattcgttgcaagagtaaggttaaataaggaggcaggatggcctgccggtcccgtaatctgaagctgctaatttgtaagcctatagtttggatttgcacattctatttgttatactttttatgtatccatgaatagaaaattacgcctcgaaattccaaatttgtaataaatccgagagaccacatatttttttagtgtgactggttggtagcgacggtcttggcgtcttgcatagttgctgacacagaaaagacacctccgtccctctgtctggtacagtgagggtggggcatcaaaaacacaaagatgctgttcttatcaggcacagatgtttgccaagtataattccacgttgcgctatacagtcgggtttgctcgtatgcatttatgatctagatactta

SEQ ID NO: 84225 - DNA, 2338 bp, Zea Mays
cgttacacacagttcctttcaggcttcacccgttttgctctcgagtctctcccggttcggatccaaattcagcaatccgacctgagaccaagaccgcgcaccacgcggctcgccgccgatggcgaacgccgacgccgacgaagcgccgctgctctctgtggaacacctccgtccaggatcctgcagccgcgagctcgagctgcgggagttccgcgaccgctacgtgatccgttcgctcgacggcgccgccgctttcgccgtccttcgctccggcggctccatccgccctctctccccagaggaagccgtagctgagagcgactgcaaggtttccagaatatacggcgtggtcggcaccataagattgctcgctggaagctatgtactcgttatcacttctcagaaagatgctggctcttatctgggctcccctgtgtaccaagtgaactcaatgaaattcttatgctgcaacgaggctatcaagcacttgactccacaggaaagaagggatgaggcatacttcatgtctctcctgagaattgcagaaactacttgtggattgtattattcatatgacagggatttgacactaaagctgatccacgttttgtttggaacaaaaatttgttagaggaacttattgaagctaagcttgatgagttcatcatcccactgatacaaggaagttttcagtcagcacaatttaccttgaaggatagaccagtgaggataacattgttctcaaggagatgcaacaggcgtttaggaacaagaatgtggagaaggggtgcgaatcttgaaggcgccacagcaaattttgtagaaacagaacagttggttgagtatgaagatctcacatcctcatttatacagcttcgaggttcaattccacttctctgggagcaaatagtggatttaagctacaaaccacggcttagcattattgaacatgaagaaactcataaggttgttcaacgccactttcatgatctttcacaacgatatggcaagataattgttgctgacttgactgataaacgaggtgatgaaggagatttgagcaatgcatttgctgctgaaatggacagaattcctggtgtcaggtatatacattttgatttccatcatgtttgtcgtggaggtaactttgacaatttgcaagctctctacaatcaaattgaggaagctattcataagcaaggatattttcttatgaacactaaaggagagattttgctggagcaaagtggtgtagttaggtccaattgcattgattgcctggaccgtacaaatgtgacacagagtttccttgcaagaaaatcattggattctcaattgcagctgatgggagcattattgtcatctgaaagcatttctctctctgataacattcatgatacattcaaaaaattatgggttgagcacggtgatgagctgagcctggagtatgctggctcttatgctttgaaaggggatctagtgagatatggaaggcagacattgcctggactaattaaagatggaatgagtgctctttcaagatattatttgaataattttcatgacggagtgcggcaagatgctcttgaccttattagcggttattatacagtcagccaaggcagctcttctccttttcataatggtgttgattcttcttcgtatctgccggtggcttcagcaatcatagttggtgggattaccgcgacaactttcactctcagtcaagttggacggaacgcgcagcacttgatctcctccattatctgtgcgggcttaacagtcggagtagtagccttggtgaaagccaatgggaaacagttttgctctaggccccgtctgtgtggtctaatctaatccttggtcttttccccccttccctttcatattgccctttgttagaaattgaatgtaaaaggattagaatgttgttttattcgttgcaagagtaaggttaaataaggaggcaggatggcctgccggtcccgtaatctgaagctgctaatttgtaagcctatagtttggatttgcacattctatttgttatactttttatgtatccatgaatagaaaattacgcctcgaaattccaaatttgtaataaatccgagagaccacatatttttttagtgtgactggttggtagcgacggtcttggcgtcttgcatagttgctgacacagaaaagacacctccgtccctctgtctggtacagtgagggtggggcatcaaaaacacaaagatgctgttcttatcaggcacagatgtttgccaagtataattccacgttgcgctatacagtcgggtttgctcgtatgcatttatgatctagatactta

SEQ ID NO: 84226 - DNA, 2535 bp, Zea Mays
cgttacacacagttcctttcaggcttcacccgttttgctctcgagtctctcccggttcggatccaaattcagcaatccgacctgagaccaagaccgcgcaccacgcggctcgccgccgatggcgaacgccgacgccgacgaagcgccgctgctctctgtggaacacctccgtccaggatcctgcagccgcgagctcgagctgcgggagttccgcgaccgctacgtgatccgttcgctcgacggcgccgccgctttcgccgtccttcgctccggcggctccatccgccctctctccccagaggaagccgtagctgagagcgactgcaaggtttccagaatatacggcgtggtcggcaccataagattgctcgctggaagctatgtactcgttatcacttctcagaaagatgctggctcttatctgggctcccctgtgtaccaagtgaactcaatgaaattcttatgctgcaacgaggctatcaagcacttgactccacaggaaagaagggatgaggcatacttcatgtctctcctgagaattgcagaaactacttgtggattgtattattcatatgacagggatttgacactaaacttgcagagggcatccaagttggctgctgggagggtacataaaccactatggaagcaggctgatccacgttttgtttggaacaaaaatttgttagaggaacttattgaagctaagcttgatgagttcatcatcccactgatacaaggaagttttcagtcagcacaatttaccttgaaggatagaccagtgaggataacattgttctcaaggagatgcaacaggcgtttaggaacaagaatgtggagaaggggtgcgaatcttgaaggcgccacagcaaattttgtagaaacagaacagttggttgagtatgaagatctcacatcctcatttatacagcttcgaggttcaattccacttctctgggagcaaatagtggatttaagctacaaaccacggcttagcattattgaacatgaagaaactcataaggttgttcaacgccactttcatgatctttcacaacgatatggcaagataattgttgctgacttgactgataaagcaggagagctgcattctcatttcattaagaggagaaaaaaacaagggagaggctgaaccatctcgttttaacagttgttctatttgtccatcgagcgacaacggttcatctaatctgttgttacttgcagcgaggtgatgaaggagatttgagcaatgcatttgctgctgaaatggacagaattcctggtgtcaggtatatacattttgatttccatcatgtttgtcgtggaggtaactttgacaatttgcaagctctctacaatcaaattgaggaagctattcataagcaaggctgagcagatattttcttatgaacactaaaggagagattttgctggagcaaagtggtgtagttaggtccaattgcattgattgcctggaccgtacaaatgtgacacagagtttccttgcaagaaaatcattggattctcaattgcagctgatgggagcattattgtcatctgaaagcatttctctctctgataacattcatgatacattcaaaaaattatgggttgagcacggtgatgagctgagcctggagtatgctggctcttatgctttgaaaggggatctagtgagatatggaaggcagacattgcctggactaattaaagatggaatgagtgctctttcaagatattatttgaataattttcatgacggagtgcggcaagatgctcttgaccttattagcggttattatacagtcagccaaggcagctcttctccttttcataatggtgttgattcttcttcgtatctgccggtggcttcagcaatcatagttggtgggattaccgcgacaactttcactctcagtcaagttggacggaacgcgcagcacttgatctcctccattatctgtgcgggcttaacagtcggagtagtagccttggtgaaagccaatgggaaacagttttgctctaggccccgtctgtgtggtctaatctaatccttggtcttttccccccttccctttcatattgccctttgttagaaattgaatgtaaaaggattagaatgttgttttattcgttgcaagagtaaggttaaataaggaggcaggatggcctgccggtcccgtaatctgaagctgctaatttgtaagcctatagtttggatttgcacattctatttgttatactttttatgtatccatgaatagaaaattacgcctcgaaattccaaatttgtaataaatccgagagaccacatatttttttagtgtgactggttggtagcgacggtcttggcgtcttgcatagttgctgacacagaaaagacacctccgtccctctgtctggtacagtgagggtggggcatcaaaaacacaaagatgctgttcttatcaggcacagatgtttgccaagtataattccacgttgcgctatacagtcgggtttgctcgtatgcatttatgatctagatactta

SEQ ID NO: 84227 - DNA, 2949 bp, Zea Mays
cgttacacacagttcctttcaggcttcacccgttttgctctcgagtctctcccggttcggatccaaattcagcaatccgacctgagaccaagaccgcgcaccacgcggctcgccgccgatggcgaacgccgacgccgacgaagcgccgctgctctctgtggaacacctccgtccaggatcctgcagccgcgagctcgagctgcgggagttccgcgaccgctacgtgatccgttcgctcgacggcgccgccgctttcgccgtccttcgctccggcggctccatccgccctctctccccagaggaagccgtagctgagagcgactgcaaggtttccagaatatacggcgtggtcggcaccataagattgctcgctggaagctatgtactcgttatcacttctcagaaagatgctggctcttatctgggctcccctgtgtaccaagtgaactcaatgaaattcttatgctgcaacgaggctatcaagcacttgactccacaggaaagaagggatgaggcatacttcatgtctctcctgagaattgcagaaactacttgtggattgtattattcatatgacagggatttgacactaaagtaagtgctttgtcatgcatgtatctgaataaggcaaccaaaagacattggcttaatattcagaaaaggccaacaacctttgtgtagtgattatgcacatccttaagatatttttttttctcaaacaacacatgagaactgtgtgcatttcattaagtagagaaaaaaaaccaaaggagaagcagtgtgtggcgctgttagccttgtactaggtggcctagggaagttggcctcctggaaaaaagccgaaacagtcagagcaccctgaatgtcctggatccagagattctgatctaaatcctcctgtaccgttcatctcctcgtcgacatttgtaactaatcgattgcctgttagttccattgttccttgcagatgtgtagtaggttcttgaagtatggatctattgagcacttcttaagaggttctagttgtatgactgttatcatgtactgaatgcctctgtggtgcatttatttttcttttgttatactggattgtatctaactgatgagatagaaataatgcgatgatggaatgctcctcaatgtaaagctataaacactatgattatgtagcttgcagagggcatccaagttggctgctgggagggtacataaaccactatggaagcaggctgatccacgttttgtttggaacaaaaatttgttagaggaacttattgaagctaagcttgatgagttcatcatcccactgatacaaggaagttttcagtcagcacaatttaccttgaaggatagaccagtgaggataacattgttctcaaggagatgcaacaggcgtttaggaacaagaatgtggagaaggggtgcgaatcttgaaggcgccacagcaaattttgtagaaacagaacagttggttgacttcgaggttcaattccacttctctgggagcaaatagtggatttaagctacaaaccacggcttagcattattgaacatgaagaaactcataaggttgttcaacgccactttcatgatctttcacaacgatatggcaagataattgttgctgacttgactgataaacgaggtgatgaaggagatttgagcaatgcatttgctgctgaaatggacagaattcctggtgtcaggtatatacattttgatttccatcatgtttgtcgtggaggtaactttgacaatttgcaagctctctacaatcaaattgaggaagctattcataagcaaggctgagcagatattttcttatgaacactaaaggagagattttgctggagcaaagtggtgtagttaggtccaattgcattgattgcctggaccgtacaaatgtgacacagagtttccttgcaagaaaatcattggattctcaattgcagctgatgggagcattattgtcatctgaaagcatttctctctctgataacattcatgatacattcaaaaaattatgggttgagcacggtgatgagctgagcctggagtatgctggctcttatgctttgaaaggggatctagtgagatatggaaggcagacattgcctggactaattaaagatggaatgagtgctctttcaagatattatttgaataattttcatgacggagtgcggcaagatgctcttgaccttattagcggttattatacagtcagccaaggcagctcttctccttttcataatggtgttgattcttcttcgtatctgccggtggcttcagcaatcatagttggtgggattaccgcgacaactttcactctcagtcaagttggacggaacgcgcagcacttgatctcctccattatctgtgcgggcttaacagtcggagtagtagccttggtgaaagccaatgggaaacagttttgctctaggccccgtctgtgtggtctaatctaatccttggtcttttccccccttccctttcatattgccctttgttagaaattgaatgtaaaaggattagaatgttgttttattcgttgcaagagtaaggttaaataaggaggcaggatggcctgccggtcccgtaatctgaagctgctaatttgtaagcctatagtttggatttgcacattctatttgttatactttttatgtatccatgaatagaaaattacgcctcgaaattccaaatttgtaataaatccgagagaccacatatttttttagtgtgactggttggtagcgacggtcttggcgtcttgcatagttgctgacacagaaaagacacctccgtccctctgtctggtacagtgagggtggggcatcaaaaacacaaagatgctgttcttatcaggcacagatgtttgccaagtataattccacgttgcgctatacagtcgggtttgctcgtatgcatttatgatctagatactta

SEQ ID NO: 84228 - DNA, 3111 bp, Zea Mays
cgttacacacagttcctttcaggcttcacccgttttgctctcgagtctctcccggttcggatccaaattcagcaatccgacctgagaccaagaccgcgcaccacgcggctcgccgccgatggcgaacgccgacgccgacgaagcgccgctgctctctgtggaacacctccgtccaggatcctgcagccgcgagctcgagctgcgggagttccgcgaccgctacgtgatccgttcgctcgacggcgccgccgctttcgccgtccttcgctccggcggctccatccgccctctctccccagaggaagccgtagctgagagcgactgcaaggtttccagaatatacggcgtggtcggcaccataagattgctcgctggaagctatgtactcgttatcacttctcagaaagatgctggctcttatctgggctcccctgtgtaccaagtgaactcaatgaaattcttatgctgcaacgaggctatcaagcacttgactccacaggaaagaagggatgaggcatacttcatgtctctcctgagaattgcagaaactacttgtggattgtattattcatatgacagggatttgacactaaagtaagtgctttgtcatgcatgtatctgaataaggcaaccaaaagacattggcttaatattcagaaaaggccaacaacctttgtgtagtgattatgcacatccttaagatatttttttttctcaaacaacacatgagaactgtgtgcatttcattaagtagagaaaaaaaaccaaaggagaagcagtgtgtggcgctgttagccttgtactaggtggcctagggaagttggcctcctggaaaaaagccgaaacagtcagagcaccctgaatgtcctggatccagagattctgatctaaatcctcctgtaccgttcatctcctcgtcgacatttgtaactaatcgattgcctgttagttccattgttccttgcagatgtgtagtaggttcttgaagtatggatctattgagcacttcttaagaggttctagttgtatgactgttatcatgtactgaatgcctctgtggtgcatttatttttcttttgttatactggattgtatctaactgatgagatagaaataatgcgatgatggaatgctcctcaatgtaaagctataaacactatgattatgtagcttgcagagggcatccaagttggctgctgggagggtacataaaccactatggaagcaggctgatccacgttttgtttggaacaaaaatttgttagaggaacttattgaagctaagcttgatgagttcatcatcccactgatacaaggaagttttcagtcagcacaatttaccttgaaggatagaccagtgaggataacattgttctcaaggagatgcaacaggcgtttaggaacaagaatgtggagaaggggtgcgaatcttgaaggcgccacagcaaattttgtagaaacagaacagttggttgagtatgaagatctcacatcctcatttatacagcttcgaggttcaattccacttctctgggagcaaatagtggatttaagctacaaaccacggcttagcattattgaacatgaagaaactcataaggttgttcaacgccactttcatgatctttcacaacgatatggcaagataattgttgctgacttgactgataaagcaggagagctgcattctcatttcattaagaggagaaaaaaacaagggagaggctgaaccatctcgttttaacagttgttctatttgtccatcgagcgacaacggttcatctaatctgttgttacttgcagcgaggtgatgaaggagatttgagcaatgcatttgctgctgaaatggacagaattcctggtgtcaggtatatacattttgatttccatcatgtttgtcgtggaggtaactttgacaatttgcaagctctctacaatcaaattgaggaagctattcataagcaaggctgagcagatattttcttatgaacactaaaggagagattttgctggagcaaagtggtgtagttaggtccaattgcattgattgcctggaccgtacaaatgtgacacagagtttccttgcaagaaaatcattggattctcaattgcagctgatgggagcattattgtcatctgaaagcatttctctctctgataacattcatgatacattcaaaaaattatgggttgagcacggtgatgagctgagcctggagtatgctggctcttatgctttgaaaggggatctagtgagatatggaaggcagacattgcctggactaattaaagatggaatgagtgctctttcaagatattatttgaataattttcatgacggagtgcggcaagatgctcttgaccttattagcggttattatacagtcagccaaggcagctcttctccttttcataatggtgttgattcttcttcgtatctgccggtggcttcagcaatcatagttggtgggattaccgcgacaactttcactctcagtcaagttggacggaacgcgcagcacttgatctcctccattatctgtgcgggcttaacagtcggagtagtagccttggtgaaagccaatgggaaacagttttgctctaggccccgtctgtgtggtctaatctaatccttggtcttttccccccttccctttcatattgccctttgttagaaattgaatgtaaaaggattagaatgttgttttattcgttgcaagagtaaggttaaataaggaggcaggatggcctgccggtcccgtaatctgaagctgctaatttgtaagcctatagtttggatttgcacattctatttgttatactttttatgtatccatgaatagaaaattacgcctcgaaattccaaatttgtaataaatccgagagaccacatatttttttagtgtgactggttggtagcgacggtcttggcgtcttgcatagttgctgacacagaaaagacacctccgtccctctgtctggtacagtgagggtggggcatcaaaaacacaaagatgctgttcttatcaggcacagatgtttgccaagtataattccacgttgcgctatacagtcgggtttgctcgtatgcatttatgatctagatactta

SEQ ID NO: 84229 - DNA, 3183 bp, Zea Mays
cgttacacacagttcctttcaggcttcacccgttttgctctcgagtctctcccggttcggatccaaattcagcaatccgacctgagaccaagaccgcgcaccacgcggctcgccgccgatggcgaacgccgacgccgacgaagcgccgctgctctctgtggaacacctccgtccaggatcctgcagccgcgagctcgagctgcgggagttccgcgaccgctacgtgatccgttcgctcgacggcgccgccgctttcgccgtccttcgctccggcggctccatccgccctctctccccagaggaagccgtagctgagagcgactgcaaggtttccagaatatacggcgtggtcggcaccataagattgctcgctggaagctatgtactcgttatcacttctcagaaagatgctggctcttatctgggctcccctgtgtaccaagtgaactcaatgaaattcttatgctgcaacgaggctatcaagcacttgactccacaggaaagaagggatgaggcatacttcatgtctctcctgagaattgcagaaactacttgtggattgtattattcatatgacagggatttgacactaaagtaagtgctttgtcatgcatgtatctgaataaggcaaccaaaagacattggcttaatattcagaaaaggccaacaacctttgtgtagtgattatgcacatccttaagatatttttttttctcaaacaacacatgagaactgtgtgcatttcattaagtagagaaaaaaaaccaaaggagaagcagtgtgtggcgctgttagccttgtactaggtggcctagggaagttggcctcctggaaaaaagccgaaacagtcagagcaccctgaatgtcctggatccagagattctgatctaaatcctcctgtaccgttcatctcctcgtcgacatttgtaactaatcgattgcctgttagttccattgttccttgcagatgtgtagtaggttcttgaagtatggatctattgagcacttcttaagaggttctagttgtatgactgttatcatgtactgaatgcctctgtggtgcatttatttttcttttgttatactggattgtatctaactgatgagatagaaataatgcgatgatggaatgctcctcaatgtaaagctataaacactatgattatgtagcttgcagagggcatccaagttggctgctgggagggtacataaaccactatggaagcaggctgatccacgttttgtttggaacaaaaatttgttagaggaacttattgaagctaagcttgatgagttcatcatcccactgatacaaggaaatatccaaaaaatgatagttccatgtcactgtttatgtatatatttggtttgcatgcataatgtggggcctataccttgccatcatccaaccatattagaaggatatatttcaaaaagttgcaatgcattcccattgttttctatacttggaggacgaacatgatcaggaagctggtgtcctttaactcctatagacccatacgttttcagtcagcacaatttaccttgaaggatagaccagtgaggataacattgttctcaaggagatgcaacaggcgtttaggaacaagaatgtggagaaggggtgcgaatcttgaaggcgccacagcaaattttgtagaaacagaacagttggttgagtatgaagatctcacatcctcatttatacagcttcgaggttcaattccacttctctgggagcaaatagtggatttaagctacaaaccacggcttagcattattgaacatgaagaaactcataaggttgttcaacgccactttcatgatctttcacaacgatatggcaagataattgttgctgacttgactgataaacgaggtgatgaaggagatttgagcaatgcatttgctgctgaaatggacagaattcctggtgtcaggtatatacattttgatttccatcatgtttgtcgtggaggtaactttgacaatttgcaagctctctacaatcaaattgaggaagctattcataagcaaggctgagcagatattttcttatgaacactaaaggagagattttgctggagcaaagtggtgtagttaggtccaattgcattgattgcctggaccgtacaaatgtgacacagagtttccttgcaagaaaatcattggattctcaattgcagctgatgggagcattattgtcatctgaaagcatttctctctctgataacattcatgatacattcaaaaaattatgggttgagcacggtgatgagctgagcctggagtatgctggctcttatgctttgaaaggggatctagtgagatatggaaggcagacattgcctggactaattaaagatggaatgagtgctctttcaagatattatttgaataattttcatgacggagtgcggcaagatgctcttgaccttattagcggttattatacagtcagccaaggcagctcttctccttttcataatggtgttgattcttcttcgtatctgccggtggcttcagcaatcatagttggtgggattaccgcgacaactttcactctcagtcaagttggacggaacgcgcagcacttgatctcctccattatctgtgcgggcttaacagtcggagtagtagccttggtgaaagccaatgggaaacagttttgctctaggccccgtctgtgtggtctaatctaatccttggtcttttccccccttccctttcatattgccctttgttagaaattgaatgtaaaaggattagaatgttgttttattcgttgcaagagtaaggttaaataaggaggcaggatggcctgccggtcccgtaatctgaagctgctaatttgtaagcctatagtttggatttgcacattctatttgttatactttttatgtatccatgaatagaaaattacgcctcgaaattccaaatttgtaataaatccgagagaccacatatttttttagtgtgactggttggtagcgacggtcttggcgtcttgcatagttgctgacacagaaaagacacctccgtccctctgtctggtacagtgagggtggggcatcaaaaacacaaagatgctgttcttatcaggcacagatgtttgccaagtataattccacgttgcgctatacagtcgggtttgctcgtatgcatttatgatctagatactta

SEQ ID NO: 84230 - DNA, 3018 bp, Zea Mays
cgttacacacagttcctttcaggcttcacccgttttgctctcgagtctctcccggttcggatccaaattcagcaatccgacctgagaccaagaccgcgcaccacgcggctcgccgccgatggcgaacgccgacgccgacgaagcgccgctgctctctgtggaacacctccgtccaggatcctgcagccgcgagctcgagctgcgggagttccgcgaccgctacgtgatccgttcgctcgacggcgccgccgctttcgccgtccttcgctccggcggctccatccgccctctctccccaggagagctgcatttcattccattaagaagaaaaacagagataatacaaaacagccacctcgcgggggccaagtacaagcatattgatactcatccatgaataaaacacccaaaggaagctatgtactcgttatcacttctcagaaagatgctggctcttatctgggctcccctgtgtaccaagtgaactcaatgaaattcttatgctgcaacgaggctatcaagcacttgactccacaggaaagaagggatgaggcatacttcatgtctctcctgagaattgcagaaactacttgtggattgtattattcatatgacagggatttgacactaaagtaagtgctttgtcatgcatgtatctgaataaggcaaccaaaagacattggcttaatattcagaaaaggccaacaacctttgtgtagtgattatgcacatccttaagatatttttttttctcaaacaacacatgagaactgtgtgcatttcattaagtagagaaaaaaaaccaaaggagaagcagtgtgtggcgctgttagccttgtactaggtggcctagggaagttggcctcctggaaaaaagccgaaacagtcagagcaccctgaatgtcctggatccagagattctgatctaaatcctcctgtaccgttcatctcctcgtcgacatttgtaactaatcgattgcctgttagttccattgttccttgcagatgtgtagtaggttcttgaagtatggatctattgagcacttcttaagaggttctagttgtatgactgttatcatgtactgaatgcctctgtggtgcatttatttttcttttgttatactggattgtatctaactgatgagatagaaataatgcgatgatggaatgctcctcaatgtaaagctataaacactatgattatgtagcttgcagagggcatccaagttggctgctgggagggtacataaaccactatggaagcaggctgatccacgttttgtttggaacaaaaatttgttagaggaacttattgaagctaagcttgatgagttcatcatcccactgatacaaggaagttttcagtcagcacaatttaccttgaaggatagaccagtgaggataacattgttctcaaggagatgcaacaggcgtttaggaacaagaatgtggagaaggggtgcgaatcttgaaggcgccacagcaaattttgtagaaacagaacagttggttgagtatgaagatctcacatcctcatttatacagcttcgaggttcaattccacttctctgggagcaaatagtggatttaagctacaaaccacggcttagcattattgaacatgaagaaactcataaggttgttcaacgccactttcatgatctttcacaacgatatggcaagataattgttgctgacttgactgataaacgaggtgatgaaggagatttgagcaatgcatttgctgctgaaatggacagaattcctggtgtcaggtatatacattttgatttccatcatgtttgtcgtggaggtaactttgacaatttgcaagctctctacaatcaaattgaggaagctattcataagcaaggctgagcagatattttcttatgaacactaaaggagagattttgctggagcaaagtggtgtagttaggtccaattgcattgattgcctggaccgtacaaatgtgacacagagtttccttgcaagaaaatcattggattctcaattgcagctgatgggagcattattgtcatctgaaagcatttctctctctgataacattcatgatacattcaaaaaattatgggttgagcacggtgatgagctgagcctggagtatgctggctcttatgctttgaaaggggatctagtgagatatggaaggcagacattgcctggactaattaaagatggaatgagtgctctttcaagatattatttgaataattttcatgacggagtgcggcaagatgctcttgaccttattagcggttattatacagtcagccaaggcagctcttctccttttcataatggtgttgattcttcttcgtatctgccggtggcttcagcaatcatagttggtgggattaccgcgacaactttcactctcagtcaagttggacggaacgcgcagcacttgatctcctccattatctgtgcgggcttaacagtcggagtagtagccttggtgaaagccaatgggaaacagttttgctctaggccccgtctgtgtggtctaatctaatccttggtcttttccccccttccctttcatattgccctttgttagaaattgaatgtaaaaggattagaatgttgttttattcgttgcaagagtaaggttaaataaggaggcaggatggcctgccggtcccgtaatctgaagctgctaatttgtaagcctatagtttggatttgcacattctatttgttatactttttatgtatccatgaatagaaaattacgcctcgaaattccaaatttgtaataaatccgagagaccacatatttttttagtgtgactggttggtagcgacggtcttggcgtcttgcatagttgctgacacagaaaagacacctccgtccctctgtctggtacagtgagggtggggcatcaaaaacacaaagatgctgttcttatcaggcacagatgtttgccaagtataattccacgttgcgctatacagtcgggtttgctcgtatgcatttatgatctagatactta

SEQ ID NO: 84231 - DNA, 2590 bp, Zea Mays
ccttactctaactacacacgggcccacgggataaataaagagctggcccacatgtgataccataccagcaacacgttacacacagttcctttcaggcttcacccgttttgctctcgagtctctcccggttcggatccaaattcagcaatccgacctgagaccaagaccgcgcaccacgcggctcgccgccgatggcgaacgccgacgccgacgaagcgccgctgctctctgtggaacacctccgtccaggatcctgcagccgcgagctcgagctgcgggagttccgcgaccgctacgtgatccgttcgctcgacggcgccgccgctttcgccgtccttcgctccggcggctccatccgccctctctccccagaggaagccgtagctgagagcgactgcaaggtttccagaatatacggcgtggtcggcaccataagattgctcgctggagagctgcatttcattccattaagaagaaaaacagagataatacaaaacagccacctcgcgggggccaagtacaagcatattgatactcatccatgaataaaacacccaaaggaagctatgtactcgttatcacttctcagaaagatgctggctcttatctgggctcccctgtgtaccaagtgaactcaatgaaattcttatgctgcaacgaggctatcaagcacttgactccacaggaaagaagggatgaggcatacttcatgtctctcctgagaattgcagaaactacttgtggattgtattattcatatgacagggatttgacactaaacttgcagagggcatccaagttggctgctgggagggtacataaaccactatggaagcaggctgatccacgttttgtttggaacaaaaatttgttagaggaacttattgaagctaagcttgatgagttcatcatcccactgatacaaggaagttttcagtcagcacaatttaccttgaaggatagaccagtgaggataacattgttctcaaggagatgcaacaggcgtttaggaacaagaatgtggagaaggggtgcgaatcttgaaggcgccacagcaaattttgtagaaacagaacagttggttgagtatgaagatctcacatcctcatttatacagcttcgaggttcaattccacttctctgggagcaaatagtggatttaagctacaaaccacggcttagcattattgaacatgaagaaactcataaggttgttcaacgccactttcatgatctttcacaacgatatggcaagataattgttgctgacttgactgataaacgaggtgatgaaggagatttgagcaatgcatttgctgctgaaatggacagaattcctggtgtcaggtatatacattttgatttccatcatgtttgtcgtggaggtaactttgacaatttgcaagctctctacaatcaaattgaggaagctattcataagcaaggctgagcagatattttcttatgaacactaaaggagagattttgctggagcaaagtggtgtagttaggtccaattgcattgattgcctggaccgtacaaatgtgacacagagtttccttgcaagaaaatcattggattctcaattgcagctgatgggagcattattgtcatctgaaagcatttctctctctgataacattcatgatacattcaaaaaattatgggttgagcacggtgatgagctgagcctggagtatgctggctcttatgctttgaaaggggatctagtgagatatggaaggcagacattgcctggactaattaaagatggaatgagtgctctttcaagatattatttgaataattttcatgacggagtgcggcaagatgctcttgaccttattagcggttattatacagtcagccaaggcagctcttctccttttcataatggtgttgattcttcttcgtatctgccggtggcttcagcaatcatagttggtgggattaccgcgacaactttcactctcagtcaagttggacggaacgcgcagcacttgatctcctccattatctgtgcgggcttaacagtcggagtagtagccttggtgaaagccaatgggaaacagttttgctctaggccccgtctgtgtggtctaatctaatccttggtcttttccccccttccctttcatattgccctttgttagaaattgaatgtaaaaggattagaatgttgttttattcgttgcaagagtaaggttaaataaggaggcaggatggcctgccggtcccgtaatctgaagctgctaatttgtaagcctatagtttggatttgcacattctatttgttatactttttatgtatccatgaatagaaaattacgcctcgaaattccaaatttgtaataaatccgagagaccacatatttttttagtgtgactggttggtagcgacggtcttggcgtcttgcatagttgctgacacagaaaagacacctccgtccctctgtctggtacagtgagggtggggcatcaaaaacacaaagatgctgttcttatcaggcacagatgtttgccaagtataattccacgttgcgctatacagtcgggtttgctcgtatgcatttatgatctagatactta

SEQ ID NO: 84232 - DNA, 3053 bp, Zea Mays
ccttactctaactacacacgggcccacgggataaataaagagctggcccacatgtgataccataccagcaacacgttacacacagttcctttcaggcttcacccgttttgctctcgagtctctcccggttcggatccaaattcagcaatccgacctgagaccaagaccgcgcaccacgcggctcgccgccgatggcgaacgccgacgccgacgaagcgccgctgctctctgtggaacacctccgtccaggatcctgcagccgcgagctcgagctgcgggagttccgcgaccgctacgtgatccgttcgctcgacggcgccgccgctttcgccgtccttcgctccggcggctccatccgccctctctccccagaggaagccgtagctgagagcgactgcaaggtttccagaatatacggcgtggtcggcaccataagattgctcgctggaagctatgtactcgttatcacttctcagaaagatgctggctcttatctgggctcccctgtgtaccaagtgaactcaatgaaattcttatgctgcaacgaggctatcaagcacttgactccacaggaaagaagggatgaggcatacttcatgtctctcctgagaattgcagaaactacttgtggattgtattattcatatgacagggatttgacactaaagtaagtgctttgtcatgcatgtatctgaataaggcaaccaaaagacattggcttaatattcagaaaaggccaacaacctttgtgtagtgattatgcacatccttaagatatttttttttctcaaacaacacatgagaactgtgtgcatttcattaagtagagaaaaaaaaccaaaggagaagcagtgtgtggcgctgttagccttgtactaggtggcctagggaagttggcctcctggaaaaaagccgaaacagtcagagcaccctgaatgtcctggatccagagattctgatctaaatcctcctgtaccgttcatctcctcgtcgacatttgtaactaatcgattgcctgttagttccattgttccttgcagatgtgtagtaggttcttgaagtatggatctattgagcacttcttaagaggttctagttgtatgactgttatcatgtactgaatgcctctgtggtgcatttatttttcttttgttatactggattgtatctaactgatgagatagaaataatgcgatgatggaatgctcctcaatgtaaagctataaacactatgattatgtagcttgcagagggcatccaagttggctgctgggagggtacataaaccactatggaagcaggctgatccacgttttgtttggaacaaaaatttgttagaggaacttattgaagctaagcttgatgagttcatcatcccactgatacaaggaagttttcagtcagcacaatttaccttgaaggatagaccagtgaggataacattgttctcaaggagatgcaacaggcgtttaggaacaagaatgtggagaaggggtgcgaatcttgaaggcgccacagcaaattttgtagaaacagaacagttggttgagtatgaagatctcacatcctcatttatacagcttcgaggttcaattccacttctctgggagcaaatagtggatttaagctacaaaccacggcttagcattattgaacatgaagaaactcataaggttgttcaacgccactttcatgatctttcacaacgatatggcaagataattgttgctgacttgactgataaacgaggtgatgaaggagatttgagcaatgcatttgctgctgaaatggacagaattcctggtgtcaggtatatacattttgatttccatcatgtttgtcgtggaggtaactttgacaatttgcaagctctctacaatcaaattgaggaagctattcataagcaaggctgagcagatattttcttatgaacactaaaggagagattttgctggagcaaagtggtgtagttaggtccaattgcattgattgcctggaccgtacaaatgtgacacagagtttccttgcaagaaaatcattggattctcaattgcagctgatgggagcattattgtcatctgaaagcatttctctctctgataacattcatgatacattcaaaaaattatgggttgagcacggtgatgagctgagcctggagtatgctggctcttatgctttgaaaggggatctagtgagatatggaaggcagacattgcctggactaattaaagatggaatgagtgctctttcaagatattatttgaataattttcatgacggagtgcggcaagatgctcttgaccttattagcggttattatacagtcagccaaggcagctcttctccttttcataatggtgttgattcttcttcgtatctgccggtggcttcagcaatcatagttggtgggattaccgcgacaactttcactctcagtcaagttggacggaacgcgcagcacttgatctcctccattatctgtgcgggcttaacagtcggagtagtagccttggtgaaagccaatgggaaacagttttgctctaggccccgtctgtgtggtctaatctaatccttggtcttttccccccttccctttcatattgccctttgttagaaattgaatgtaaaaggattagaatgttgttttattcgttgcaagagtaaggttaaataaggaggcaggatggcctgccggtcccgtaatctgaagctgctaatttgtaagcctatagtttggatttgcacattctatttgttatactttttatgtatccatgaatagaaaattacgcctcgaaattccaaatttgtaataaatccgagagaccacatatttttttagtgtgactggttggtagcgacggtcttggcgtcttgcatagttgctgacacagaaaagacacctccgtccctctgtctggtacagtgagggtggggcatcaaaaacacaaagatgctgttcttatcaggcacagatgtttgccaagtataattccacgttgcgctatacagtcgggtttgctcgtatgcatttatgatctagatactta

SEQ ID NO: 84233 - DNA, 1858 bp, Zea Mays
cgttacacacagttcctttcaggcttcacccgttttgctctcgagtctctcccggttcggatccaaattcagcaatccgacctgagaccaagaccgcgcaccacgcggctcgccgccgatggcgaacgccgacgccgacgaagcgccgctgctctctgtggaacacctccgtccaggatcctgcagccgcgagctcgagctgcgggagttccgcgaccgctacgtgatccgttcgctcgacggcgccgccgctttcgccgtccttcgctccggcggctccatccgccctctctccccagaggaagccgtagctgagagcgactgcaaggtttccagaatatacggcgtggtcggcaccataagattgctcgctggagagctgcatttcattccattaagaagaaaaacagagataatacaaaacagccacctcgcgggggccaagtacaagcatattgatactcatccatgaataaaacacccaaaggaagctatgtactcgttatcacttctcagaaagatgctggctcttatctgggctcccctgtgtaccaagtgaactcaatgaaattcttatgctgcaacgaggctatcaagcacttgactccacaggaaagaagggatgaggcatacttcatgtctctcctgagaattgcagaaactacttgtggattgtattattcatatgacagggatttgacactaaagtaagtgctttgtcatgcatgtatctgaataaggcaaccaaaagacattggcttaatattcagaaaaggccaacaacctttgtgtagtgattatgcacatccttaagatatttttttttctcaaacaacacatgagaactgtgtgcatttcattaagtagagaaaaaaaaccaaaggagaagcagtgtgtggcgctgttagccttgtactaggtggcctagggaagttggcctcctggaaaaaagccgaaacagtcagagcaccctgaatgtcctggatccagagattctgatctaaatcctcctgtaccgttcatctcctcgtcgacatttgtaactaatcgattgcctgttagttccattgttccttgcagatgtgtagtaggttcttgaagtatggatctattgagcacttcttaagaggttctagttgtatgactgttatcatgtactgaatgcctctgtggtgcatttatttttcttttgttatactggattgtatctaactgatgagatagaaataatgcgatgatggaatgctcctcaatgtaaagctataaacactatgattatgtagcttgcagagggcatccaagttggctgctgggagggtacataaaccactatggaagcaggctgatccacgttttgtttggaacaaaaatttgttagaggaacttattgaagctaagcttgatgagttcatcatcccactgatacaaggaagttttcagtcagcacaatttaccttgaaggatagaccagtgaggataacattgttctcaaggagatgcaacaggcgtttaggaacaagaatgtggagaaggggtgcgaatcttgaaggcgccacagcaaattttgtagaaacagaacagttggttgagtatgaagatctcacatcctcatttatacagcttcgaggttcaattccacttctctgggagcaaatagtggatttaagctacaaaccacggcttagcattattgaacatgaagaaactcataaggttgttcaacgccactttcatgatctttcacaacgatatggcaagataattgttgctgacttgactgataaagcaggagagctgcattctcatttcattaagaggagaaaaaaacaagggagaggctgaaccatctcgttttaac

SEQ ID NO: 84234 - DNA, 1558 bp, Zea Mays
gaaaaacaacctataagccgttttgccaaatgatttttcagaatagctttggctcatctaaagaagtggcttcacctcgtgagccagagccaaagccgtttttgagaagccagagccctgccaaaggggaccttacagtcattctctaataataacgacgaattacaagaaaaaaaagaaaaaaaaaataaaacaatagccggaagccgaagtacagcgctgtcgcgaacgctccggtcctatactcctcctgacatcgattcccgcactacctagatctcgaactcccaccatcgccgccgccgcccatggcgaaggagttccccgtgccaccggtggtcttcacgccgtccaccccaacacaccgccgccaccctcccccgggcatgggggtctcccctccgcccgcgttcgcgccgccacgtccctccacctcatccgccgccaacccgctccctttcatgtcgttcgatgtctcagctgccgcggcctcctcctcctctgcgccgcccctcttcgcggggcctatcggtgtcggcggttccggcgcatcctttgaggacgagccgccgctcctcgaggagctcggtatcaacacgcgccagatctggcggaagacgatctccatcctccacccattccgctccaccgacccctccctccacgccgacgccgacctatcgggcccgttcctcttcctcctctcctttggactcttccagctcctcgcggggaagttccacttcgggatcgtgctcggttgggtcaccgtggcgtccctcttcctctacttcgtcttttccatgctctcgggcggccgccgcggggacctcgatctttacagatgcgttagcctagtgggctactgcatgctgcccatggtcatcttctctgctgtgtccctctttctgccgcgcggtggcgggttcatatttggagtagggatggcgttcgtgatatggtccaccagggtctgcaccaggctactaggagagcttgcttccagcggagacgagcacaggggcctcatcgcttatgcgtgctggctcgtctacatgctcttctcattgctcgtcatcttctgataccgtttatggcatggaagtgctatgatgcgaaacaccctgcgttggttttgatttggtggcaacagctgctcacctcagcatgtgagtgattggatctgatgacagaggatcacatggttgcctgctgctgctgcaaaagttgaaatgacctcttggagtgtttagcttgctgctgatgcttaatctggctcgggggatggatggatgttgccatcaattgtcctcatgtggtggctggctgccacctcaaccttggtactgtgtgcgggaatgtaaaatcctatcctgtcatttgtataaggcaacaaaaggtcgaataaggttgctcgccatttgcagtggtgcttgacgatactccctaaaccaatggtggcgctcaatcttatggcacttagtccagctgagattcagtctgtgtttctctttatgcactccagggtcaatggtcaatggcctcaagcttaagtcac

SEQ ID NO: 84235 - DNA, 2124 bp, Zea Mays
ggccagggccgccgttgtgtccgtctgggtctctcggactgtgtgcttggtcgtttgccaccccctgtggccttgtcccttgaattcgaaccccgcctcctgcttcccgatttcaaatagctggcccgcggtgcctgcagtgcagcactgcactgcacgcctccgccatactgcgacgccgccgtgcatcgcttcacgcagagcagtgatggaatcccatcacggcggcgacgggaaggcgcgggacaagttctcggtgtaccagaacccgtccctcacccgcgccctagactcccgcagcgcccgcccctccgtcacagtcctcctcgtcctcgcggtcatatccgtcgcctccgcatcctccttcctcgccctcacctcccgggaggagcagctcaccaagctcgccggacgagcgggtatctctgtccttgctgctgtttttgtcattaggttggtggaagcagcactcggtcttgttgcacttttcacactgctggggttcttcagggcactgatgttatacaatgggcagaaggcactggccaaggccgacaaggttgtcttgtctgaacgccaactggggcttcttgggttaaagatggcaggttcagaaggaggtgggaaaggtgagcaaatcaaaaggcctcccaagaccaagccatcaacaccatcggaaccaattgtgcctatcaggaggtcttcgttcagctatacaccatctcggccttcggggcaatctaggattggttccagccatttgagccctggtggtgagagactgatcatggcattgccaatgtcaccctccacaccattgcagaagcatgtctcttctccttcaactccatggtcaaggaaaagctcaggcagtgccaagggcatacagacagaggcaatgctggaccagttcttggctggcttggatgtaaacattgacaaaatcatggatccagagactaagactacaacacctccagcaaccattacaagctttggtgttgctacccctgtttcaattaccacatcgaccaccccttctggtgctgcaaggagcacacctctgagacctgtgaggatgtctcctggctcccatcagaaatacagcacgccaccaaaaaagggtgagggtgaacttccaactccaatgtccttagagcaagcagtggaggcctttgagaacttgggtgtatatcctgagattgagcagtggcgagatagtctcaggcagtggttttcttcagttgtgatgaacccacttgtacaaaaaatcaaaacaagccatactcaggttaagcaaacaacagctactgttggggcttcagttactgttagccaagttggaagtgatctgccaagcacaacaccaccagttgccttgtctcctcttggtgggactaaagattggcaaccgactgtcacggtagatgaggatgggatccttaaccaattgcactctgcactcctacattctcgagatgcccctgttgcgcaaacttttggcagtctacaacagccacaacggaacccccaccttccagctattcaagcatgtattgatgcaatcacagagcatcagaggctcaacactctgatgaagggagagctgataaaaggcttgttgccacagagtagtgtccgtgctgattacactgtccagagagttcaagaactcgctgaaggaacatgcttgaagaattatgattacatgggtcatggaaatgactatggtaaatcagaaaagaaatggaccaccgagctacctactgactcacaccttcttctgtatctgtttgctgctttccttgaacatccaaaatggatgcttcatgttgaccctacctcgtactctggttcccagtccagcaaaaatcccttatttctgggagttcttccaccaaaagagaggttcccagaaaagtatgttgctctgatatcaggtgttccagcaattattcacccaggggctcttatactggctgtgagcaagcagaatcctccaatttttgctctatactgggacaagaagcagcaattttctcttcagctacagtaaacgtagagagaaaaaaatgcagctgcaggtgcagtaaagggcagccaaatggcgtggatgactctcat

SEQ ID NO: 84236 - DNA, 2205 bp, Zea Mays
ggccagggccgccgttgtgtccgtctgggtctctcggactgtgtgcttggtcgtttgccaccccctgtggccttgtcccttgaattcgaaccccgcctcctgcttcccgatttcaaatagctggcccgcggtgcctgcagtgcagcactgcactgcacgcctccgccatactgcgacgccgccgtgcatcgcttcacgcagagcagtgatggaatcccatcacggcggcgacgggaaggcgcgggacaagttctcggtgtaccagaacccgtccctcacccgcgccctagactcccgcagcgcccgcccctccgtcacagtcctcctcgtcctcgcggtcatatccgtcgcctccgcatcctccttcctcgccctcacctcccgggaggagcagctcaccaagctcgccggacgagcggggcactgatgttatacaatgggcagaaggcactggccaaggccgacaaggttgtcttgtctgaacgccaactggggcttcttgggttaaagatggcaggttcagaaggaggtgggaaaggtgagcaaatcaaaaggcctcccaagaccaagccatcaacaccatcggaaccaattgtgcctatcaggaggtcttcgttcagctatacaccatctcggccttcggggcaatctaggattggttccagccatttgagccctggtggtgagagactgatcatggcattgccaatgtcaccctccacaccattgcagaagcatgtctcttctccttcaactccatggtcaaggaaaagctcaggcagtgccaagggcatacagacagaggcaatgctggaccagttcttggctggcttggatgtaaacattgacaaaatcatggatccagagactaagactacaacacctccagcaaccattacaagctttggtgttgctacccctgtttcaattaccacatcgaccaccccttctggtgctgcaaggagcacacctctgagacctgtgaggatgtctcctggctcccatcagaaatacagcacgccaccaaaaaagggtgagggtgaacttccaactccaatgtccttagagcaagcagtggaggcctttgagaacttgggtgtatatcctgagattgagcagtggcgagatagtctcaggcagtggttttcttcagttgtgatgaacccacttgtacaaaaaatcaaaacaagccatactcaggttaagcaaacaacagctactgttggggcttcagttactgttagccaagttggaagtgatctgccaagcacaacaccaccagttgccttgtctcctcttggtgggactaaagattggcaaccgactgtcacggtagatgaggatgggatccttaaccaattgcactctgcactcctacattctcgagatgcccctgttgcgcaaacttttggcagtctacaacagccacaacggaacccccaccttccagctattcaagcatgtattgatgcaatcacagagcatcagaggctcaacactctgatgaagggagagctgataaaaggcttgttgccacagagtagtgtccgtgctgattacactgtccagagagttcaagaactcgctgaaggaacatgcttgaagaattatgattacatgggtcatggaaatgactatggtaaatcagaaaagaaatggaccaccgagctacctactgactcacaccttcttctgtatctgtttgctgctttccttgaacatccaaaatggatgcttcatgttgaccctacctcgtactctggttcccagtccagcaaaaatcccttatttctgggagttcttccaccaaaagagaggttcccagaaaagtatgttgctctgatatcaggtgttccagcaattattcacccaggggctcttatactggctgtgagcaagcagaatcctccaatttttgctctatactgggacaagaagcagcaattttctcttcaggtgatttgttatgtgcatttgttcctctatcatggctgttactattccttttcctcccttcagtcatttattttagcatgagttgctgttgagggagtgatatttagttttaataagatacacaatctaggaatttaaggaaagttgggagaaacaaacacagaagaaatgtaggaaacgggtagttttgtttgcttaaggagttgaggtatgacttgaacgaaactacatttagttatcatcttatgt

SEQ ID NO: 84237 - DNA, 1045 bp, Zea Mays
tgtgctacagtacgctcgttatgtgttcgacataggacaaaactttactggaaggtcctgcgttcaatgcattctgggaaaggaatgttgcagagtctgtgcgccagggagatgcaaggccatttgtggaggaagctgtgctgcaagtatctgactggggtttcagcctatctgacatccaaatgcagaagaaagaggctcgaggcttttttgaactcatcaagtctctcttcaatcaggctgaaagagagtgggtgggatttctgggcccaatacatatatggcaggggatggatgaccgagtgatctcgccgtcagtggctgaatttgtgcggcggttggttccaggagccacggtccacaagcttcttgatgaaggtcacttctcatacttctgcttctgtgacgagtgccacaggcagatattctccaccctcttcggcattccccagggccctatgaaccctgcaccgcaacccagcgaggtcgtttcagagctcaacgaagaaataacagtaccagacaatgtcacagatcaggaacaaggaaaatcaggcctgccctgatcaagatcagttttcaggatcaacagtatagatacaagacattactactaaacacaacacctcatatcgacgggacaggcttttcgtcgctgcttgtggactgagctgctcctcttgcggagtcttgaaggatgaaggcaaagtattggatagaggctgtgccgtttcacttggatgtacaaaaatgctcattacagattcgcacggcacctgctcggtgtgcttttagtatagtcggcattaacattcgattaacctgctatgactgcattataggcttcttttagcacatttgttttggcatgcgaacccaatggttcaattgcgtcctcagctgaattttgttactttgtcagggactgtttgatgtagctccactaactctagattgacctaattcagctttacttcacaagaaaaaaattagtcaaacggttcagtttcactaaaatggtgaatctgggggctatatttacaat

SEQ ID NO: 84238 - DNA, 1708 bp, Zea Mays
ttgacaagaagaacccacaactacactactgtttcatgcgtattctggttttaggttttgggagtggcaatgaaactccagtagagcttccaaagaaacttatcatcggccccccaagtgctgatagaatccaacttcctgatggacggcatctggcttatcaagaacaaggagtttcagctaacagagcaagattttcactgatttatcctcattcttttctttcatcaaggctagcaggaatccctggaattagagcatctcttctggaagaatttggagtacgacttgtgacctatgatcttcctggttttggtgagagcgatccacacataggccggaatctcaattcttctgcaatggacatgctctatctggctaatgctctcaatattccggagaagttctgggttgtgggctattctggaggtggaatgcatgcctggagtgctcttcgttacattcctgatcgcattgctggtgcagcaatgttcgcacctatggcaaatccatatgactccaagatgaccaaagatgagaggcgtaaaacatgggatagctggtcaacgaaacggaaactgatgcacattttagctcggaggtttccatcactactaccattcttttatcgccaaacctttctttctggaaagcaaggacatccagagagttggttgtcgctgtcattggggaagaaggacaaaactttactggaaggtcctgcgttcaatgcattctgggaaaggaatgttgcagagtctgtgcgccagggagatgcaaggccatttgtggaggaagctgtgctgcaagtatctgactggggtttcagcctatctgacatccaaatgcagaagaaagaggctcgaggcttttttgaactcatcaagtctctcttcaatcaggctgaaagagagtgggtgggatttctgggcccaatacatatatggcaggggatggatgaccgagtgatctcgccgtcagtggctgaatttgtgcggcggttggttccaggagccacggtccacaagcttcttgatgaaggtcacttctcatacttctgcttctgtgacgagtgccacaggcagatattctccaccctcttcggcattccccagggccctatgaaccctgcaccgcaacccagcgaggtcgtttcagagctcaacgaagaaataacagtaccagacaatgtcacagatcaggaacaaggaaaatcaggcctgccctgatcaagatcagttttcaggatcaacagtatagatacaagacattactactaaacacaacacctcatatcgacgggacaggcttttcgtcgctgcttgtggactgagctgctcctcttgcggagtcttgaaggatgaaggcaaagtattggatagaggctgtgccgtttcacttggatgtacaaaaatgctcattacagattcgcacggcacctgctcggtgtgcttttagtatagtcggcattaacattcgattaacctgctatgactgcattataggcttcttttagcacatttgttttggcatgcgaacccaatggttcaattgcgtcctcagctgaattttgttactttgtcagggactgtttgatgtagctccactaactctagattgacctaattcagctttacttcacaagaaaaaaattagtcaaacggttcagtttcactaaaatggtgaatctgggggctatatttacaat

SEQ ID NO: 84239 - DNA, 2195 bp, Zea Mays
gaaactcctagactcctagtacagttttacccacacagcctagcgggacctacaagtcagccaaacgtctcaagctcgccatttcgcctcggtttccagctcccactcctcccttcctcgcttcccaatctccaaacctctcacttgcacgggagcacgtacagccgtacaggcggagccaaagcgatcggcgccgcggcggcaagacgtcgtcggcggcgacgatgacgtggcacgaggacctggccactcacgtggggaacacgggcgttcgcctccccggcgccggaggtcacgcgccggcggcggcgaatgttgctgcggcgggggccgggtggtacggggaggaggaagaggggagggcggaggaggggtgggcgcagcaggcgaaggggttcgcggagtcgacggcggagatgctgcgggagctgggccgggggctgtgggacgtcgccgcgcagagcctcgccggcgccgaggacagcgaggtggcgcggcggctccggaagcgggcggcggctacggggaagcgcctcagcttcatgaacgagtacctccccgaggagcgcgacccggtgaggtgttggctcaccgtcgccgcagtcgcattcgtctcgctcctagttttaggttttgggagtggcaatgaaactccagtagagcttccaaagaaacttatcatcggccccccaagtgctgatagaatccaacttcctgatggacggcatctggcttatcaagaacaaggagtttcagctaacagagcaagattttcactgatttatcctcattcttttctttcatcaaggctagcaggaatccctggaattagagcatctcttctggaagaatttggagtacgacttgtgacctatgatcttcctggttttgttctgggttgtgggctattctggaggtggaatgcatgcctggagtgctcttcgttacattcctgatcgcattgctggtgcagcaatgttcgcacctatggcaaatccatatgactccaagatgaccaaagatgagaggcgtaaaacatgggatagctggtcaacgaaacggaaactgatgcacattttagctcggaggtttccatcactactaccattcttttatcgccaaacctttctttctggaaagcaaggacatccagagagttggttgtcgctgtcattggggaagaaggacaaaactttactggaaggtcctgcgttcaatgcattctgggaaaggaatgttgcagagtctgtgcgccagggagatgcaaggccatttgtggaggaagctgtgctgcaagtatctgactggggtttcagcctatctgacatccaaatgcagaagaaagaggctcgaggcttttttgaactcatcaagtctctcttcaatcaggctgaaagagagtgggtgggatttctgggcccaatacatatatggcaggggatggatgaccgagtgatctcgccgtcagtggctgaatttgtgcggcggttggttccaggagccacggtccacaagcttcttgatgaaggtcacttctcatacttctgcttctgtgacgagtgccacaggcagatattctccaccctcttcggcattccccagggccctatgaaccctgcaccgcaacccagcgaggtcgtttcagagctcaacgaagaaataacagtaccagacaatgtcacagatcaggaacaaggaaaatcaggcctgccctgatcaagatcagttttcaggatcaacagtatagatacaagacattactactaaacacaacacctcatatcgacgggacaggcttttcgtcgctgcttgtggactgagctgctcctcttgcggagtcttgaaggatgaaggcaaagtattggatagaggctgtgccgtttcacttggatgtacaaaaatgctcattacagattcgcacggcacctgctcggtgtgcttttagtatagtcggcattaacattcgattaacctgctatgactgcattataggcttcttttagcacatttgttttggcatgcgaacccaatggttcaattgcgtcctcagctgaattttgttactttgtcagggactgtttgatgtagctccactaactctagattgacctaattcagctttacttcacaagaaaaaaattagtcaaacggttcagtttcactaaaatggtgaatctgggggctatatttacaat

SEQ ID NO: 84240 - DNA, 718 bp, Zea Mays
cagaggatctgcagagatggcaaatgccaactcgtccttattttctttattatattcctttaattactccgatgcgttgggctgatctggtgccaagagaagaagatgggggttattttagggttacgattgactgtcgatctttcttgacctaacaactaaagcagcccgtttggtgtgacggactccacgaagttcgtccagcaagtggttctggaagatcttagcaaggtgaagggcattccttccgattgttcagaggtcatggtatggcacgtcgatacggccgcgccttctccctcgtctccgcagaacaagaggagatagagagctgaacaccatagaagagaacggacgagcctggaggacggccggagtggtgtacactgtacatgcatggctacaccactgagatgctgattgtcctcctagctagttgcaaagaaggaaaatttttggttttctcaccggaggatggatccacctctgaccccccccccccccccccctccatcataatgtgcgattttctgctattcttttttttccttaaaaatgtgatatatgtatattttcccttttctttttactcaagtgggtttaggtgaatacaaacataataaccccttgaagtgtttctcaaggatgtaatggatagatggcaagctaaaaaagatcaacttaacaatgatgatacgcatcatgttgtcttttattc

SEQ ID NO: 84241 - DNA, 555 bp, Zea Mays
caccggtcaggcggtgacaggactccacgaagttcgtccagcaagtggttctggaagatcttagcaaggtgaagggcattccttccgattgttcagaggtcatggtatggcacgtcgatacggccgcgccttctccctcgtctccgcagaacaagaggagatagagagctgaacaccatagaagagaacggacgagcctggaggacggccggagtggtgtacactgtacatgcatggctacaccactgagatgctgattgtcctcctagctagttgcaaagaaggaaaatttttggttttctcaccggaggatggatccacctctgaccccccccccccccccccctccatcataatgtgcgattttctgctattcttttttttccttaaaaatgtgatatatgtatattttcccttttctttttactcaagtgggtttaggtgaatacaaacataataaccccttgaagtgtttctcaaggatgtaatggatagatggcaagctaaaaaagatcaacttaacaatgatgatacgcatcatgttgtcttttattc

SEQ ID NO: 84242 - DNA, 630 bp, Zea Mays
gtcagattgaaagacgcatttccgccatgaaagcggcgtctcggccgtcggctagcgcgccggtcgtggctcctgcatgtggcacagccgcacaggactccacgaagttcgtccagcaagtggttctggaagatcttagcaaggtgaagggcattccttccgattgttcagaggtcatggtatggcacgtcgatacggccgcgccttctccctcgtctccgcagaacaagaggagatagagagctgaacaccatagaagagaacggacgagcctggaggacggccggagtggtgtacactgtacatgcatggctacaccactgagatgctgattgtcctcctagctagttgcaaagaaggaaaatttttggttttctcaccggaggatggatccacctctgaccccccccccccccccccctccatcataatgtgcgattttctgctattcttttttttccttaaaaatgtgatatatgtatattttcccttttctttttactcaagtgggtttaggtgaatacaaacataataaccccttgaagtgtttctcaaggatgtaatggatagatggcaagctaaaaaagatcaacttaacaatgatgatacgcatcatgttgtcttttattc

SEQ ID NO: 84243 - DNA, 1480 bp, Zea Mays
cagacatccgtgctgcctttgcctctgttcctttgcgtcctttttatttgttttattttattttattttatttactgcaagtgtcgcggtacagccgtggtcgggcgacatcacgacgggtggctggtgtccgtccggtgtgctctaccggtttggtcgccggtcatgtggtagcgtacgagacgcccaaaacgtgtcggcgagatgatgattgccacccctcaactaacggggccgggagagcctccggcgtcgtatctgatagggcgcccggaaaagaaatggtggtggtgaccgcggacgccagagcgcggttgcattccatgccgattgccgttggatccacggccgttgcatcgccgcctcacaaataaatcttcccgctcgtgctcgtgccaatcccgggtttccagtcacgtttcttctgaactgaacgcgtaaatccgcccttctttcaagtttgctttgcttcaaagcctgccttttgttggcggcaagcaatcatgctaaccagctttcgcgattcaacaacacgcgtgtccagtctgtactgcgatttcgcctacccgctgtctgatagatatgaacaccaccgccatcatcacatggtgttctggtcagatagtacgcacggctagctacacctgcgacctgctctgttaatgaatgtcccagtgcgcgttcggtgcgtggccggtggcgacgatgtggcgggacgagagggaggtcgtcgtgcggggccccgcgtgcagctcgtccgcggtcaccggctggttctcccaggacctgagcgacggcaccgcggctgctgcctctaccacctccaccgcgagggcgaggccttctggcgaggtggacgtccacggcttcgccttcaacagctccgtgctctgggaccccgagcgctggggccgctacccgacctccgagcccgacaagtcccaggactccacgaagttcgtccagcaagtggttctggaagatcttagcaaggtgaagggcattccttccgattgttcagaggtcatggtatggcacgtcgatacggccgcgccttctccctcgtctccgcagaacaagaggagatagagagctgaacaccatagaagagaacggacgagcctggaggacggccggagtggtgtacactgtacatgcatggctacaccactgagatgctgattgtcctcctagctagttgcaaagaaggaaaatttttggttttctcaccggaggatggatccacctctgaccccccccccccccccccctccatcataatgtgcgattttctgctattcttttttttccttaaaaatgtgatatatgtatattttcccttttctttttactcaagtgggtttaggtgaatacaaacataataaccccttgaagtgtttctcaaggatgtaatggatagatggcaagctaaaaaagatcaacttaacaatgatgatacgcatcatgttgtcttttattc

SEQ ID NO: 84244 - DNA, 1320 bp, Zea Mays
aaaaagcacaccggaaacacaaggcaaaaaagatatccatctcccctccgttctcaccaccgacagccggacacgcctcgtctcgtccccgctcccataaacgcagaggctcacgcagacgcctcgctcccgtgccaacgagccaagcccaaacccaccaccaattcaaccgcgacccagcccaccgccccgcacgccattcccacctcctcccccctcaccactcagatctccccgcgcgcccgcgcgcgagctcgttcgtgcgcggccgccggcgttggcgacgacgaccgaggagccatggctgccaagggcggcgccacgccgtcccccggcggcacggggcccgcggcggggaacggccgcctcttcacgctcgtgcgctcccgcgtccagctcgccaagatcgccgcgctcagcctcgtcttctgcggctccgtcgtctccgggaacgtctcgctgcgctacctccccgtctccttcaaccaggccgtcggcgccaccacgcccttctttaccgccgtcttcgcgtacatcatgaccgtcaagcgcgagtcgtggatcacctacctcaccctcgtgcccgtcgttactggagtcatcatcgccagcggcggcgagcctagctttcatctgtttggattcatcatgtgcataggagcaactgcagcaagggcgttgaagacagtactgcaaggaattcttctgtcttctgatggggagaagcttaattctatgaatctgttattgtacatggctccaattgctgttattttcttgcttcctgcaactatctttatggaggataatgttgttggcatcacaattcagcttgcaaagaaggatttcacgattgtttggttgctactgttcaattcttgcttgtcatattttgtcaatttgaccaatttcttggtgaccaaacatactagcgcactgactctacaggttctcggaaatgcaaagggtgccgtggcagtcgtcatctcaatcatgatattcaggaatcctgtgtccataacaggaatgctcggttacactctcacagtttttggcgtcattctttacagtgaatccaaaaagcgcagcaacaagccgtgaccaccctagaagacagtaaatacggccatcatttctttgtcctgccagcgcctagagctaatatatgatgagaaactacaccggtggcgatcacaacaaatccaatgccgtaccgcctcagcaattggacatcaagggccggacttcattgctaaaagagaaacggtcgagtttctcagcacatggagaaggtcggagtgcaaacgtgggacagccaga

SEQ ID NO: 84245 - DNA, 2425 bp, Zea Mays
gttagagcttcactcccatcttacatatacatggatctcgtctcgtgtgaactgctgcggatcagtcgggggccataagacccttgcgcgctgcgcagcggtgggcggtggccggtggcaatggcgcccacgacttgcctccggatccccttcctccccgcccgaggccgctccgctaacgtcaacgcccctccgtcctggctcccccgccgcctttctctcaaatccagcgcgaccaacggtgacaattccctccccaatcccatctccacctctcccacctcgccgccttggttaacggtggtggacgttaacgggttgcgtcgcccgcccgcgcctgtttccgcccctaccatccccggcgaccgcggtccccggtggctgcctcggccgttcactagcgcggacgtcatgggggcggattggaaggggctcaaggttgcttaccagggttgcgctggggcgtacagcgaagcggcagcaaagaaggcatacccaaattgtgaggctgtgccctgtgagcactttgacactgcatttcaggctgttcaaaactgggtagttgatagggcagtgctgccacttgagaattcattgggaggtagcatacatcggaactatgatctattggttcagcatagtttgcacattgtcggagaagttcgccttgaggttcaccattgcttgttagccaatcctggtgtgaagattgaaaatctgaaaagtgttatgagccatccccaggctcttgcgcaatgtgaacacacattaacaggactaggaattgaacatagagaggctgttgacgacactgctggtgcagcaaagattgttgcagaacatatggtccaggatactggtgctattgctagttcattggctgctaaactctatggattggatgttcttgctgagaatattcaggatggcaaaaataatgtcacccgttttatgatgctagctcgaaaacccaacattcttcgcaatgatagaccatttaagacaagcatagtcttttcactagaagaaggacatggacaactctttagggcgcttggtgtattcgcacagaggaaaatcaacctcacaaagatcgaaagtcgtccacacaaggagaggcctcttcgagtatctgatgactgttcctcactcttaaagaattttgattacctcttttacgttgaccttgaagcatcaatggctgatccaaagattcagaatgctcttggaaatctgaaggagtttgcaacctttttaagagtcctcggaagctatcctacaaatgtgaatgaaccttagaaaacactgcagattacatgatggattagcaggaatggacgaaatggtttgagttggttctctgagcaggttgacaagtgaggacctctatgaagctgatgctaacatttacagagcaaaaggatctatattagagcagtatagaagggtggatgtgaggcttacattggttgtgagcttgaaagggaatttgttgtttggctgggcgagcctagctttcatctgtttggattcatcatgtgcataggagcaactgcagcaagggcgttgaagacagtactgcaaggaattcttctgtcttctgatggggagaagcttaattctatgaatctgttattgtacatggctccaattgctgttattttcttgcttcctgcaactatctttatggaggataatgttgttggcatcacaattcagcttgcaaagaaggatttcacgattgtttggttgctactgttcaattcttgcttgtcatattttgtcaatttgaccaatttcttggtgaccaaacatactagcgcactgactctacaggttctcggaaatgcaaagggtgccgtggcagtcgtcatctcaatcatgatattcaggaatcctgtgtccataacaggaatgctcggttacactctcacagtttttggcgtcattctttacagtgaatccaaaaagcgcagcaacaagccgtgaccaccctagaagacagtaaatacggccatcatttctttgtcctgccagcgcctagagctaatatatgatgagaaactacaccggtggcgatcacaacaaatccaatgccgtaccgcctcagcaattggacatcaagggtagaagtccaataatacctgtagtattaaattggcatgtgggaggcattttttttaatggcattgatggatagaatatatatattttttgtgttagagaagtgtggctcagactgccagcattgtttagtacgtttagctcttgggatattgcctcttctattcatcggctactgtaacttccattttcttttgttctgaagactacctgtaccagactttgatccaggttccagggcctaattaatatattgacactgaatttaagcacaaatgactgacttttagtgaaactgttg

SEQ ID NO: 84246 - DNA, 2121 bp, Zea Mays
cttagatatacatgacacataacggttagagcttcactcccatcttacatatacatggatctcgtctcgtgtgaactgctgcggatcagtcgggggccataagacccttgcgcgctgcgcagcggtgggcggtggccggtggcaatggcgcccacgacttgcctccggatccccttcctccccgcccgaggccgctccgctaacgtcaacgcccctccgtcctggctcccccgccgcctttctctcaaatccagcgcgaccaacgggccgttcactagcgcggacgtcatgggggcggattggaaggggctcaaggttgcttaccagggttgcgctggggcgtacagcgaagcggcagcaaagaaggcatacccaaattgtgaggctgtgccctgtgagcactttgacactgcatttcaggctgttcaaaactgggtagttgatagggcagtgctgccacttgagaattcattgggaggtagcatacatcggaactatgatctattggttcagcatagtttgcacattgtcggagaagttcgccttgaggttcaccattgcttgttagccaatcctggtgtgaagattgaaaatctgaaaagtgttatgagccatccccaggctcttgcgcaatgtgaacacacattaacaggactaggaattgaacatagagaggctgttgacgacactgctggtgcagcaaagattgttgcagaacatatggtccaggatactggtgctattgctagttcattggctgctaaactctatggattggatgttcttgctgagaatattcaggatggcaaaaataatgtcacccgttttatgatgctagctcgaaaacccaacattcttcgcaatgatagaccatttaagacaagcatagtcttttcactagaagaaggacatggacaactctttagggcgcttggtgtattcgcacagaggaaaatcaacctcacaaagatcgaaagtcgtccacacaaggagaggcctcttcgagtatctgatgactgttcctcactcttaaagaattttgattacctcttttacgttgaccttgaagcatcaatggctgatccaaagattcagaatgctcttggaaatctgaaggagtttgcaacctttttaagagtcctcggaagctatcctacaaatgtgaatgaaccttagaaaacactgcagattacatgatgggcgagcctagctttcatctgtttggattcatcatgtgcataggagcaactgcagcaagggcgttgaagacagtactgcaaggaattcttctgtcttctgatggggagaagcttaattctatgaatctgttattgtacatggctccaattgctgttattttcttgcttcctgcaactatctttatggaggataatgttgttggcatcacaattcagcttgcaaagaaggatttcacgattgtttggttgctactgttcaattcttgcttgtcatattttgtcaatttgaccaatttcttggtgaccaaacatactagcgcactgactctacaggttctcggaaatgcaaagggtgccgtggcagtcgtcatctcaatcatgatattcaggaatcctgtgtccataacaggaatgctcggttacactctcacagtttttggcgtcattctttacagtgaatccaaaaagcgcagcaacaagccgtgaccaccctagaagacagtaaatacggccatcatttctttgtcctgccagcgcctagagctaatatatgatgagaaactacaccggtggcgatcacaacaaatccaatgccgtaccgcctcagcaattggacatcaagggtagaagtccaataatacctgtagtattaaattggcatgtgggaggcattttttttaatggcattgatggatagaatatatatattttttgtgttagagaagtgtggctcagactgccagcattgtttagtacgtttagctcttgggatattgcctcttctattcatcggctactgtaacttccattttcttttgttctgaagactacctgtaccagactttgatccaggttccagggcctaattaatatattgacactgaatttaagcacaaatgactgacttttagtgaaactgttg

SEQ ID NO: 84247 - DNA, 474 bp, Zea Mays
cctaaaacattttctttttgccctgcgtggcgttctccactctcctctccctctcccgagcacctctccttcctccactttctccccaactccggtgagcgagagtgtggtcacgacacaatcatggcgctgcccgtggggccaatcgtcggtgcgcgagctccccttcggggtgagcatgtcaccgtcgagcgacctcttggcggtgccctagtgtcctgtgcgtggcgttatgtaccggtggctgcgttgtttctacccagtcgtctgcaaacaagaatggacgaaatggtttgagttggttctctgagcaggttgacaagtgaggacctctatgaagctgatgctaacatttacagagcaaaaggatctatattagagcagtatagaagggtggatgtgaggcttacattggttgtgagcttgaaagggaatttgttgtttggctggtcaaattgggctgttcaagttgcc

SEQ ID NO: 84248 - DNA, 1932 bp, Zea Mays
gttagagcttcactcccatcttacatatacatggatctcgtctcgtgtgaactgctgcggatcagtcgggggccataagacccttgcgcgctgcgcagcggtgggcggtggccggtggcaatggcgcccacgacttgcctccggatccccttcctccccgcccgaggccgctccgctaacgtcaacgcccctccgtcctggctcccccgccgcctttctctcaaatccagcgcgaccaacggtgacaattccctccccaatcccatctccacctctcccacctcgccgccttggttaacggtggtggacgttaacgggttgcgtcgcccgcccgcgcctgtttccgcccctaccatccccggcgaccgcggtccccggtggctgcctcggccgttcactagcgcggacgtcatgggggcggattggaaggggctcaaggttgcttaccagggttgcgctggggcgtacagcgaagcggcagcaaagaaggcatacccaaattgtgaggctgtgccctgtgagcactttgacactgcatttcaggctgttcaaaactgggtagttgatagggcagtgctgccacttgagaattcattgggaggtagcatacatcggaactatgatctattggttcagcatagtttgcacattgtcggagaagttcgccttgaggttcaccattgcttgttagccaatcctggtgtgaagattgaaaatctgaaaagtgttatgagccatccccaggctcttgcgcaatgtgaacacacattaacaggactaggaattgaacatagagaggctgttgacgacactgctggtgcagcaaagaacatatggtccaggatactggtgctattgctagttcattggctgctaaactctatggattggatgttcttgctgagaatattcaggatggcaaaaataatgtcacccgttttatgatgctagctcgaaaacccaacattcttcgcaatgatagaccatttaagacaagcatagtcttttcactagaagaaggacatggacaactctttagggcgcttggtgtattcgcacagaggaaaatcaacctcacaaagatcgaaagtcgtccacacaaggagaggcctcttcgagtatctgatgactgttcctcactcttaaagaattttgattacctcttttacgttgaccttgaagcatcaatggctgatccaaagattcagaatgctcttggaaatctgaaggagtttgcaacctttttaagagtcctcggaagctatcctacaaatgtgaatgaaccttagaaaacactgcagattacatgatggattagcaggaatggacgaaatggtttgagttggttctctgagcaggttgacaagtgaggacctctatgaagctgatgctaacatttacagagcaaaaggatctatattagagcagtatagaagggtggatgtgaggcttacattggttgtgagcttgaaagggaatttgttgtttggctggtgaggttcttttgacttctgatgcaacgaggatagctgaaatagcaatcttcttcaatgtcttattatgcgggagcttgaaaatacttcaatttataagtttataggttttcatgttggagcatctttgtcatggtagcatgtaggttgctaaaatagtcagtggaataatgagacaatgtctaagaacacttgtcttttttttaggacagtataataagaactgacgtttccatgtccatatggacgttccacaaaaatcttatttgctgtcatgatgggctctattcatctggtggtggccaaacctctgccaaactttacttctgtaggagaaaataatttgttgctccttgtacttttctattgatgaaacggaatttggtgccccttgtttgccttgatctgtgccaggtcaaattgggctgttcaagttgcc

SEQ ID NO: 84249 - DNA, 1764 bp, Zea Mays
gttagagcttcactcccatcttacatatacatggatctcgtctcgtgtgaactgctgcggatcagtcgggggccataagacccttgcgcgctgcgcagcggtgggcggtggccggtggcaatggcgcccacgacttgcctccggatccccttcctccccgcccgaggccgctccgctaacgtcaacgcccctccgtcctggctcccccgccgcctttctctcaaatccagcgcgaccaacgggccgttcactagcgcggacgtcatgggggcggattggaaggggctcaaggttgcttaccagggttgcgctggggcgtacagcgaagcggcagcaaagaaggcatacccaaattgtgaggctgtgccctgtgagcactttgacactgcatttcaggctgttcaaaactgggtagttgatagggcagtgctgccacttgagaattcattgggaggtagcatacatcggaactatgatctattggttcagcatagtttgcacattgtcggagaagttcgccttgaggttcaccattgcttgttagccaatcctggtgtgaagattgaaaatctgaaaagtgttatgagccatccccaggactaggaattgaacatagagaggctgttgacgacactgctggtgcagcaaagattgttgcagaacatatggtccaggatactggtgctattgctagttcattggctgctaaactctatggattggatgttcttgctgagaatattcaggatggcaaaaataatgtcacccgttttatgatgctagctcgaaaacccaacattcttcgcaatgatagaccatttaagacaagcatagtcttttcactagaagaaggacatggacaactctttagggcgcttggtgtattcgcacagaggaaaatcaacctcacaaagatcgaaagtcgtccacacaaggagaggcctcttcgagtatctgatgactgttcctcactcttaaagaattttgattacctcttttacgttgaccttgaagcatcaatggctgatccaaagattcagaatgctcttggaaatctgaaggagtttgcaacctttttaagagtcctcggaagctatcctacaaatgtgaatgaaccttagaaaacactgcagattacatgatggattagcaggaatggacgaaatggtttgagttggttctctgagcaggttgacaagtgaggacctctatgaagctgatgctaacatttacagagcaaaaggatctatattagagcagtatagaagggtggatgtgaggcttacattggttgtgagcttgaaagggaatttgttgtttggctggtgaggttcttttgacttctgatgcaacgaggatagctgaaatagcaatcttcttcaatgtcttattatgcgggagcttgaaaatacttcaatttataagtttataggttttcatgttggagcatctttgtcatggtagcatgtaggttgctaaaatagtcagtggaataatgagacaatgtctaagaacacttgtcttttttttaggacagtataataagaactgacgtttccatgtccatatggacgttccacaaaaatcttatttgctgtcatgatgggctctattcatctggtggtggccaaacctctgccaaactttacttctgtaggagaaaataatttgttgctccttgtacttttctattgatgaaacggaatttggtgccccttgtttgccttgatctgtgccaggtcaaattgggctgttcaagttgcc

SEQ ID NO: 84250 - DNA, 1381 bp, Zea Mays
gttagagcttcactcccatcttacatatacatggatctcgtctcgtgtgaactgctgcggatcagtcgggggccataagacccttgcgcgctgcgcagcggtgggcggtggccggtggcaatggcgcccacgacttgcctccggatccccttcctccccgcccgaggccgctccgctaacgtcaacgcccctccgtcctggctcccccgccgcctttctctcaaatccagcgcgaccaacgggccgttcactagcgcggacgtcatgggggcggattggaaggggctcaaggttgcttaccagggttgcgctggggcgtacagcgaagcggcagcaaagaaggcatacccaaattgtgaggctgtgccctgtgagcactttgacactgcatttcaggctgttcaaaactgggtagttgatagggcagtgctgccacttgagaattcattgggaggtagcatacatcggaactatgatctattggttcagcatagtttgcacattgtcggagaagttcgccttgaggttcaccattgcttgttagccaatcctggtgtgaagattgaaaatctgaaaagtgttatgagccatccccaggctcttgcgcaatgtgaacacacattaacaggactaggaattgaacatagagaggctgttgacgacactgctggtgcagcaaagattgttgcagaacatatggtccaggatactggtgctattgctagttcattggctgctaaactctatggattggatgttcttgctgagaatattcaggatggcaaaaataatgtcacccgttttatgatgctagctcgaaaacccaacattcttcgcaatgatagaccatttaagacaagcatagtcttttcactagaagaaggacatggacaactctttagggcgcttggtgtattcgcacagaggaaaatcaacctcacaaagatcgaaagtcgtccacacaaggagaggcctcttcgagtatctgatgactgttcctcactcttaaagaattttgattacctcttttacgttgaccttgaagcatcaatggctgatccaaagattcagaatgctcttggaaatctgaaggagtttgcaacctttttaagagtcctcggaagctatcctacaaatgtgaatgaaccttagaaaacactgcagattacatgatggattagcaggaatggacgaaatggtttgagttggttctctgagcaggttgacaagtgaggacctctatgaagctgatgctaacatttacagagcaaaaggatctatattagagcagtatagaagggtggatgtgaggcttacattggttgtgagcttgaaagggaatttgttgtttggctggtcaaattgggctgttcaagttgcc

SEQ ID NO: 84251 - DNA, 1936 bp, Zea Mays
gttagagcttcactcccatcttacatatacatggatctcgtctcgtgtgaactgctgcggatcagtcgggggccataagacccttgcgcgctgcgcagcggtgggcggtggccggtggcaatggcgcccacgacttgcctccggatccccttcctccccgcccgaggccgctccgctaacgtcaacgcccctccgtcctggctcccccgccgcctttctctcaaatccagcgcgaccaacggtgacaattccctccccaatcccatctccacctctcccacctcgccgccttggttaacggtggtggacgttaacgggttgcgtcgcccgcccgcgcctgtttccgcccctaccatccccggcgaccgcggtccccggtggctgcctcggccgttcactagcgcggacgtcatgggggcggattggaaggggctcaaggttgcttaccagggttgcgctggggcgtacagcgaagcggcagcaaagaaggcatacccaaattgtgaggctgtgccctgtgagcactttgacactgcatttcaggctgttcaaaactgggtagttgatagggcagtgctgccacttgagaattcattgggaggtagcatacatcggaactatgatctattggttcagcatagtttgcacattgtcggagaagttcgccttgaggttcaccattgcttgttagccaatcctggtgtgaagattgaaaatctgaaaagtgttatgagccatccccaggctcttgcgcaatgtgaacacacattaacaggactaggaattgaacatagagaggctgttgacgacactgctggtgcagcaaagattgttgcagaacatatggtccaggatactggtgctattgctagttcattggctgctaaactctatggattggatgttcttgctgagaatattcaggatggcaaaaataatgtcacccgttttatgatgctagctcgaaaacccaacattcttcgcaatgatagaccatttaagacaagcatagtcttttcactagaagaaggacatggacaactctttagggcgcttggtgtattcgcacagaggaaaatcaacctcacaaagatcgaaagtcgtccacacaaggagaggcctcttcgagtatctgatgactgttcctcactcttaaagaattttgattacctcttttacgttgaccttgaagcatcaatggctgatccaaagattcagaatgctcttggaaatctgaaggagtttgcaacctttttaagagtcctcggaagctatcctacaaatgtgaatgaaccttagaaaacactgcagattacatgatgcaggaatggacgaaatggtttgagttggttctctgagcaggttgacaagtgaggacctctatgaagctgatgctaacatttacagagcaaaaggatctatattagagcagtatagaagggtggatgtgaggcttacattggttgtgagcttgaaagggaatttgttgtttggctggtgaggttcttttgacttctgatgcaacgaggatagctgaaatagcaatcttcttcaatgtcttattatgcgggagcttgaaaatacttcaatttataagtttataggttttcatgttggagcatctttgtcatggtagcatgtaggttgctaaaatagtcagtggaataatgagacaatgtctaagaacacttgtcttttttttaggacagtataataagaactgacgtttccatgtccatatggacgttccacaaaaatcttatttgctgtcatgatgggctctattcatctggtggtggccaaacctctgccaaactttacttctgtaggagaaaataatttgttgctccttgtacttttctattgatgaaacggaatttggtgccccttgtttgccttgatctgtgccaggtcaaattgggctgttcaagttgcc

SEQ ID NO: 84252 - DNA, 1220 bp, Zea Mays
gttagagcttcactcccatcttacatatacatggatctcgtctcgtgtgaactgctgcggatcagtcgggggccataagacccttgcgcgctgcgcagcggtgggcggtggccggtggcaatggcgcccacgacttgcctccggatccccttcctccccgcccgaggccgctccgctaacgtcaacgcccctccgtcctggctcccccgccgcctttctctcaaatccagcgcgaccaacgggccgttcactagcgcggacgtcatgggggcggattggaaggggctcaaggttgcttaccagggttgcgctggggcgtacagcgaagcggcagcaaagaaggcatacccaaattgtgaggctgtgccctgtgagcactttgacactgcatttcaggctgttcaaaactgggtagttgatagggcagtgctgccacttgagaattcattgggaggtagcatacatcggaactatgatctattggttcagcatagtttgcacattgtcggagaagttcgccttgaggttcaccattgcttgttagccaatcctggtgtgaagattgaaaatctgaaaagtgttatgagccatccccaggctcttgcgcaatgtgaacacacattaacaggactaggaattgaacatagagaggctgttgacgacactgctggtgcagcaaagattgttgcagaacatatggtccaggatactggtgctattgctagttcattggctgctaaactctatggattggatgttcttgctgagaatattcaggatggcaaaaataatgtcacccgttttatgatgctagctcgaaaacccaacattcttcgcaatgatagaccatttaagacaagcatagtcttttcactagaagaaggacatggacaactctttagggcgcttggtgtattcgcacagaggaaaatcaacctcacaaagatcgaaagtcgtccacacaaggagaggcctcttcgagtatctgatgactgttcctcactcttaaagaattttgattacctcttttacgttgaccttgaagcatcaatggctgatccaaagattcagaatgctcttggaaatctgaaggagtttgcaacctttttaagagtcctcggaagctatcctacaaatgtgaatgaaccttagaaaacactgcagattacatgatgaatctgccgtgtcgtcacgacgggaggaacccgccgcttcctaag

SEQ ID NO: 84253 - DNA, 1835 bp, Zea Mays
gactagcaacagtggccgtcccgctcactttctcgctaccttcctcagccggagtcgtgggcagagcagagcgatcgaggcctgcttcagcagttcagctgcagccgccgcccgcccgtcccccagtccccaccttcttttataaatcccacgcctgcgcttcctcttttgacgaatcggtcgcgaggggagaaagataggagtcaattaatttgcctgttctgcttgctgctgaccttgtgagtgagccgccggtcttccccttcctcgccgaggggaaataataaggcagccacagccagggccgccccgaggaagaagatgagcggaggaggcgtggacggagctccggtcgccgagttccggcagacggtgacgcacggcggccggttcctgcagtacaacatcttcggcaacctgttcgagatcacgcacaagtaccagccccccatcatgcccatcggccgcggcgcctacgggatcgtctgctcggtgatgaactccgagacgaaggagatggtggccatcaagaagatcgccaacgccttcgacaaccacatggacgccaagcgcacgctccgggagatcaagctgctgaggcacctcgaccacgagaacatcatcggcatcagggacgtgatcccgccgcccgtcccgcaggcgttcaacgacgtgtacatcgggacggagctgatggacacggacctgcaccacatcatccggtccaaccaggagctctcggaggagcactcccagtacttcatgtaccagatcctccgcgggctcaagtacatccactccgccaacgtgatccaccgcgacctcaagcccagcaacctgctggtgaacgccaactgcgacctcaagatctgcgacttcgggctggcgcgcccgtcctccgagagcgacatgatgacggagtacgtggtcacgcgctggtaccgcgcgcccgagctgctgctcaactccaccgactactcggcggccatcgacgtctggtccgtcggctgcatcttcatggagctcatcaaccgccagccgctcttccccggacgcgaccacatgcaccagatgcgcctcataaccgaggtgatcgggacgcccacggacgatgagctcgggttcatccggaacgaggacgcgcggaagtacatgcgccacctcccgcagttcccgcgccggccgttcgtcagcctgttcccgcggatgcagcccgtcgcgctggacctcatcgagcggatgctcaccttcaacccgctgcagaggatcacagtggaagaggcgctggagcacccgtacctggaacggctacacgacgtcgccgacgagcccatctgcacggacccgttctcgttcgacttcgagcagcaggctctgacggaagaccaaatgaagcagctgatattcaacgaggccatcgaactcaaccccaacttccgatactagctagctagctagttcggacacacatcttaattatacgtttcaggctgtgtagtctgctgcaggtttcaggtgttcgtgtaatgagctgtaccaagaataaaatgctttggactcatctggtgactggtgggtcacatgttcctcgggcatacagaatcacagttttgtctgccaaagttatagcagcttctcttctcatgcagttgttcatattcgccacgcagctaacttttgcaagcagtaatctaataacacggacgaactactcgtcagttccgaaccataggtcctttaaattttaatctaagctagtttaatttgtctatatttaatcgaacttatagaaaataagtcaatatatctacaacaatacaatatcgaatagatgc

SEQ ID NO: 84254 - DNA, 1306 bp, Zea Mays
gccgtcctggtgcagcaggcagggcgcgatgcccagctcggtgatgaactccgagacgaaggagatggtggccatcaagaagatcgccaacgccttcgacaaccacatggacgccaagcgcacgctccgggagatcaagctgctgaggcacctcgaccacgagaacatcatcggcatcagggacgtgatcccgccgcccgtcccgcaggcgttcaacgacgtgtacatcgggacggagctgatggacacggacctgcaccacatcatccggtccaaccaggagctctcggaggagcactcccagtacttcatgtaccagatcctccgcgggctcaagtacatccactccgccaacgtgatccaccgcgacctcaagcccagcaacctgctggtgaacgccaactgcgacctcaagatctgcgacttcgggctggcgcgcccgtcctccgagagcgacatgatgacggagtacgtggtcacgcgctggtaccgcgcgcccgagctgctgctcaactccaccgactactcggcggccatcgacgtctggtccgtcggctgcatcttcatggagctcatcaaccgccagccgctcttccccggacgcgaccacatgcaccagatgcgcctcataaccgaggtgatcgggacgcccacggacgatgagctcgggttcatccggaacgaggacgcgcggaagtacatgcgccacctcccgcagttcccgcgccggccgttcgtcagcctgttcccgcggatgcagcccgtcgcgctggacctcatcgagcggatgctcaccttcaacccgctgcagaggatcacagtggaagaggcgctggagcacccgtacctggaacggctacacgacgtcgccgacgagcccatctgcacggacccgttctcgttcgacttcgagcagcaggctctgacggaagaccaaatgaagcagctgatattcaacgaggccatcgaactcaaccccaacttccgatactagctagctagctagttcggacacacatcttaattatacgtttcaggctgtgtagtctgctgcaggtttcaggtgttcgtgtaatgagctgtaccaagaataaaatgctttggactcatctggtgactgttgttcatattcgccacgcagctaacttttgcaagcagtaatctaataacacggacgaactactcgtcagttccgaaccataggtcctttaaattttaatctaagctagtttaatttgtctatatttaatcgaacttatagaaaataagtcaatatatctacaacaatacaatatcgaatagatgc

SEQ ID NO: 84255 - DNA, 2269 bp, Zea Mays
ctggtatccacatctgcttgcgttgcccctttgccctcgatgtctggaaccacatcctcacctgggaaggcttggtcttaccgtggcaaggggacccatcaaattttgacggcatcggccatgaacttttttgctgggttatttttgttattcatgcctgaagaaaatgcattttgggctttagtaggggttattgatgattattttgatggatactacactgaagaaatgattgaatcacaggttgaccaactcgtccttgaggaggttgtacgagaaaggttccctaaattggccaaacatatggatttcttggaagttcaagtgggatgggtgactggaccatggttcctttctattttcgtcaatatgcttccatgggaaagtggtcaggttttatacagtgtcttggttctttcattatgatatgtactattacaatatttttgctagtagttcactgctgtaagattggttaatccctttctggttgactaacaattaaatctcactgtcaccatatgtagaatcttcttatgtctttgtatgttacaaattctgttaccatatgtgtgctattgatatttaagtaagactttacgtctcttgtagtactccgtgtttgggatgtcatcctttttgaaggaaatcgtagaatgttgttcaggacgacgcttgctttgctggatttatatgggcctgcacttgtgaccacaaaagatgccggagatgcaattacactactgcaatctcttgctgggtctacttttgacagcagccagcttgtattgacagcttgtatgggctttcaatcagttggagaaatgggattgcaagagttaaggaaaaaacacaggccagaaattttaactgcaatggaagaaagatcgaaagaccgtggctcctggaaagataagaaggggttagcaaccaaactttacagctttaaacatgatccttcattcgtgtgctcaccagttaagtccaaggaggggctagatggttcaaaggtgaatggagagactgggccagcaaatcttaagacctaccttagtactagttctatactggatactgatttggatcagggtgttgatcttcaagatcaggtgtcatggctaaagattgaactatgcaagctgctcgaggagaaaagatcagctgatctcaggggcgaggaattggaaactgctttgatggagatggtcaagcatgacaacagacgtatgttgagtgctaaggttgagaagctggaagcagaggtatatgaactgcgaaaagttttttcatacaagcaagagcaagagcaaataacgcttcagatcttgttaagaatggagcaagaacagaaagtggcagaagatgcccgcatagtcgctgagcgagatgctgctgaacaaacatgcgctgcccatttgcttcaggagaagtatgaagctacaatggcagcactttcacaaatggagaagagagctgtaatggcagaaacaatgctggaagctacaaagcaataccaggctgggcaggttaaagccaaccaatctttcacttcaagttcacctcgtgcagaacatgttcttgggaagataaatcaagaaccaaaccaagatatgtctaacaggagaatcggcctgctttctaggggacttggatggcttgacaagagcaagggaaggcaaaattccactgaaacatctggaggctaaactcatctagagttcaggatgaagtcatagctcccaacaagatctggattgttcattgatgcttggattgcctgatcacgataagaatgtgttgaaatcagcagctatgttttctcggggagattcagctggcattttccatgaagttttgcaggaagtgtatcttgtaccatattgagctcagttgtcggataaagttttgttggtaggtcagaaaggctgctgcaagtcatcggtgtaaattttcttttattagtttcattaaggtcgtcaatagtcagtgtttccaagtaggagaaagaaaagaacccaacttcatatacacatggaaagaggaaaaattgtgttagattagttacagtatcatggggttgttttgttgaagagcgtatatctcttccgaaatgtctgaaccactgaagagattatctctgttttttttttcttttgagacatgtggctctaacatattcttcagttactgttgacatgcctgatgtacgaaaattattgtcaaaaggatctgattacgaatccaacatcgaaaaatccagtatagcgag

SEQ ID NO: 84256 - DNA, 2183 bp, Zea Mays
agccgatgctaagggataattccctctaacaaccgaatcctcctaaactcaagggataactcactccttagccgagtgctaagggtctctaacaaccgacgcctaagaccaagggatcaggataaggaccactagaatctggtatccacatctgcttgcgttgcccctttgccctcgatgtctggaaccacatcctcacctgggaaggcttggtcttaccgtggcaaggggacccatcaaattttgacggcatcggccatgaacttttttgctgggttatttttgttattcatgcctgaagaaaatgcattttgggctttagtaggggttattgatgattattttgatggatactacactgaagaaatgattgaatcacaggttgaccaactcgtccttgaggaggttgtacgagaaaggttccctaaattggccaaacatatggatttcttggaagttcaagtgggatgggtgactggaccatggttcctttctattttcgtcaatatgcttccatgggaaagtgtactccgtgtttgggatgtcatcctttttgaaggaaatcgtagaatgttgttcaggacgacgcttgctttgctggatttatatgggcctgcacttgtgaccacaaaagatgccggagatgcaattacactactgcaatctcttgctgggtctacttttgacagcagccagcttgtattgacagcttgtatgggctttcaatcagttggagaaatgggattgcaagagttaaggaaaaaacacaggccagaaattttaactgcaatggaagaaagatcgaaagaccgtggctcctggaaagataagaaggggttagcaaccaaactttacagctttaaacatgatccttcattcgtgtgctcaccagttaagtccaaggaggggctagatggttcaaaggtgaatggagagactgggccagcaaatcttaagacctaccttagtactagttctatactggatactgatttggatcagggtgttgatcttcaagatcaggtgtcatggctaaagattgaactatgcaagctgctcgaggagaaaagatcagctgatctcaggggcgaggaattggaaactgctttgatggagatggtcaagcatgacaacagacgtatgttgagtgctaaggttgagaagctggaagcagaggtatatgaactgcgaaaagttttttcatacaagcaagagcaagagcaaataacgcttcagatcttgttaagaatggagcaagaacagaaagtggcagaagatgcccgcatagtcgctgagcgagatgctgctgaacaaacatgcgctgcccatttgcttcaggagaagtatgaagctacaatggcagcactttcacaaatggagaagagagctgtaatggcagaaacaatgctggaagctacaaagcaataccaggctgggcaggttaaagccaaccaatctttcacttcaagttcacctcgtgcagaacatgttcttgggaagataaatcaagaaccaaaccaagatatgtctaacaggagaatcggcctgctttctaggggacttggatggcttgacaagagcaagggaaggcaaaattccactgaaacatctggaggctaaactcatctagagttcaggatgaagtcatagctcccaacaagatctggattgttcattgatgcttggattgcctgatcacgataagaatgtgttgaaatcagcagctatgttttctcggggagattcagctggcattttccatgaagttttgcaggaagtgtatcttgtaccatattgagctcagttgtcggataaagttttgttggtaggtcagaaaggctgctgcaagtcatcggtgtaaattttcttttattagtttcattaaggtcgtcaatagtcagtgtttccaagtaggagaaagaaaagaacccaacttcatatacacatggaaagaggaaaaattgtgttagattagttacagtatcatggggttgttttgttgaagagcgtatatctcttccgaaatgtctgaaccactgaagagattatctctgttttttttttcttttgagacatgtggctctaacatattcttcagttactgttgacatgcctgatgtacgaaaattattgtcaaaaggatctgattacgaatccaacatcgaaaaatccagtatagcgag

SEQ ID NO: 84257 - DNA, 4069 bp, Zea Mays
aaatccaggtcaaacccaggtgattagttttccagtcccactcactcaaacctctccgtcctcctcctcctccgggccgggctgcaacctgcgacgctggcgccggtcggcacgaggtgttccacgagtcgctgcgccccccaccggccaccacggcgcgtgccgggagcagcgcagcggcggcggccataatgggcgccgccgccgcggccttcgactccgagtgcaagaggttcgttaagtaccgtaccgtactcttctcttctccacttgaaatccacgatgcatgaggcaggcggcaggacagacgcgcgccatcgtcgtgccgcgcgccacgtgctccgcgctagtctagcgtcgaacgaaaaatggccttctttttttctttccctcccttctttcggtctcctgctcgccgtccccaatctgcgctgccgattcttcttcttcttcttcttcaccaattcaattcatcttcgtcgcctggggcacacccctcgggcgccgcggcagcagggggtgcggtgcagttagcgccagcgcgcgtggctccaaccggacttgccgcgatccgttgcaatcctgattcccttcctctccagaattcatcctcccatgtgcgtggatctcggggcccgcgcgggctagggtttagtatggctttggtcaatccatggcgtgcgctgccgaggtcgtcctgtcgcttcttctttaatgcgcgctgatccccatggactccgagtccccacggtaaatcccacacaaaggcgggttcctttgcccatttcgcatgcctcctcctcttctctccatctcctgccgtatcttgttcggttccttgtattcgtattgccccgggggtgctaatgccgttgttggggttccctccgggagctgtggttgatgctcctgaggtttggcgcagggacgcttatggattcacggtgcggccgcagcatctgcagcgtttccgcgagtacgccaagatttacaaggaagaggaggaggagagggcgcacagatggagggacttcttggacaggttggctgagtcagcgaatgtgcccaccacacccagtgtttctccatatgcagctaccgacgatggtgcctcaggtgcaggacaaacacaagggaataacggcatcggaatacattgtgatgatgaagaagtgggatctgagaacgcagaagataacaacaaatttgaaagcccgaaggaagctgatgcaagtggcgaatcaagggaaccaaatggtaagccaggagatctgaaagatgtaactaagttggacaaagtgcaagaggagactggtagcagctctacgcaagcaatcaaagacttagagggcttgatggaagcaagcggggactttgaagaactaagagatttgaatggaatcccagaagaattggaagaagagaataatggcaacttggaaaagctggtagaactcttcttggataaggggttgttggatgaactgaagcccataaaagttgagtcccagtggcgggtgcgtgcagcgcttagcatcattgacaaaatgatgagctctcgggtagtgaagggtggtaatggtgcaaacgatattcatcgaaaggatggaccacagcttacttctattgaagaggaaggaatgactgcagaagtgagtcacgacggatatccagctgaggttgaggagtcttgtgttgcagagaaggtggaacttggacaggagacaactgatgattctacaggtactgctttggatagagacaatgatgggtcgtattttctttggagggaggagcttgagagcttggttcgtggaggtgtgccaatggctcttagaggagagatatggcaagcatttgcaggtgttagtgctcggaggattactgggtactacaacaatttgcttgatgacaggactgcgatattggatgaaaaggatcccgtggacccagtggtcaatgaacagagaagtgcaccgagaaaagctacacagcctgagaagtggaaaggacagatagaaaaggatttgccacgaacatttccaggacaccctgcattagatgaggatgggaggaatgctttgaggcggttattaaccgcatatgcaaggcataatccatcagttgggtattgccaggccatgaacttttttgctgggttatttttgttattcatgcctgaagaaaatgcattttgggctttagtaggggttattgatgattattttgatggatactacactgaagaaatgattgaatcacaggttgaccaactcgtccttgaggaggttgtacgagaaaggttccctaaattggccaaacatatggatttcttggaagttcaagtgggatgggtgactggaccatggttcctttctattttcgtcaatatgcttccatgggaaagtgtactccgtgtttgggatgtcatcctttttgaaggaaatcgtagaatgttgttcaggacgacgcttgctttgctggatttatatgggcctgcacttgtgaccacaaaagatgccggagatgcaattacactactgcaatctcttgctgggtctacttttgacagcagccagcttgtattgacagcttgtatgggctttcaatcagttggagaaatgggattgcaagagttaaggaaaaaacacaggccagaaattttaactgcaatggaagaaagatcgaaagaccgtggctcctggaaagataagaaggggttagcaaccaaactttacagctttaaacatgatccttcattcgtgtgctcaccagttaagtccaaggaggggctagatggttcaaaggtgaatggagagactgggccagcaaatcttaagacctaccttagtactagttctatactggatactgatttggatcagggtgttgatcttcaagatcaggtgtcatggctaaagattgaactatgcaagctgctcgaggagaaaagatcagctgatctcaggggcgaggaattggaaactgctttgatggagatggtcaagcatgacaacagacgtatgttgagtgctaaggttgagaagctggaagcagaggtatatgaactgcgaaaagttttttcatacaagcaagagcaagagcaaataacgcttcagatcttgttaagaatggagcaagaacagaaagtggcagaagatgcccgcatagtcgctgagcgagatgctgctgaacaaacatgcgctgcccatttgcttcaggagaagtatgaagctacaatggcagcactttcacaaatggagaagagagctgtaatggcagaaacaatgctggaagctacaaagcaataccaggctgggcaggttaaagccaaccaatctttcacttcaagttcacctcgtgcagaacatgttcttgggaagataaatcaagaaccaaaccaagatatgtctaacaggagaatcggcctgctttctaggggacttggatggcttgacaagagcaagcagggaaggcaaaattccactgaaacatctggaggctaaactcatctagagttcaggatgaagtcatagctcccaacaagatctggattgttcattgatgcttggattgcctgatcacgataagaatgtgttgaaatcagcagctatgttttctcggggagattcagctggcattttccatgaagttttgcaggaagtgtatcttgtaccatattgagctcagttgtcggataaagttttgttggtaggtcagaaaggctgctgcaagtcatcggtgtaaattttcttttattagtttcattaaggtcgtcaatagtcagtgtttccaagtaggagaaagaaaagaacccaacttcatatacacatggaaagaggaaaaattgtgttagattagttacagtatcatggggttgttttgttgaagagcgtatatctcttccgaaatgtctgaaccactgaagagattatctctgttttttttttcttttgagacatgtggctctaacatattcttcagttactgttgacatgcctgatgtacgaaaattattgtcaaaaggatctgattacgaatccaacatcgaaaaatccagtatagcgag

SEQ ID NO: 84258 - DNA, 3378 bp, Zea Mays
aaatccaggtcaaacccaggtgattagttttccagtcccactcactcaaacctctccgtcctcctcctcctccgggccgggctgcaacctgcgacgctggcgccggtcggcacgaggtgttccacgagtcgctgcgccccccaccggccaccacggcgcgtgccgggagcagcgcagcggcggcggccataatgggcgccgccgccgcggccttcgactccgagtgcaagagggacgcttatggattcacggtgcggccgcagcatctgcagcgtttccgcgagtacgccaagatttacaaggaagaggaggaggagagggcgcacagatggagggacttcttggacaggttggctgagtcagcgaatgtgcccaccacacccagtgtttctccatatgcagctaccgacgatggtgcctcaggtgcaggacaaacacaagggaataacggcatcggaatacattgtgatgatgaagaagtgggatctgagaacgcagaagataacaacaaatttgaaagcccgaaggaagctgatgcaagtggcgaatcaagggaaccaaatggtaagccaggagatctgaaagatgtaactaagttggacaaagtgcaagaggagactggtagcagctctacgcaagcaatcaaagacttagagggcttgatggaagcaagcggggactttgaagaactaagagatttgaatggaatcccagaagaattggaagaagagaataatggcaacttggaaaagctggtagaactcttcttggataaggggttgttggatgaactgaagcccataaaagttgagtcccagtggcgggtgcgtgcagcgcttagcatcattgacaaaatgatgagctctcgggtagtgaagggtggtaatggtgcaaacgatattcatcgaaaggatggaccacagcttacttctattgaagaggaaggaatgactgcagaagtgagtcacgacggatatccagctgaggttgaggagtcttgtgttgcagagaaggtggaacttggacaggagacaactgatgattctacaggtactgctttggatagagacaatgatgggtcgtattttctttggagggaggagcttgagagcttggttcgtggaggtgtgccaatggctcttagaggagagatatggcaagcatttgcaggtgttagtgctcggaggattactgggtactacaacaatttgcttgatgacaggactgcgatattggatgaaaaggatcccgtggacccagtggtcaatgaacagagaagtgcaccgagaaaagctacacagcctgagaagtggaaaggacagatagaaaaggatttgccacgaacatttccaggacaccctgcattagatgaggatgggaggaatgctttgaggcggttattaaccgcatatgcaaggcataatccatcagttgggtattgccaggccatgaacttttttgctgggttatttttgttattcatgcctgaagaaaatgcattttgggctttagtaggggttattgatgattattttgatggatactacactgaagaaatgattgaatcacaggttgaccaactcgtccttgaggaggttgtacgagaaaggttccctaaattggccaaacatatggatttcttggaagttcaagtgggatgggtgactggaccatggttcctttctattttcgtcaatatgcttccatgggaaagtggtcagtactccgtgtttgggatgtcatcctttttgaaggaaatcgtagaatgttgttcaggacgacgcttgctttgctggatttatatgggcctgcacttgtgaccacaaaagatgccggagatgcaattacactactgcaatctcttgctgggtctacttttgacagcagccagcttgtattgacagcttgtatgggctttcaatcagttggagaaatgggattgcaagagttaaggaaaaaacacaggccagaaattttaactgcaatggaagaaagatcgaaagaccgtggctcctggaaagataagaaggggttagcaaccaaactttacagctttaaacatgatccttcattcgtgtgctcaccagttaagtccaaggaggggctagatggttcaaaggtgaatggagagactgggccagcaaatcttaagacctaccttagtactagttctatactggatactgatttggatcagggtgttgatcttcaagatcaggtgtcatggctaaagattgaactatgcaagctgctcgaggagaaaagatcagctgatctcaggggcgaggaattggaaactgctttgatggagatggtcaagcatgacaacagacgtatgttgagtgctaaggttgagaagctggaagcagaggtatatgaactgcgaaaagttttttcatacaagcaagagcaagagcaaataacgcttcagatcttgttaagaatggagcaagaacagaaagtggcagaagatgcccgcatagtcgctgagcgagatgctgctgaacaaacatgcgctgcccatttgcttcaggagaagtatgaagctacaatggcagcactttcacaaatggagaagagagctgtaatggcagaaacaatgctggaagctacaaagcaataccaggctgggcaggttaaagccaaccaatctttcacttcaagttcacctcgtgcagaacatgttcttgggaagataaatcaagaaccaaaccaagatatgtctaacaggagaatcggcctgctttctaggggacttggatggcttgacaagagcaagggaaggcaaaattccactgaaacatctggaggctaaactcatctagagttcaggatgaagtcatagctcccaacaagatctggattgttcattgatgcttggattgcctgatcacgataagaatgtgttgaaatcagcagctatgttttctcggggagattcagctggcattttccatgaagttttgcaggaagtgtatcttgtaccatattgagctcagttgtcggataaagttttgttggtaggtcagaaaggctgctgcaagtcatcggtgtaaattttcttttattagtttcattaaggtcgtcaatagtcagtgtttccaagtaggagaaagaaaagaacccaacttcatatacacatggaaagaggaaaaattgtgttagattagttacagtatcatggggttgttttgttgaagagcgtatatctcttccgaaatgtctgaaccactgaagagattatctctgttttttttttcttttgagacatgtggctctaacatattcttcagttactgttgacatgcctgatgtacgaaaattattgtcaaaaggatctgattacgaatccaacatcgaaaaatccagtatagcgag

SEQ ID NO: 84259 - DNA, 3393 bp, Zea Mays
aaatccaggtcaaacccaggtgattagttttccagtcccactcactcaaacctctccgtcctcctcctcctccgggccgggctgcaacctgcgacgctggcgccggtcggcacgaggtgttccacgagtcgctgcgccccccaccggccaccacggcgcgtgccgggagcagcgcagcggcggcggccataatgggcgccgccgccgcggccttcgactccgagtgcaagagggacgcttatggattcacggtgcggccgcagcatctgcagcgtttccgcgagtacgccaagatttacaaggaagaggaggaggagagggcgcacagatggagggacttcttggacaggttggctgagtcagcgaatgtgcccaccacacccagtgtttctccatatgcagctaccgacgatggtgcctcaggtgcaggacaaacacaagggaataacggcatcggaatacattgtgatgatgaagaagtgggatctgagaacgcagaagataacaacaaatttgaaagcccgaaggaagctgatgcaagtggcgaatcaagggaaccaaatggtaagccaggagatctgaaagatgtaactaagttggacaaagtgcaagaggagactggtagcagctctacgcaagcaatcaaagacttagagggcttgatggaagcaagcggggactttgaagaactaagagatttgaatggaatcccagaagaattggaagaagagaataatggcaacttggaaaagctggtagaactcttcttggataaggggttgttggatgaactgaagcccataaaagttgagtcccagtggcgggtgcgtgcagcgcttagcatcattgacaaaatgatgagctctcgggtagtgaagggtggtaatggtgcaaacgatattcatcgaaaggatggaccacagcttacttctattgaagaggaaggaatgactgcagaagtgagtcacgacggatatccagctgaggttgaggagtcttgtgttgcagagaaggtggaacttggacaggagacaactgatgattctacaggtactgctttggatagagacaatgatgggtcgtattttctttggagggaggagcttgagagcttggttcgtggaggtgtgccaatggctcttagaggagagatatggcaagcatttgcaggtgttagtgctcggaggattactgggtactacaacaatttgcttgatgacaggactgcgatattggatgaaaaggatcccgtggacccagtggtcaatgaacagagaagtgcaccgagaaaagctacacagcctgagaagtggaaaggacagatagaaaaggatttgccacgaacatttccaggacaccctgcattagatgaggatgggaggaatgctttgaggcggttattaaccgcatatgcaaggcataatccatcagttgggtattgccaggccatgaacttttttgctgggttatttttgttattcatgcctgaagaaaatgcattttgggctttagtaggggttattgatgattattttgatggatactacactgaagaaatgattgaatcacaggttgaccaactcgtccttgaggaggttgtacgagaaaggttccctaaattggccaaacatatggatttcttggaagttcaagtgggatgggtgactggaccatggttcctttctattttcgtcaatatgcttccatgggaaagtgtactccgtgtttgggatgtcatcctttttgaaggaaatcgtagaatgttgttcaggacgacgcttgctttgctggatttatatgggcctgcacttgtgaccacaaaagatgccggagatgcaattacactactgcaatctcttgctgggtctacttttgacagcagccagcttgtattgacagcttgtatgggctttcaatcagttggagaaatgggattgcaagagttaaggaaaaaacacaggccagaaattttaactgcaatggaagaaagatcgaaagaccgtggctcctggaaagataagaaggggttagcaaccaaactttacagctttaaacatgatccttcattcgtgtgctcaccagttaagtccaaggaggggctagatggttcaaaggtgaatggagagactgggccagcaaatcttaagacctaccttagtactagttctatactggatactgatttggatcagggtgttgatcttcaagatcaggtgtcatggctaaagattgaactatgcaagctgctcgaggagaaaagatcagctgatctcagtatttctttatattttcaaggggcgaggaattggaaactgctttgatggagatggtcaagcatgacaacagacgtatgttgagtgctaaggttgagaagctggaagcagaggtatatgaactgcgaaaagttttttcatacaagcaagagcaagagcaaataacgcttcagatcttgttaagaatggagcaagaacagaaagtggcagaagatgcccgcatagtcgctgagcgagatgctgctgaacaaacatgcgctgcccatttgcttcaggagaagtatgaagctacaatggcagcactttcacaaatggagaagagagctgtaatggcagaaacaatgctggaagctacaaagcaataccaggctgggcaggttaaagccaaccaatctttcacttcaagttcacctcgtgcagaacatgttcttgggaagataaatcaagaaccaaaccaagatatgtctaacaggagaatcggcctgctttctaggggacttggatggcttgacaagagcaagggaaggcaaaattccactgaaacatctggaggctaaactcatctagagttcaggatgaagtcatagctcccaacaagatctggattgttcattgatgcttggattgcctgatcacgataagaatgtgttgaaatcagcagctatgttttctcggggagattcagctggcattttccatgaagttttgcaggaagtgtatcttgtaccatattgagctcagttgtcggataaagttttgttggtaggtcagaaaggctgctgcaagtcatcggtgtaaattttcttttattagtttcattaaggtcgtcaatagtcagtgtttccaagtaggagaaagaaaagaacccaacttcatatacacatggaaagaggaaaaattgtgttagattagttacagtatcatggggttgttttgttgaagagcgtatatctcttccgaaatgtctgaaccactgaagagattatctctgttttttttttcttttgagacatgtggctctaacatattcttcagttactgttgacatgcctgatgtacgaaaattattgtcaaaaggatctgattacgaatccaacatcgaaaaatccagtatagcgag

SEQ ID NO: 84260 - DNA, 3373 bp, Zea Mays
aaatccaggtcaaacccaggtgattagttttccagtcccactcactcaaacctctccgtcctcctcctcctccgggccgggctgcaacctgcgacgctggcgccggtcggcacgaggtgttccacgagtcgctgcgccccccaccggccaccacggcgcgtgccgggagcagcgcagcggcggcggccataatgggcgccgccgccgcggccttcgactccgagtgcaagagggacgcttatggattcacggtgcggccgcagcatctgcagcgtttccgcgagtacgccaagatttacaaggaagaggaggaggagagggcgcacagatggagggacttcttggacaggttggctgagtcagcgaatgtgcccaccacacccagtgtttctccatatgcagctaccgacgatggtgcctcaggtgcaggacaaacacaagggaataacggcatcggaatacattgtgatgatgaagaagtgggatctgagaacgcagaagataacaacaaatttgaaagcccgaaggaagctgatgcaagtggcgaatcaagggaaccaaatggtaagccaggagatctgaaagatgtaactaagttggacaaagtgcaagaggagactggtagcagctctacgcaagcaatcaaagacttagagggcttgatggaagcaagcggggactttgaagaactaagagatttgaatggaatcccagaagaattggaagaagagaataatggcaacttggaaaagctggtagaactcttcttggataaggggttgttggatgaactgaagcccataaaagttgagtcccagtggcgggtgcgtgcagcgcttagcatcattgacaaaatgatgagctctcgggtagtgaagggtggtaatggtgcaaacgatattcatcgaaaggatggaccacagcttacttctattgaagaggaaggaatgactgcagaagtgagtcacgacggatatccagctgaggttgaggagtcttgtgttgcagagaaggtggaacttggacaggagacaactgatgattctacaggtactgctttggatagagacaatgatgggtcgtattttctttggagggaggagcttgagagcttggttcgtggaggtgtgccaatggctcttagaggagagatatggcaagcatttgcaggtgttagtgctcggaggattactgggtactacaacaatttgcttgatgacaggactgcgatattggatgaaaaggatcccgtggacccagtggtcaatgaacagagaagtgcaccgagaaaagctacacagcctgagaagtggaaaggacagatagaaaaggatttgccacgaacatttccaggacaccctgcattagatgaggatgggaggaatgctttgaggcggttattaaccgcatatgcaaggcataatccatcagttgggtattgccaggccatgaacttttttgctgggttatttttgttattcatgcctgaagaaaatgcattttgggctttagtaggggttattgatgattattttgatggatactacactgaagaaatgattgaatcacaggttgaccaactcgtccttgaggaggttgtacgagaaaggttccctaaattggccaaacatatggatttcttggaagttcaagtgggatgggtgactggaccatggttcctttctattttcgtcaatatgcttccatgggaaagtgtactccgtgtttgggatgtcatcctttttgaaggaaatcgtagaatgttgttcaggacgacgcttgctttgctggatttatatgggcctgcacttgtgaccacaaaagatgccggagatgcaattacactactgcaatctcttgctgggtctacttttgacagcagccagcttgtattgacagcttgtatgggctttcaatcagttggagaaatgggattgcaagagttaaggaaaaaacacaggccagaaattttaactgcaatggaagaaagatcgaaagaccgtggctcctggaaagataagaaggggttagcaaccaaactttacagctttaaacatgatccttcattcgtgtgctcaccagttaagtccaaggaggggctagatggttcaaaggtgaatggagagactgggccagcaaatcttaagacctaccttagtactagttctatactggatactgatttggatcagggtgttgatcttcaagatcaggtgtcatggctaaagattgaactatgcaagctgctcgaggagaaaagatcagctgatctcaggggcgaggaattggaaactgctttgatggagatggtcaagcatgacaacagacgtatgttgagtgctaaggttgagaagctggaagcagaggtatatgaactgcgaaaagttttttcatacaagcaagagcaagagcaaataacgcttcagatcttgttaagaatggagcaagaacagaaagtggcagaagatgcccgcatagtcgctgagcgagatgctgctgaacaaacatgcgctgcccatttgcttcaggagaagtatgaagctacaatggcagcactttcacaaatggagaagagagctgtaatggcagaaacaatgctggaagctacaaagcaataccaggctgggcaggttaaagccaaccaatctttcacttcaagttcacctcgtgcagaacatgttcttgggaagataaatcaagaaccaaaccaagatatgtctaacaggagaatcggcctgctttctaggggacttggatggcttgacaagagcaagggaaggcaaaattccactgaaacatctggaggctaaactcatctagagttcaggatgaagtcatagctcccaacaagatctggattgttcattgatgcttggattgcctgatcacgataagaatgtgttgaaatcagcagctatgttttctcggggagattcagctggcattttccatgaagttttgcaggaagtgtatcttgtaccatattgagctcagttgtcggataaagttttgttggtaggtcagaaaggctgctgcaagtcatcggtgtaaattttcttttattagtttcattaaggtcgtcaatagtcagtgtttccaagtaggagaaagaaaagaacccaacttcatatacacatggaaagaggaaaaattgtgttagattagttacagtatcatggggttgttttgttgaagagcgtatatctcttccgaaatgtctgaaccactgaagagattatctctgttttttttttcttttgagacatgtggctctaacatattcttcagttactgttgacatgcctgatgtacgaaaattattgtcaaaaggatctgattacgaatccaacatcgaaaaatccagtatagcgag

SEQ ID NO: 84261 - DNA, 3817 bp, Zea Mays
aaatccaggtcaaacccaggtgattagttttccagtcccactcactcaaacctctccgtcctcctcctcctccgggccgggctgcaacctgcgacgctggcgccggtcggcacgaggtgttccacgagtcgctgcgccccccaccggccaccacggcgcgtgccgggagcagcgcagcggcggcggccataatgggcgccgccgccgcggccttcgactccgagtgcaagaggttcgttaagtaccgtaccgtactcttctcttctccacttgaaatccacgatgcatgaggcaggcggcaggacagacgcgcgccatcgtcgtgccgcgcgccacgtgctccgcgctagtctagcgtcgaacgaaaaatggccttctttttttctttccctcccttctttcggtctcctgctcgccgtccccaatctgcgctgccgattcttcttcttcttcttcttcaccaattcaattcatcttcgtcgcctggggcacacccctcgggcgccgcggcagcagggggtgcggtgcagttagcgccagcgcgcgtggctccaaccggacttgccgcgatccgttgcaatcctgattcccttcctctccagaattcatcctcccatgtgcgtggatctcggggcccgcgcgggctagggtttagtatggctttggtcaatccatggcgtgcgctgccgaggtcgtcctgtcgcttcttctttaatgcgcgctgatccccatggactccgagtccccacgggacgcttatggattcacggtgcggccgcagcatctgcagcgtttccgcgagtacgccaagatttacaaggaagaggaggaggagagggcgcacagatggagggacttcttggacaggtgcaggacaaacacaagggaataacggcatcggaatacattgtgatgatgaagaagtgggatctgagaacgcagaagataacaacaaatttgaaagcccgaaggaagctgatgcaagtggcgaatcaagggaaccaaatggtaagccaggagatctgaaagatgtaactaagttggacaaagtgcaagaggagactggtagcagctctacgcaagcaatcaaagacttagagggcttgatggaagcaagcggggactttgaagaactaagagatttgaatggaatcccagaagaattggaagaagagaataatggcaacttggaaaagctggtagaactcttcttggataaggggttgttggatgaactgaagcccataaaagttgagtcccagtggcgggtgcgtgcagcgcttagcatcattgacaaaatgatgagctctcgggtagtgaagggtggtaatggtgcaaacgatattcatcgaaaggatggaccacagcttacttctattgaagaggaaggaatgactgcagaagtgagtcacgacggatatccagctgaggttgaggagtcttgtgttgcagagaaggtggaacttggacaggagacaactgatgattctacaggtactgctttggatagagacaatgatgggtcgtattttctttggagggaggagcttgagagcttggttcgtggaggtgtgccaatggctcttagaggagagatatggcaagcatttgcaggtgttagtgctcggaggattactgggtactacaacaatttgcttgatgacaggactgcgatattggatgaaaaggatcccgtggacccagtggtcaatgaacagagaagtgcaccgagaaaagctacacagcctgagaagtggaaaggacagatagaaaaggatttgccacgaacatttccaggacaccctgcattagatgaggatgggaggaatgctttgaggcggttattaaccgcatatgcaaggcataatccatcagttgggtattgccaggccatgaacttttttgctgggttatttttgttattcatgcctgaagaaaatgcattttgggctttagtaggggttattgatgattattttgatggatactacactgaagaaatgattgaatcacaggttgaccaactcgtccttgaggaggttgtacgagaaaggttccctaaattggccaaacatatggatttcttggaagttcaagtgggatgggtgactggaccatggttcctttctattttcgtcaatatgcttccatgggaaagtgtactccgtgtttgggatgtcatcctttttgaaggaaatcgtagaatgttgttcaggacgacgcttgctttgctggatttatatgggcctgcacttgtgaccacaaaagatgccggagatgcaattacactactgcaatctcttgctgggtctacttttgacagcagccagcttgtattgacagcttgtatgggctttcaatcagttggagaaatgggattgcaagagttaaggaaaaaacacaggccagaaattttaactgcaatggaagaaagatcgaaagaccgtggctcctggaaagataagaaggggttagcaaccaaactttacagctttaaacatgatccttcattcgtgtgctcaccagttaagtccaaggaggggctagatggttcaaaggtgaatggagagactgggccagcaaatcttaagacctaccttagtactagttctatactggatactgatttggatcagggtgttgatcttcaagatcaggtgtcatggctaaagattgaactatgcaagctgctcgaggagaaaagatcagctgatctcaggggcgaggaattggaaactgctttgatggagatggtcaagcatgacaacagacgtatgttgagtgctaaggttgagaagctggaagcagaggtatatgaactgcgaaaagttttttcatacaagcaagagcaagagcaaataacgcttcagatcttgttaagaatggagcaagaacagaaagtggcagaagatgcccgcatagtcgctgagcgagatgctgctgaacaaacatgcgctgcccatttgcttcaggagaagtatgaagctacaatggcagcactttcacaaatggagaagagagctgtaatggcagaaacaatgctggaagctacaaagcaataccaggctgggcaggttaaagccaaccaatctttcacttcaagttcacctcgtgcagaacatgttcttgggaagataaatcaagaaccaaaccaagatatgtctaacaggagaatcggcctgctttctaggggacttggatggcttgacaagagcaagggaaggcaaaattccactgaaacatctggaggctaaactcatctagagttcaggatgaagtcatagctcccaacaagatctggattgttcattgatgcttggattgcctgatcacgataagaatgtgttgaaatcagcagctatgttttctcggggagattcagctggcattttccatgaagttttgcaggaagtgtatcttgtaccatattgagctcagttgtcggataaagttttgttggtaggtcagaaaggctgctgcaagtcatcggtgtaaattttcttttattagtttcattaaggtcgtcaatagtcagtgtttccaagtaggagaaagaaaagaacccaacttcatatacacatggaaagaggaaaaattgtgttagattagttacagtatcatggggttgttttgttgaagagcgtatatctcttccgaaatgtctgaaccactgaagagattatctctgttttttttttcttttgagacatgtggctctaacatattcttcagttactgttgacatgcctgatgtacgaaaattattgtcaaaaggatctgattacgaatccaacatcgaaaaatccagtatagcgag

SEQ ID NO: 84262 - DNA, 846 bp, Zea Mays
gcgatccaaccaaagaccctatccaaaaccagaggcaagccaagacgcaagctgcaagcacgcgctcgtgcccgcgccatgaagtgctggtgcgtgcactcgccaaggggagcaatggcgacgccgctctccagccccttggctcccaccgccctccgctcccctctccggcaccgcgccctgctgctgctgctgccgttccctccccgtgcggcctcctccggcgaggacaccgccgcagcagccgaccaggagccagccccggcggccaccaagacggccaccgcggacgacgacttcgaggagcgcgtgctacggatcaagtcccgcgtcgggcccaagaagcgcggcgcgcgcaagaagaaggccgcggcgtccgcgtcagccagcgccgtgacgctcccgcccgtgccgctgcgggagccccggtcggcgctcggcgcgcccgtcgagctcggcttcaccgcgtacagcgagcggctcaacggcgcgctggccgcgctggggctcgccgcggtgctgctcgtggagctgggctccgggcaggccctggtgaagtaccaccagccggccacgctgttcctgcaggcgtacaccgtcgctgcggccgccgcgctgttcgtcaagtacgagaaggagcggatcagcacgtggccggggccgccggcaaagtgagataaatggcgttgtctcggtcgcggatctttacttgtacttttacctcttgatgatgtgcactgcacggatattatatgtgttcgttgtgagaactgggaaattcgaggagagaagaagagcttgattttttacagtccttttaacgcccataccaaaaaaaaaaaacga

SEQ ID NO: 84263 - DNA, 1021 bp, Zea Mays
gacgagacccattagcgaccggccagtgatccccgaccccgagtcccgaggccgacgccattcctgattcctccatcttccgttccgccgcaccgccgccggagatatgtcgaggctcgctgctgccgccctccgctgcgtcgtcactgcatcgagagatacctcctcatctcgcttcgccgtgtctgcgccggtgtctgctcggctcttctccgcggatgcatccggtgaagccgccgccacggccgcagagtcgcaggatgactctttcttcaaggcatcccgcgaagatgtggattgtcattggatgatgtgaagattgaatacaacaagggatatgctccattggccgctttgctgaggttttcttcgaaggcaatgtttaccaccgcaattaggcaagcaaatcagaatcgtctgcacaggattgatgagataagtcgtgaaacatgggatctcaaaaagtccttcgatgggaaagcggtattactgcaaggagtcccacgaaatgccctcgcagatgacatagagcgttttttgtgtggcacgaactttgaacctccaccgtttgaaacctttctaagagctggtgtcccagagcccataagaatgatgctggttaagttccacacaaagaccgatgcgatgaatgccttcatcaccaaaaacaggagtttctgtctgaacagtcaagttagcatgcgtgttcttcagtaactgagtagccagttgaatctcgtgatgtttgccccggctttgtcaaacaaaaagccttttaagtccgatctgaggtctatccattatccacaaatgttgccgcattgtgtgtttctgcaggttatattggactggcagcctgctttaggttttcattcctactagtttgtggtttcagctgtactgcaccgcttttatttcatgagtactctgaaaaatgtaccaccattccgctttacaatgaaataattaacggcacaaacgctaggggttcgaatctgctactgctaccgtgcccattgtt

SEQ ID NO: 84264 - DNA, 894 bp, Zea Mays
gaaaagtttcttttgttcttttgccttctgtgatctttctgctgtcaactaaagctgaggaaaagaaaagggcaaaagaaaaggaggttgactttaccgtgcaactcacaatggcattgtacccaagacaaatgtatgcatatatacgtacggcgttcgcttgcacttgtcatatatacaggtcaatgccagcaaaaatctacagcgaacaggacgtgacagaaaaagaaacaaagtcacgtacggagtacacggctctgcgctctgctatactacatttcccaatgattttgtgccaatggctctcattgaagactactggatgtctgtgataaatcccattaacaccctgatcataggaagccaggtgttggctcgtcttcgaggtcatcgaactcccacccactgatctcgtcggccttgtattcctggtcgaacttggccagctccgattcggactctgatggcagtcgtgtcctgagctgagccgcgataggagagtcgcttctcgaatggctaggtgacgcggacaccttcaaggaaggggatcgtttctttttctctgcctgttctttaatctcaatttgaagcactggacgtggcacggattcgaactcgatccgcagattgtcaatggaggtaaacagattttttacctcagtgtcatcccttctgcacaaactcgttttatagtaatcctggtttgaagaatatattgctctgatactatcaaccaaactgaatgcagctacgacctgaaatagatgcacacatattgaataattatgtggcactgaaagatactttccgagtcagggttcatgatgcaagctttaactaaagttttcgtgttcccttccattagcagtgtgtattttatcatcagtaagcagg

SEQ ID NO: 84265 - DNA, 2431 bp, Zea Mays
cccgccgttcccccccttaatccttgattgggatggccggcctggagatcgggccggcgtcgccgggctcggagggggcgccatcgccggcgtcgagcgtgggcgcctccgtggagcggcccgagcagtcgtcgccgcgggtgaccaagcgcccaggcctcgtcatgtccttctccgggaagcggctggaccagtcgccggccgggtcgccgtcgccgtcgccgtcgctgtcgcgcccggtgctggtcatgtcccactccagcaaccgcctcgaccagtcgcccgcgcgcccggtgctcgtcatgtcccgctccagcaaccggctggaccagtcctccccggcgtcgtcgccggcgccagtgaaggcgcccgtgctggtcatgtcaggctccagcaatcggcttgacagctcgcatccgtcgccgtcgccgtcgccgtcgccgaccgccgcggccgccgctgcgccggttctggtgctctccaactccggcaagcggatggaccaggtggggcggaagaagtacgtcaagcaggtgacgggccgccacaacgatacggagctccacctcgccgcgcagcgcggggacctcgaggccgtgcgccagatcatcgccgagattgacgcccaaatgaccggcaccggcgaggagtttgacaacgaggtcgccgagatccgcgccgctatagtgaacgaggccaacgagatggaggcgaccgcgctgctcatcgccgccgagaaggggtttcttgacatcgtcgtcgagctgctcaagcactccgacaaggacagcctcaccaggaagaacaagtccggattcgatgctctgcacgtcgctgcaaaagagggccacagagatattgtcaaggtacttctggaccatgatccatcccttgggaaaacgtttggccaatcgaatgtgactcctctcataactgcggcgattagaggccacactgaggtggtgaacctactgctggagcgagtttctgggttggttgagttatcaaaagcgaatggaaagaatgccttgcactttgctgcccggcaggggcatgtggaaatcgtgaaggctttgctagatgctgatacccagcttgctcggaggactgataagaaaggccagactgctctacacatggcagtaaaaggtactaacccggaagttgttcaagcgcttgtgaatgccgatccggcaatagtcatgctacctgacagaaatggcaacttagctctgcatgttgcaaccagaaagaaaagatcagagattgtaaacgtgcttctgcttctcccggatatgaacgtgaatgcgttgactagggaccggaagaccgcattcgacatcgccgagggcctcccactatcagaggagtcccaagaaataaaggagtgcttgtcccgcgctggcgcggtcagagcaaatgagctgaatcagcctcgggatgagctcagaaaaacagttacagagatcaagaaggacgtgcatactcagcttgagcaggcgagaaaaaccaacaagaatgtctacggcatcgcgaaggagctaaggaaactccacagggagggcatcaacaacgcgacgaattcagtcacggtcgtggcggtgctcttcgccacagtggcgttcgccgcaatcttcacggtgcccggcggcaacaccgacgacggcgtagcggtggccgtgcacgcgacatccttcaaggtgttcttcatcttcaacgccgtcgccctcttcacgtcgctagcggtggtggtggtccagataacggtggtcaggggcgagaccaaggcggagaggcgggtggtgggggtcatcaacaagctgatgtggctggcctcggtgtgcacgacggtcgcgttcatatcctcctcgtacatcgtggtggggcggcacttcaagtgggcggcgctcctggtgaccctgatcggcggggtgatcatggccggcgtgctcggcacgatgacgtactacgtggtgaagtccaagcgcgtgcgcaagatcaggaagaaggtgaagtcgacgaggaggagcggctcgaactcgtggcaccacaactcggagctctcggattcggaggtcgaccgcatctacgccatatgagggggccggtgcagctggttccttccttcagaccgtctggccgtgatgcagcacggatgcatactgtaaacatcgaatcacggcccttgagatggagatgcgctagggggtggttaactctgtacattccaataagctggtgtaaactgccattccccttgttcatggatcgggcgggaggcgactgtcttggctgtatactactcacagatagatttgtcatcaggttatatatagtgtattatatatgtgcagcctgctgtgtgctccttgtgcgtgaccttcatcagattcatgtcaggccgctgctgagttcgaatggcagctgcatg

SEQ ID NO: 84266 - DNA, 3457 bp, Zea Mays
cgaaacaaacgggtagctatttcctcgtcgtcgtcctccagtcctccctccctcccactcaaaaatcgagttcccgtttagctctcccagtccacctccctcccccctctccgtcccaagtcctccccgctcgtgcgcggtggatgcgagcgatttgctttgtcgccgcatcttatcgggcttaggagcggagatgagcatggcaggcattgcgcgcggcagatcgcgatggagacagggcgacgggtcgtcgaatcggaatgcggcacactccactgttcctaaccccgatcaccaaggggttgtgtcctctaggaagcaagcaacttaccctgggatgctatctgattcggtgtttgctacagtagacaggcaaagtaaaacaagaaaagccattgctgtaccaatgaaaatactgatagaagaagaattttcaaatgatgtcaattctaggcatatttcaccaggtgctgtaggaaggctcatgggtcttgattcgttgccctcatctggaatccataataagcatagacataccaaaagtcatgcaccaaagacttcacctagtagttttcatggtcgaactggtttgcatgacattccacacaggaggagtgtagataccattaatgtttttgaaggtatggaagccacaaaaacaaatatgcaccggagtccaagatctaaaattggaagtacaacttccagatcagacaaggttgttagtgctgatatcgatttcataaggcagaaatttatggatgctaagcgtctttctattgatgaatcccttcacatatcagaagaatttaatgagacacttgatgccctggtatctaacagtgaccttttgttggattttcttcaaaattttgatcctgctgtcataagggacctacataatcatggttctccatcctctaccgcaaactgcatcacaatattgaagccatctcgaagaaatcaatttattgacatggacaatatttatccgcaagagaaaggaaccgagagcatcttcaacgagcaaatggaagggaaacattctttatggaagccatattctaatgtgcccttgcagtccctaaaagaagattcttgttcatcaaggcagaaactgtcaaggtccagtcaccaagaaaatactggaaaacgtggctcccccacccggattgttgtcttgaagccaaatcttgagaaacctcatgatattgaagaagcccttcccctacatcataaaatatcccattctgattatagaaggcataaagaatgtccggaggttgatagatggactccaaatactgaagattacatgtgtcaggtgccccttggagattctgaaacattaagtcgtatggggaagggatctagagaaattgctagggagatcaccaaacagatgagagctgctaggggtggaagtaggaaacattctgtcaaaccggagactagaactcttgcttcagatgaaaggtcacagtttcagtcatctgttactagacccaagactccagagtcaattcatagatattctgagtcatgtgatgcttgggcttcttcaagtctcaactctttgccaacatattcgactgaaacatcagaaagcaaggaagcaaagaaacacctctctaacagatggaagaagacccgtcagtgtcagcatcaagaaactgataatgacagcttcaacacgcttggggatatgcttgctctctctgatcagaatgcatcaaatgttgctacccataaaatgacatgcaggaaatgtccaaagtcagaagtgcagagtgatagaatacaaagctcatatcctcttggcatcagcaccaatgatggttggaaagacacaactactagtaaattgacaaggaccagcaagtgcttaagatgaccacaacagcactagataactgctttcttgtgcctaatctcgatgatctgatgcctaagcatgagcaaattgaataccatcaagctgatgattacccagccacttatgatcctcatatagcatcagattctcctgaggagaataatcatcacctaggggatgtcagtgaaaccctttgtattctacctgatgtattagaatcgccagcgaactccaacaaagatgaccagcaaagtccaatgtctgttcttgaatcttccatggacggagaagatgtttactctggggattttgagaagatcagtgcagatctccaagagctcagattgcaacttgggcttctgaagagggagactacagacactagagatggcagcgagctttctatattgagtgatgatgagacagcacgtcgatcacttcctgagactggggaatcccatgcttttaggaatacggaagaaagggacttctcctacgtgtttgatatgcttgctgctctgggcatccacgcggccaacgaggatgacctccttgacaactgctacttactggagtgctctgcaggccttgatttatacgatgacctcgaacagaagtacgacagcctcattttatggcctgtgcatgagaggaagctcttgtttgatatcacgaatgctgttcttggggacatgatcacctccgtgatgaacggctgctcgaagggactgatggcgaggtgctcgcctggatggaatcgggaagagtttgctgagctcgtgtggcaaagggtggtgcagctccggcaagagatagagttcaaccaggaagccctgctgttgagcgtagagtgggctggctctgaagatggcgccagtctggtcgggcgcgatatcgggaatatgttgcaagatgatctcgtacaggaaattatagctgactttctgggggcaactaaatccgccaagctccgtggctagaattgccagtgtttgcatccgaggccattgcaagcatatgcatatggattggtcgctggtgaactctagtggacgatgagccttcgatgaattgcttaaggaggggactgtaattcaaggaattcacctcatggctactgaagacatgagctaagatggcttaggtgatggtggggcatcaaacaagcagtgtcgaagtttgacctagttgtgtcatgctcgtcagctcatcaccattggccccgaactcagcaatagcgtacaactggatgatttcccccctctgaactttgaaaatattttttttcattaggttatcataatgctggaatatagatgcacaattttggtgtaaaataatctctggcggattttagtttgtttatcatgggatgcaataaggacagtgtcagttgagacatctttatctgccagttttagttagtccttttgacggtgtgctgagtggcgaaagggcttctagcgtaatggttaaggattccgagtagcacctctttcaggtctactctttcaggtctggattcgatccctgaaaaatatcgatacccattaaaaaactcgtacccatgacgggtttgat

SEQ ID NO: 84267 - DNA, 3516 bp, Zea Mays
cgaaacaaacgggtagctatttcctcgtcgtcgtcctccagtcctccctccctcccactcaaaaatcgagttcccgtttagctctcccagtccacctccctcccccctctccgtcccaagtcctccccgctcgtgcgcggtggatgcgagcgatttgctttgtcgccgcatcttatcgggcttaggagcggagatgagcatggcaggcattgcgcgcggcagatcgcgatggagacagggcgacgggtcgtcgaatcggaatgcggcacactccactgttcctaaccccgatcaccaaggggttgtgtcctctaggaagcaagcaacttaccctgggatgctatctgattcggtgtttgctacagtagacaggcaaagtaaaacaagaaaagccattgctgtaccaatgaaaatactgatagaagaagaattttcaaatgatgtcaattctaggcatatttcaccaggtgctgtaggaaggctcatgggtcttgattcgttgccctcatctggaatccataataagcatagacataccaaaagtcatgcaccaaagacttcacctagtagttttcatggtcgaactggtttgcatgacattccacacaggaggagtgtagataccattaatgtttttgaaggtatggaagccacaaaaacaaatatgcaccggagtccaagatctaaaattggaagtacaacttccagatcagacaaggttgttagtgctgatatcgatttcataaggcagaaatttatggatgctaagcgtctttctattgatgaatcccttcacatatcagaagaatttaatgagacacttgatgccctggtatctaacagtgaccttttgttggattttcttcaaaattttgatcctgctgtcataagggacctacataatcatggttctccatcctctaccgcaaactgcatcacaatattgaagccatctcgaagaaatcaatttattgacatggacaatatttatccgcaagagaaaggaaccgagagcatcttcaacgagcaaatggaagggaaacattctttatggaagccatattctaatgtgcccttgcagtccctaaaagaagattcttgttcatcaaggcagaaactgtcaaggtccagtcaccaagaaaatactggaaaacgtggctcccccacccggattgttgtcttgaagccaaatcttgagaaacctcatgatattgaagaagcccttcccctacatcataaaatatcccattctgattatagaaggcataaagaatgtccggaggttgatagatggactccaaatactgaagattacatgtgtcaggtgccccttggagattctgaaacattaagtcgtatggggaagggatctagagaaattgctagggagatcaccaaacagatgagagctgctaggggtggaagtaggaaacattctgtcaaaccggagactagaactcttgcttcagatgaaaggtcacagtttcagtcatctgttactagacccaagactccagagtcaattcatagatattctgagtcatgtgatgcttgggcttcttcaagtctcaactctttgccaacatattcgactgaaacatcagaaagcaaggaagcaaagaaacacctctctaacagatggaagaagacccgtcagtgtcagcatcaagaaactgataatgacagcttcaacacgcttggggatatgcttgctctctctgatcagaatgcatcaaatgttgctacccataaaatgacatgcaggaaatgtccaaagtcagaagtgcagagtgatagaatacaaagctcatatcctcttggcatcagcaccaatgatggttggaaagacacaactactagtaaattgacaaggtccaagtctcttccaccatccttcattcgtggagttcaaaagtcaaacaatagaaaaagaagcggcagcgttacatacaatgagttttcaatgcttaaagatgttcttaaggaccagcaagtgcttaagatgaccacaacagcactagataactgctttcttgtgcctaatctcgatgatctgatgcctaaggtactaatcatcagattctcctgaggagaataatcatcacctaggggatgtcagtgaaaccctttgtattctacctgatgtattagaatcgccagcgaactccaacaaagatgaccagcaaagtccaatgtctgttcttgaatcttccatggacggagaagatgtttactctggggattttgagaagatcagtgcagatctccaagagctcagattgcaacttgggcttctgaagagggagactacagacactagagatggcagcgagctttctatattgagtgatgatgagacagcacgtcgatcacttcctgagactggggaatcccatgcttttaggaatacggaagaaagggacttctcctacgtgtttgatatgcttgctgctctgggcatccacgcggccaacgaggatgacctccttgacaactgctacttactggagtgctctgcaggccttgatttatacgatgacctcgaacagaagtacgacagcctcattttatggcctgtgcatgagaggaagctcttgtttgatatcacgaatgctgttcttggggacatgatcacctccgtgatgaacggctgctcgaagggactgatggcgaggtgctcgcctggatggaatcgggaagagtttgctgagctcgtgtggcaaagggtggtgcagctccggcaagagatagagttcaaccaggaagccctgctgttgagcgtagagtgggctggctctgaagatggcgccagtctggtcgggcgcgatatcgggaatatgttgcaagatgatctcgtacaggaaattatagctgactttctgggggcaactaaatccgccaagctccgtggctagaattgccagtgtttgcatccgaggccattgcaagcatatgcatatggattggtcgctggtgaactctagtggacgatgagccttcgatgaattgcttaaggaggggactgtaattcaaggaattcacctcatggctactgaagacatgagctaagatggcttaggtgatggtggggcatcaaacaagcagtgtcgaagtttgacctagttgtgtcatgctcgtcagctcatcaccattggccccgaactcagcaatagcgtacaactggatgatttcccccctctgaactttgaaaatattttttttcattaggttatcataatgctggaatatagatgcacaattttggtgtaaaataatctctggcggattttagtttgtttatcatgggatgcaataaggacagtgtcagttgagacatctttatctgccagttttagttagtccttttgacggtgtgctgagtggcgaaagggcttctagcgtaatggttaaggattccgagtagcacctctttcaggtctactctttcaggtctggattcgatccctgaaaaatatcgatacccattaaaaaactcgtacccatgacgggtttgat

SEQ ID NO: 84268 - DNA, 3462 bp, Zea Mays
gacgaaacaaacgggtagctatttcctcgtcgtcgtcctccagtcctccctccctcccactcaaaaatcgagttcccgtttagctctcccagtccacctccctcccccctctccgtcccaagtcctccccgctcgtgcgcggtggatgcgagcgatttgctttgtcgccgcatcttatcgggcttaggagcggagatgagcatggcaggcattgcgcgcggcagatcgcgatggagacagggcgacgggtcgtcgaatcggaatgcggcacactccactgttcctaaccccgatcaccaaggggttgtgtcctctaggaagcaagcaacttaccctgggatgctatctgattcggtggtgctgtaggaaggctcatgggtcttgattcgttgccctcatctggaatccataataagcatagacataccaaaagtcatgcaccaaagacttcacctagtagttttcatggtcgaactggtttgcatgacattccacacaggaggagtgtagataccattaatgtttttgaaggtatggaagccacaaaaacaaatatgcaccggagtccaagatctaaaattggaagtacaacttccagatcagacaaggttgttagtgctgatatcgatttcataaggcagaaatttatggatgctaagcgtctttctattgatgaatcccttcacatatcagaagaatttaatgagacacttgatgccctggtatctaacagtgaccttttgttggattttcttcaaaattttgatcctgctgtcataagggacctacataatcatggttctccatcctctaccgcaaactgcatcacaatattgaagccatctcgaagaaatcaatttattgacatggacaatatttatccgcaagagaaaggaaccgagagcatcttcaacgagcaaatggaagggaaacattctttatggaagccatattctaatgtgcccttgcagtccctaaaagaagattcttgttcatcaaggcagaaactgtcaaggtccagtcaccaagaaaatactggaaaacgtggctcccccacccggattgttgtcttgaagccaaatcttgagaaacctcatgatattgaagaagcccttcccctacatcataaaatatcccattctgattatagaaggcataaagaatgtccggaggttgatagatggactccaaatactgaagattacatgtgtcaggtgccccttggagattctgaaacattaagtcgtatggggaagggatctagagaaattgctagggagatcaccaaacagatgagagctgctaggggtggaagtaggaaacattctgtcaaaccggagactagaactcttgcttcagatgaaaggtcacagtttcagtcatctgttactagacccaagactccagagtcaattcatagatattctgagtcatgtgatgcttgggcttcttcaagtctcaactctttgccaacatattcgactgaaacatcagaaagcaaggaagcaaagaaacacctctctaacagatggaagaagacccgtcagtgtcagcatcaagaaactgataatgacagcttcaacacgcttggggatatgcttgctctctctgatcagaatgcatcaaatgttgctacccataaaatgacatgcaggaaatgtccaaagtcagaagtgcagagtgatagaatacaaagctcatatcctcttggcatcagcaccaatgatggttggaaagacacaactactagtaaattgacaaggtccaagtctcttccaccatccttcattcgtggagttcaaaagtcaaacaatagaaaaagaagcggcagcgttacatacaatgagttttcaatgcttaaagatgttcttaagcaggaccagcaagtgcttaagatgaccacaacagcactagataactgctttcttgtgcctaatctcgatgatctgatgcctaagcatgagcaaattgaataccatcaagctgatgattacccagccacttatgatcctcatatagcatcagattctcctgaggagaataatcatcacctaggggatgtcagtgaaaccctttgtattctacctgatgtattagaatcgccagcgaactccaacaaagatgaccagcaaagtccaatgtctgttcttgaatcttccatggacggagaagatgtttactctggggattttgagaagatcagtgcagatctccaagagctcagattgcaacttgggcttctgaagagggagactacagacactagagatggcagcgagctttctatattgagtgatgatgagacagcacgtcgatcacttcctgagactggggaatcccatgcttttaggaatacggaagaaagggacttctcctacgtgtttgatatgcttgctgctctgggcatccacgcggccaacgaggatgacctccttgacaactgctacttactggagtgctctgcaggccttgatttatacgatgacctcgaacagaagtacgacagcctcattttatggcctgtgcatgagaggaagctcttgtttgatatcacgaatgctgttcttggggacatgatcacctccgtgatgaacggctgctcgaagggactgatggcgaggtgctcgcctggatggaatcgggaagagtttgctgagctcgtgtggcaaagggtggtgcagctccggcaagagatagagttcaaccaggaagccctgctgttgagcgtagagtgggctggctctgaagatggcgccagtctggtcgggcgcgatatcgggaatatgttgcaagatgatctcgtacaggaaattatagctgactttctgggggcaactaaatccgccaagctccgtggctagaattgccagtgtttgcatccgaggccattgcaagcatatgcatatggattggtcgctggtgaactctagtggacgatgagccttcgatgaattgcttaaggaggggactgtaattcaaggaattcacctcatggctactgaagacatgagctaagatggcttaggtgatggtggggcatcaaacaagcagtgtcgaagtttgacctagttgtgtcatgctcgtcagctcatcaccattggccccgaactcagcaatagcgtacaactggatgatttcccccctctgaactttgaaaatattttttttcattaggttatcataatgctggaatatagatgcacaattttggtgtaaaataatctctggcggattttagtttgtttatcatgggatgcaataaggacagtgtcagttgagacatctttatctgccagttttagttagtccttttgacggtgtgctgagtggcgaaagggcttctagcgtaatggttaaggattccgagtagcacctctttcaggtctactctttcaggtctggattcgatccctgaaaaatatcgatacccattaaaaaactcgtacccatgacgggtttgat

SEQ ID NO: 84269 - DNA, 3639 bp, Zea Mays
aagaaactggcagacgaaacaaacgggcattgcgcgcggcagatcgcgatggagacagggcgacgggtcgtcgaatcggaatgcggcacactccactgttcctaaccccgatcaccaaggggttgtgtcctctaggaagcaagcaacttaccctgggatgctatctgattcggtgtttgctacagtagacaggcaaagtaaaacaagaaaagccattgctgtaccaatgaaaatactgatagaagaagaattttcaaatgatgtcaattctaggcatatttcaccaggtgctgtaggaaggctcatgggtcttgattcgttgccctcatctggaatccataataagcatagacataccaaaagtcatgcaccaaagacttcacctagtagttttcatggtcgaactggtttgcatgacattccacacaggaggagtgtagataccattaatgtttttgaaggtatggaagccacaaaaacaaatatgcaccggagtccaagatctaaaattggaagtacaacttccagatcagacaaggttgttagtgctgatatcgatttcataaggcagaaatttatggatgctaagcgtctttctattgatgaatcccttcacatatcagaagaatttaatgagacacttgatgccctggtatctaacagtgaccttttgttggattttcttcaaaattttgatcctgctgtcataagggacctacataatcatggttctccatcctctaccgcaaactgcatcacaatattgaagccatctcgaagaaatcaatttattgacatggacaatatttatccgcaagagaaaggaaccgagagcatcttcaacgagcaaatggaagggaaacattctttatggaagccatattctaatgtgcccttgcagtccctaaaagaagattcttgttcatcaaggcagaaactgtcaaggtccagtcaccaagaaaatactggaaaacgtggctcccccacccggattgttgtcttgaagccaaatcttgagaaacctcatgatattgaagaagcccttcccctacatcataaaatatcccattctgattatagaaggcataaagaatgtccggaggttgatagatggactccaaatactgaagattacatgtgtcaggtgccccttggagattctgaaacattaagtcgtatggggaagggatctagagaaattgctagggagatcaccaaacagatgagagctgctaggggtggaagtaggaaacattctgtcaaaccggagactagaactcttgcttcagatgaaaggtcacagtttcagtcatctgttactagacccaagactccagagtcaattcatagatattctgagtcatgtgatgcttgggcttcttcaagtctcaactctttgccaacatattcgactgaaacatcagaaagcaaggaagcaaagaaacacctctctaacagatggaagaagacccgtcagtgtcagcatcaagaaactgataatgacagcttcaacacgcttggggatatgcttgctctctctgatcagaatgcatcaaatgttgctacccataaaatgacatgcaggaaatgtccaaagtcagaagtgcagagtgatagaatacaaagctcatatcctcttggcatcagcaccaatgatggttggaaagacacaactactagtaaattgacaaggtccaagtctcttccaccatccttcattcgtggagttcaaaagtcaaacaatagaaaaagaagcggcagcgttacatacaatgagttttcaatgcttaaagatgttcttaaggttggaccccactattctgaatatgcatatcgtagcaggcaaagacgatctctaagtagagattctacaattcatggtgatgaatctgatccgatgtccacagataatgaagaaaatatggtagttgaacgtgagatacatgtaaattatgaggaaccaattaatggtactgctgtgacatatacatctgggcagtcacaacatcctacaaatcttgaccatgaactagatgcaataggtgtactagataccagttctgcagtccctttcagtaataaaaagtctctttctcctgctgaacaggaccagcaagtgcttaagatgaccacaacagcactagataactgctttcttgtgcctaatctcgatgatctgatgcctaaggtactaatcatcagattctcctgaggagaataatcatcacctaggggatgtcagtgaaaccctttgtattctacctgatgtattagaatcgccagcgaactccaacaaagatgaccagcaaagtccaatgtctgttcttgaatcttccatggacggagaagatgtttactctggggattttgagaagatcagtgcagatctccaagagctcagattgcaacttgggcttctgaagagggagactacagacactagagatggcagcgagctttctatattgagtgatgatgagacagcacgtcgatcacttcctgagactggggaatcccatgcttttaggaatacggaagaaagggacttctcctacgtgtttgatatgcttgctgctctgggcatccacgcggccaacgaggatgacctccttgacaactgctacttactggagtgctctgcaggccttgatttatacgatgacctcgaacagaagtacgacagcctcattttatggcctgtgcatgagaggaagctcttgtttgatatcacgaatgctgttcttggggacatgatcacctccgtgatgaacggctgctcgaagggactgatggcgaggtgctcgcctggatggaatcgggaagagtttgctgagctcgtgtggcaaagggtggtgcagctccggcaagagatagagttcaaccaggaagccctgctgttgagcgtagagtgggctggctctgaagatggcgccagtctggtcgggcgcgatatcgggaatatgttgcaagatgatctcgtacaggaaattatagctgactttctgggggcaactaaatccgccaagctccgtggctagaattgccagtgtttgcatccgaggccattgcaagcatatgcatatggattggtcgctggtgaactctagtggacgatgagccttcgatgaattgcttaaggaggggactgtaattcaaggaattcacctcatggctactgaagacatgagctaagatggcttaggtgatggtggggcatcaaacaagcagtgtcgaagtttgacctagttgtgtcatgctcgtcagctcatcaccattggccccgaactcagcaatagcgtacaactggatgatttcccccctctgaactttgaaaatattttttttcattaggttatcataatgctggaatatagatgcacaattttggtgtaaaataatctctggcggattttagtttgtttatcatgggatgcaataaggacagtgtcagttgagacatctttatctgccagttttagttagtccttttgacggtgtgctgagtggcgaaagggcttctagcgtaatggttaaggattccgagtagcacctctttcaggtctactctttcaggtctggattcgatccctgaaaaatatcgatacccattaaaaaactcgtacccatgacgggtttgat

SEQ ID NO: 84270 - DNA, 3687 bp, Zea Mays
caagagagagggggagagagagaagaagaagaaactggcagacgaaacaaacgggtagctatttcctcgtcgtcgtcctccagtcctccctccctcccactcaaaaatcgagttcccgtttagctctcccagtccacctccctcccccctctccgtcccaagtcctccccgctcgtgcgcggtggatgcgagcgatttgctttgtcgccgcatcttatcgggcttaggagcggagatgagcatggcaggcattgcgcgcggcagatcgcgatggagacagggcgacgggtcgtcgaatcggaatgcggcacactccactgttcctaaccccgatcaccaaggggttgtgtcctctaggaagcaagcaacttaccctgggatgctatctgattcggtgtttgctacagtagacaggcaaagtaaaacaagaaaagccattgctgtaccaatgaaaatactgatagaagaagaattttcaaatgatgtcaattctaggcatatttcaccaggtgctgtaggaaggctcatgggtcttgattcgttgccctcatctggaatccataataagcatagacataccaaaagtcatgcaccaaagacttcacctagtagttttcatggtcgaactggtttgcatgacattccacacaggaggagtgtagataccattaatgtttttgaaggtatggaagccacaaaaacaaatatgcaccggagtccaagatctaaaattggaagtacaacttccagatcagacaaggttgttagtgctgatatcgatttcataaggcagaaatttatggatgctaagcgtctttctattgatgaatcccttcacatatcagaagaatttaatgagacacttgatgccctggtatctaacagtgaccttttgttggattttcttcaaaattttgatcctgctgtcataagggacctacataatcatggttctccatcctctaccgcaaactgcatcacaatattgaagccatctcgaagaaatcaatttattgacatggacaatatttatccgcaagagaaaggaaccgagagcatcttcaacgagcaaatggaagggaaacattctttatggaagccatattctaatgtgcccttgcagtccctaaaagaagattcttgttcatcaaggcagaaactgtcaaggtccagtcaccaagaaaatactggaaaacgtggctcccccacccggattgttgtcttgaagccaaatcttgagaaacctcatgatattgaagaagcccttcccctacatcataaaatatcccattctgattatagaaggcataaagaatgtccggaggttgatagatggactccaaatactgaagattacatgtgtcaggtgccccttggagattctgaaacattaagtcgtatggggaagggatctagagaaattgctagggagatcaccaaacagatgagagctgctaggggtggaagtaggaaacattctgtcaaaccggagactagaactcttgcttcagatgaaaggtcacagtttcagtcatctgttactagacccaagactccagagtcaattcatagatattctgagtcatgtgatgcttgggcttcttcaagtctcaactctttgccaacatattcgactgaaacatcagaaagcaaggaagcaaagaaacacctctctaacagatggaagaagacccgtcagtgtcagcatcaagaaactgataatgacagcttcaacacgcttggggatatgcttgctctctctgatcagaatgcatcaaatgttgctacccataaaatgacatgcaggaaatgtccaaagtcagaagtgcagagtgatagaatacaaagctcatatcctcttggcatcagcaccaatgatggttggaaagacacaactactagtaaattgacaaggtccaagtctcttccaccatccttcattcgtggagttcaaaagtcaaacaatagaaaaagaagcggcagcgttacatacaatgagttttcaatgcttaaagatgttcttaaggttggaccccactattctgaatatgcatatcgtagcaggcaaagacgatctctaagtagagattctacaattcatggaccagcaagtgcttaagatgaccacaacagcactagataactgctttcttgtgcctaatctcgatgatctgatgcctaagcatgagcaaattgaataccatcaagctgatgattacccagccacttatgatcctcatatagcatcagattctcctgaggagaataatcatcacctaggggatgtcagtgaaaccctttgtattctacctgatgtattagaatcgccagcgaactccaacaaagatgaccagcaaagtccaatgtctgttcttgaatcttccatggacggagaagatgtttactctggggattttgagaagatcagtgcagatctccaagagctcagattgcaacttgggcttctgaagagggagactacagacactagagatggcagcgagctttctatattgagtgatgatgagacagcacgtcgatcacttcctgagactggggaatcccatgcttttaggaatacggaagaaagggacttctcctacgtgtttgatatgcttgctgctctgggcatccacgcggccaacgaggatgacctccttgacaactgctacttactggagtgctctgcaggccttgatttatacgatgacctcgaacagaagtacgacagcctcattttatggcctgtgcatgagaggaagctcttgtttgatatcacgaatgctgttcttggggacatgatcacctccgtgatgaacggctgctcgaagggactgatggcgaggtgctcgcctggatggaatcgggaagagtttgctgagctcgtgtggcaaagggtggtgcagctccggcaagagatagagttcaaccaggaagccctgctgttgagcgtagagtgggctggctctgaagatggcgccagtctggtcgggcgcgatatcgggaatatgttgcaagatgatctcgtacaggaaattatagctgactttctgggggcaactaaatccgccaagctccgtggctagaattgccagtgtttgcatccgaggccattgcaagcatatgcatatggattggtcgctggtgaactctagtggacgatgagccttcgatgaattgcttaaggaggggactgtaattcaaggaattcacctcatggctactgaagacatgagctaagatggcttaggtgatggtggggcatcaaacaagcagtgtcgaagtttgacctagttgtgtcatgctcgtcagctcatcaccattggccccgaactcagcaatagcgtacaactggatgatttcccccctctgaactttgaaaatattttttttcattaggttatcataatgctggaatatagatgcacaattttggtgtaaaataatctctggcggattttagtttgtttatcatgggatgcaataaggacagtgtcagttgagacatctttatctgccagttttagttagtccttttgacggtgtgctgagtggcgaaagggcttctagcgtaatggttaaggattccgagtagcacctctttcaggtctactctttcaggtctggattcgatccctgaaaaatatcgatacccattaaaaaactcgtacccatgacgggtttgat

SEQ ID NO: 84271 - DNA, 3777 bp, Zea Mays
cacaagagagagggggagagagagaagaagaagaaactggcagacgaaacaaacgggtagctatttcctcgtcgtcgtcctccagtcctccctccctcccactcaaaaatcgagttcccgtttagctctcccagtccacctccctcccccctctccgtcccaagtcctccccgctcgtgcgcggtggatgcgagcgatttgctttgtcgccgcatcttatcgggcttaggagcggagatgagcatggcaggcattgcgcgcggcagatcgcgatggagacagggcgacgggtcgtcgaatcggaatgcggcacactccactgttcctaaccccgatcaccaaggggttgtgtcctctaggaagcaagcaacttaccctgggatgctatctgattcggtgtttgctacagtagacaggcaaagtaaaacaagaaaagccattgctgtaccaatgaaaatactgatagaagaagaattttcaaatgatgtcaattctaggcatatttcaccaggtgctgtaggaaggctcatgggtcttgattcgttgccctcatctggaatccataataagcatagacataccaaaagtcatgcaccaaagacttcacctagtagttttcatggtcgaactggtttgcatgacattccacacaggaggagtgtagataccattaatgtttttgaaggtatggaagccacaaaaacaaatatgcaccggagtccaagatctaaaattggaagtacaacttccagatcagacaaggttgttagtgctgatatcgatttcataaggcagaaatttatggatgctaagcgtctttctattgatgaatcccttcacatatcagaagaatttaatgagacacttgatgccctggtatctaacagtgaccttttgttggattttcttcaaaattttgatcctgctgtcataagggacctacataatcatggttctccatcctctaccgcaaactgcatcacaatattgaagccatctcgaagaaatcaatttattgacatggacaatatttatccgcaagagaaaggaaccgagagcatcttcaacgagcaaatggaagggaaacattctttatggaagccatattctaatgtgcccttgcagtccctaaaagaagattcttgttcatcaaggcagaaactgtcaaggtccagtcaccaagaaaatactggaaaacgtggctcccccacccggattgttgtcttgaagccaaatcttgagaaacctcatgatattgaagaagcccttcccctacatcataaaatatcccattctgattatagaaggcataaagaatgtccggaggttgatagatggactccaaatactgaagattacatgtgtcaggtgccccttggagattctgaaacattaagtcgtatggggaagggatctagagaaattgctagggagatcaccaaacagatgagagctgctaggggtggaagtaggaaacattctgtcaaaccggagactagaactcttgcttcagatgaaaggtcacagtttcagtcatctgttactagacccaagactccagagtcaattcatagatattctgagtcatgtgatgcttgggcttcttcaagtctcaactctttgccaacatattcgactgaaacatcagaaagcaaggaagcaaagaaacacctctctaacagatggaagaagacccgtcagtgtcagcatcaagaaactgataatgacagcttcaacacgcttggggatatgcttgctctctctgatcagaatgcatcaaatgttgctacccataaaatgacatgcaggaaatgtccaaagtcagaagtgcagagtgatagaatacaaagctcatatcctcttggcatcagcaccaatgatggttggaaagacacaactactagtaaattgacaaggtccaagtctcttccaccatccttcattcgtggagttcaaaagtcaaacaatagaaaaagaagcggcagcgttacatacaatgagttttcaatgcttaaagatgttcttaaggttggaccccactattctgaatatgcatatcgtagcaggcaaagacgatctctaagtagagattctacaattcatggtgatgaatctgatccgatgtccacagataatgaagaaaatatggtagttgaacgtgagatacatgtaaattatgaggaaccaattaatggtactgctgtgacatatacatctgggcagtcacaacatcctacaaatcttgaccatgaactagatgcaataggtgtactagataccagttctgcagtccctttcagtaataaaaagtctctttctcctgctgaacaggaccagcaagtgcttaagatgaccacaacagcactagataactgctttcttgtgcctaatctcgatgatctgatgcctaagaatcgccagcgaactccaacaaagatgaccagcaaagtccaatgtctgttcttgaatcttccatggacggagaagatgtttactctggggattttgagaagatcagtgcagatctccaagagctcagattgcaacttgggcttctgaagagggagactacagacactagagatggcagcgagctttctatattgagtgatgatgagacagcacgtcgatcacttcctgagactggggaatcccatgcttttaggaatacggaagaaagggacttctcctacgtgtttgatatgcttgctgctctgggcatccacgcggccaacgaggatgacctccttgacaactgctacttactggagtgctctgcaggccttgatttatacgatgacctcgaacagaagtacgacagcctcattttatggcctgtgcatgagaggaagctcttgtttgatatcacgaatgctgttcttggggacatgatcacctccgtgatgaacggctgctcgaagggactgatggcgaggtgctcgcctggatggaatcgggaagagtttgctgagctcgtgtggcaaagggtggtgcagctccggcaagagatagagttcaaccaggaagccctgctgttgagcgtagagtgggctggctctgaagatggcgccagtctggtcgggcgcgatatcgggaatatgttgcaagatgatctcgtacaggaaattatagctgactttctgggggcaactaaatccgccaagctccgtggctagaattgccagtgtttgcatccgaggccattgcaagcatatgcatatggattggtcgctggtgaactctagtggacgatgagccttcgatgaattgcttaaggaggggactgtaattcaaggaattcacctcatggctactgaagacatgagctaagatggcttaggtgatggtggggcatcaaacaagcagtgtcgaagtttgacctagttgtgtcatgctcgtcagctcatcaccattggccccgaactcagcaatagcgtacaactggatgatttcccccctctgaactttgaaaatattttttttcattaggttatcataatgctggaatatagatgcacaattttggtgtaaaataatctctggcggattttagtttgtttatcatgggatgcaataaggacagtgtcagttgagacatctttatctgccagttttagttagtccttttgacggtgtgctgagtggcgaaagggcttctagcgtaatggttaaggattccgagtagcacctctttcaggtctactctttcaggtctggattcgatccctgaaaaatatcgatacccattaaaaaactcgtacccatgacgggtttgat

SEQ ID NO: 84272 - DNA, 3666 bp, Zea Mays
aagagtacaaaaaccccacacaagagagattttagagagagagagaaacacgccacaagagagagggggagagagagaagaagaagaaactggcagacgaaacaaacgggtagctatttcctcgtcgtcgtcctccagtcctccctccctcccactcaaaaatcgagttcccgtttagctctcccagtccacctccctcccccctctccgtcccaagtcctccccgctcgtgcgcggtggatgcgagcgatttgctttgtcgccgcatcttatcgggcttaggagcggagatgagcatggcaggcattgcgcgcggcagatcgcgatggagacagggcgacgggtcgtcgaatcggaatgcggcacactccactgttcctaaccccgatcaccaaggggttgtgtcctctaggaagcaagcaacttaccctgggatgctatctgattcggtgtttgctacagtagacaggcaaagtaaaacaagaaaagccattgctgtaccaatgaaaatactgatagaagaagaattttcaaatgatgtcaattctaggcatatttcaccaggtgctgtaggaaggctcatgggtcttgattcgttgccctcatctggaatccataataagcatagacataccaaaagtcatgcaccaaagacttcacctagtagttttcatggtcgaactggtttgcatgacattccacacaggaggagtgtagataccattaatgtttttgaaggtatggaagccacaaaaacaaatatgcaccggagtccaagatctaaaattggaagtacaacttccagatcagacaaggttgttagtgctgatatcgatttcataaggcagaaatttatggatgctaagcgtctttctattgatgaatcccttcacatatcagaagaatttaatgagacacttgatgccctggtatctaacagtgaccttttgttggattttcttcaaaattttgatcctgctgtcataagggacctacataatcatggttctccatcctctaccgcaaactgcatcacaatattgaagccatctcgaagaaatcaatttattgacatggacaatatttatccgcaagagaaaggaaccgagagcatcttcaacgagcaaatggaagggaaacattctttatggaagccatattctaatgtgcccttgcagtccctaaaagaagattcttgttcatcaaggcagaaactgtcaaggtccagtcaccaagaaaatactggaaaacgtggctcccccacccggattgttgtcttgaagccaaatcttgagaaacctcatgatattgaagaagcccttcccctacatcataaaatatcccattctgattatagaaggcataaagaatgtccggaggttgatagatggactccaaatactgaagattacatgtgtcaggtgccccttggagattctgaaacattaagtcgtatggggaagggatctagagaaattgctagggagatcaccaaacagatgagagctgctaggggtggaagtaggaaacattctgtcaaaccggagactagaactcttgcttcagatgaaaggtcacagtttcagtcatctgttactagacccaagactccagagtcaattcatagatattctgagtcatgtgatgcttgggcttcttcaagtctcaactctttgccaacatattcgactgaaacatcagaaagcaaggaagcaaagaaacacctctctaacagatggaagaagacccgtcagtgtcagcatcaagaaactgataatgacagcttcaacacgcttggggatatgcttgctctctctgatcagaatgcatcaaatgttgctacccataaaatgacatgcaggaaatgtccaaagtcagaagtgcagagtgatagaatacaaagctcatatcctcttggcatcagcaccaatgatggttggaaagacacaactactagtaaattgacaaggtccaagtctcttccaccatccttcattcgtggagttcaaaagtcaaacaatagaaaaagaagcggcagcgttacatacaatgagttttcaatgcttaaagatgttcttaaggaccagcaagtgcttaagatgaccacaacagcactagataactgctttcttgtgcctaatctcgatgatctgatgcctaagcatgagcaaattgaataccatcaagctgatgattacccagccacttatgatcctcatatagcatcagattctcctgaggagaataatcatcacctaggggatgtcagtgaaaccctttgtattctacctgatgtattagaatcgccagcgaactccaacaaagatgaccagcaaagtccaatgtctgttcttgaatcttccatggacggagaagatgtttactctggggattttgagaagatcagtgcagatctccaagagctcagattgcaacttgggcttctgaagagggagactacagacactagagatggcagcgagctttctatattgagtgatgatgagacagcacgtcgatcacttcctgagactggggaatcccatgcttttaggaatacggaagaaagggacttctcctacgtgtttgatatgcttgctgctctgggcatccacgcggccaacgaggatgacctccttgacaactgctacttactggagtgctctgcaggccttgatttatacgatgacctcgaacagaagtacgacagcctcattttatggcctgtgcatgagaggaagctcttgtttgatatcacgaatgctgttcttggggacatgatcacctccgtgatgaacggctgctcgaagggactgatggcgaggtgctcgcctggatggaatcgggaagagtttgctgagctcgtgtggcaaagggtggtgcagctccggcaagagatagagttcaaccaggaagccctgctgttgagcgtagagtgggctggctctgaagatggcgccagtctggtcgggcgcgatatcgggaatatgttgcaagatgatctcgtacaggaaattatagctgactttctgggggcaactaaatccgccaagctccgtggctagaattgccagtgtttgcatccgaggccattgcaagcatatgcatatggattggtcgctggtgaactctagtggacgatgagccttcgatgaattgcttaaggaggggactgtaattcaaggaattcacctcatggctactgaagacatgagctaagatggcttaggtgatggtggggcatcaaacaagcagtgtcgaagtttgacctagttgtgtcatgctcgtcagctcatcaccattggccccgaactcagcaatagcgtacaactggatgatttcccccctctgaactttgaaaatattttttttcattaggttatcataatgctggaatatagatgcacaattttggtgtaaaataatctctggcggattttagtttgtttatcatgggatgcaataaggacagtgtcagttgagacatctttatctgccagttttagttagtccttttgacggtgtgctgagtggcgaaagggcttctagcgtaatggttaaggattccgagtagcacctctttcaggtctactctttcaggtctggattcgatccctgaaaaatatcgatacccattaaaaaactcgtacccatgacgggtttgat

SEQ ID NO: 84273 - DNA, 1787 bp, Zea Mays
ctcctccagtcctcttgtgaagtcagagcgatgactcgagtccccgcccgaactggtcgtctccttcgccgggctgcccccaccacgcgaaggccgggtttagcatcgccctgctttgtttagctgcggttataaccgccggacgccggtgatggccacgtaatccggtgtccgctcgttaaccacaaacgtccgagcgtcacctggcgtcggctgtctggccgcgcggactggagcaatcaaaatctctcggccggcccccatacgcgccgcggacacccacccaccaccaccacacgcagtgacgcagcccgcccctctctctctctctctcggttcctgcgcacgcacacacgcacgtttccagttcgaccgagccagagccccgccccgggcagtttccattcgctgtcgcgctcctcctcctcctcctgcacatcccctccccccgaattcgagccggaggaccgaagagtagatctgcgccgggcgaccagaggatggccgtcaactgggagctgcagggctgctgccaccgcgaccagaggatcttcatcgccgccgttggagtctccaccgtcgtcatcctcctcctctggaggacgttcctgctcacgccgttcaagctcatcaccgtcttcctccacgagaccagccacgcgctcgcctgcaagctcacctgcggcgatgtagaaggcatgcaggtccatgcgaatgagggtggcgttactcaaactcggggtggcatatattggataatcttgcccgctggatatctgggttcatcattttggggaatggtgttcatacttgcatccacaaatctcctcactacaagaattgcagcggtaaccattatcatctggctaagtgttattatctcttgtttgaattgtgcagtggtttcttcgctggctctgccttggattcattgtattcattgctgttgtttgggtcatacaagaatttacatctttccatattctgaaatatgtgatcttattcataggtgtgatgaacagcttattttcagtttatgatatttatgacgacttgatatcccgaagagttaatacaagtgatgctgagaagtttgctgaaatatgcccttgcccttgcaatggttttgcatggggtgttatatggggattcatctcgtttatcttcctctgcgcttcaatataccttggactggtcatattgtcttgagggttccaacctcgcgcacgccgttttgatctgacaaccaactctggttggctttttccagagttctccttgctctagattttgggttcaaacttacattgttctggcggctgtacagtatacatgtagggtaaacatgtacatccatcgtggagttaattcggcggggattgttcatgtgattcttcgattttagcggttctatagataccattgctcatttatggtctgtagcctcattgctcatttgaccaatttgaaatcgtattcagaaacgccatattcttcgatttacaggtacatgtacaccatattacctttgccccattgctcatttgaccaattgattgaaatcgtattcagaaacgcaacgctgtggcattttatctggcaccgtttttgcaacgggatgattttgctaccgctagcaggagttgagttagtgcccgctgcggtttagtttatcctggtactttgagaggccctctaatccactgcttttgacggatggaactgtctcgtggttaactaactgtagatcttgtcgccatgttggttcgaagcaaaaaaaaaaaaaa

SEQ ID NO: 84274 - DNA, 2329 bp, Zea Mays
ctcctccagtcctcttgtgaagtcagagcgatgactcgagtccccgcccgaactggtcgtctccttcgccgggctgcccccaccacgcgaaggccgggtttagcatcgccctgctttgtttagctgcggttataaccgccggacgccggtgatggccacgtaatccggtgtccgctcgttaaccacaaacgtccgagcgtcacctggcgtcggctgtctggccgcgcggactggagcaatcaaaatctctcggccggcccccatacgcgccgcggacacccacccaccaccaccacacgcagtgacgcagcccgcccctctctctctctctctcggttcctgcgcacgcacacacgcacgtttccagttcgaccgagccagagccccgccccgggcagtttccattcgctgtcgcgctcctcctcctcctcctgcacatcccctccccccgaattcgagccggaggaccgaagagtagatctgcgccgggcgaccagaggatggccgtcaactgggagctgcagggctgctgccaccgcgaccagaggatcttcatcgccgccgttggagtctccaccgtcgtcatcctcctcctctggaggacgttcctgctcacgccgttcaagctcatcaccgtcttcctccacgagaccagccacgcgctcgcctgcaagctcacctgcggcgatgtagaaggcatgcaggtccatgcgaatgagggtggcgttactcaaactcggggtggcatatattggataatcttgcccgctggatatctgggttcatcattttggggaatggtgttcatacttgcatccacaaatctcctcactacaagaattgcagcgggttgtttcatacttgcactgtttattgtcctttttgttgcagacaattggtttcttcgctggctctgccttggattcattgtattcattgctgttgtttgggtcatacaagaatttacatctttccatattctgaaatatgtgatcttattcataggtgtgatgaacagcttattttcagtttatgatatttatgacgacttgatatcccgaagagttaatacaagtgatgctgagaagtttgctgaaatatgcccttgcccttgcaatggttttgcatggggtgttatatggtctgctcctagtttcaatagttaattttttttgtataccttgatgtattaagataatccagatggtaaagacgcccatgctaacatttgctgttctttctttcaggggattcatctcgtttatcttcctctgcgcttcaatataccttggactggtcatattgtcttgaggtgattcctatgttttcgtgttaccacattttattctccttggtttgacatgcttattcagtgttaagctgcaacacagaacacagtcacacaggtgctattaacttagttgttaggaaggcatgccccagaactaaatatatcattacaagatttgaaggacggtaggaaactaggaatgaagcatcgtgcatcataaagtgagaaatagtacttcccggcccgcgtcgttaaaagttgcaggtgttgtgaatggaaatggggcacaggacgcaatccttgatttcaatagcctccagtctgcagactgatactatctttctaacaataaatctgttgttcaactgacgctgctatgcagccgttccctgctttttttttcctgcatatgatttaagctcaaacttactctgaagcacacattttattttcttgttcagggttccaacctcgcgcacgccgttttgatctgacaaccaactctggttggctttttccagagttctccttgctctagattttgggttcaaacttacattgttctggcggctgtacagtatacatgtagggtaaacatgtacatccatcgtggagttaattcggcggggattgttcatgtgattcttcgattttagcggttctatagataccattgctcatttatggtctgtagcctcattgctcatttgaccaatttgaaatcgtattcagaaacgccatattcttcgatttacaggtacatgtacaccatattacctttgccccattgctcatttgaccaattgattgaaatcgtattcagaaacgcaacgctgtggcattttatctggcaccgtttttgcaacgggatgattttgctaccgctagcaggagttgagttagtgcccgctgcggtttagtttatcctggtactttgagaggccctctaatccactgcttttgacggatggaactgtctcgtggttaactaactgtagatcttgtcgccatgttggttcgaagcaaaaaaaaaaaaaa

SEQ ID NO: 84275 - DNA, 1002 bp, Zea Mays
ccgctttttcctcccgcgggccgctccgtgcgcccggtccagcagaggaagccccggcggcgagcggtgtcctcatccgtggcgcatgtatatataggatcctcctctgtcgactctgcacgccttatcgccacacagacacagcacaacgcacggagtcagattgcgggcagcgctcgctaatcgccatagcctatagctgtagagaaactgctccgggaggaagtagacaaggagagagagagagaggtcaacagggcactgccggatccggagccaaaaaaaaacccagaaggatccatggctcccggagccggagacgactctgatcccgcctcttatatccacacggtgcagcacctgatagagaggtgcatgacgttcgggatgagcatggaggagtgcatggaggcgctggcgaagcgcgccgacgtccaacccgtggtcacctccacagtgtggaaggagctggagaaggagaacaaggagttcttcgacaagtacaggcagtggatctcggagaagagaagcgggagtacctcctagtcctagtagcacgggactcgatcgtgtctctctgctggcttagctcgctttaaattagcccgtgatgtgtattacgtgtgcttagttattttaggatttattattacttactgtgtttgattagggaggaataagcggtagggagggagggaggcttgtaatgtgattctctgtaagcaagcagagcagtagtcacctgtacggcgcgggctgtggcgttatgtgtacagggtaaagcagggaaagccatctcatcatgcgcagcgcagaactgtacgcaagtagccgttgctggcgtggcgtatgtatgtgtatacacaatttgccccctacttctctaccgtatgggctcatcgtcgctaaaagtacacagcagttgaaaaagctcgtccttttctgacagtaatgtaaaccagaaattgagcttggtgtacttatcaaggcggtaccgttgcg

SEQ ID NO: 84276 - DNA, 877 bp, Zea Mays
gttggttcctccaaagatcaccacatggcagcttcttcttctgaactattgaaaccgtgattgcgtgctgtcagctgtagagaaactgctccgggaggaagtagacaaggagagagagagagaggtcaacagggcactgccggatccggagccaaaaaaaaacccagaaggatccatggctcccggagccggagacgactctgatcccgcctcttatatccacacggtgcagcacctgatagagaggtgcatgacgttcgggatgagcatggaggagtgcatggaggcgctggcgaagcgcgccgacgtccaacccgtggtcacctccacagtgtggaaggagctggagaaggagaacaaggagttcttcgacaagtacaggcagtggatctcggagaagagaagcgggagtacctcctagtcctagtagcacgggactcgatcgtgtctctctgctggcttagctcgctttaaattagcccgtgatgtgtattacgtgtgcttagttattttaggatttattattacttactgtgtttgattagggaggaataagcggtagggagggagggaggcttgtaatgtgattctctgtaagcaagcagagcagtagtcacctgtacggcgcgggctgtggcgttatgtgtacagggtaaagcagggaaagccatctcatcatgcgcagcgcagaactgtacgcaagtagccgttgctggcgtggcgtatgtatgtgtatacacaatttgccccctacttctctaccgtatgggctcatcgtcgctaaaagtacacagcagttgaaaaagctcgtccttttctgacagtaatgtaaaccagaaattgagcttggtgtacttatcaaggcggtaccgttgcg

SEQ ID NO: 84277 - DNA, 923 bp, Zea Mays
cgcagattggggaaacgagcgaaaactttccacagctagatgccctcctcccccccgattcggaccatccttctggaagcttgtgctcgtataatcccaccaagtcaccaaccaggccagctgtagagaaactgctccgggaggaagtagacaaggagagagagagagaggtcaacagggcactgccggatccggagccaaaaaaaaacccagaaggatccatggctcccggagccggagacgactctgatcccgcctcttatatccacacggtgcagcacctgatagagaggtgcatgacgttcgggatgagcatggaggagtgcatggaggcgctggcgaagcgcgccgacgtccaacccgtggtcacctccacagtgtggaaggagctggagaaggagaacaaggagttcttcgacaagtacaggcagtggatctcggagaagagaagcgggagtacctcctagtcctagtagcacgggactcgatcgtgtctctctgctggcttagctcgctttaaattagcccgtgatgtgtattacgtgtgcttagttattttaggatttattattacttactgtgtttgattagggaggaataagcggtagggagggagggaggcttgtaatgtgattctctgtaagcaagcagagcagtagtcacctgtacggcgcgggctgtggcgttatgtgtacagggtaaagcagggaaagccatctcatcatgcgcagcgcagaactgtacgcaagtagccgttgctggcgtggcgtatgtatgtgtatacacaatttgccccctacttctctaccgtatgggctcatcgtcgctaaaagtacacagcagttgaaaaagctcgtccttttctgacagtaatgtaaaccagaaattgagcttggtgtacttatcaaggcggtaccgttgcg

SEQ ID NO: 84278 - DNA, 826 bp, Zea Mays
tagcagcacatgaggcccagaaaaagcaggagaaagaagaggaggaagagaagctaattctgcagaaggctaaggagttggatgcctttgatcagcagaatcatggagctgttccccagtaccatgatcgcagtggttcccaatacaagaatgggtttcatggagcaaatagtgtgaaggtcacttcttttgaagaggaagcccttcgcaatatgaaggcattctggctcccttcagctactcctgaagctacggtcaagaggaaactgctgatcagaagagcagcaaggcaggaaactcctgtagctacatgtgccctagttgcaagtccactctcacaaataccatgtcccttgtggcggtgagcacctgtggccatgtcttctgcaagaaatgttccgacaagtttctagtgaaggataaagcttgcttggagtgcagcaaaccattcagggagaggaatctggttccattggagaaaggaggaactgggtttgctgcacatgatgaacgcctggaggcaagagatttcaagtatttgggtagtggctctgggttagggctagtgaagcctgcaccaaaaacttactaaccttgaataattatagctgatgttgtgtattgtttaccatggtgtcatgaaattatgtaacctggagaattttgttttatggcatcaaaatcgttgtattcagaacagttcatcttcagtcttttaggggctgtttggtattacgcctaaactgccacctcccgccacacttttgctgccgcagctgtggcggccgattcggccgccgcggcttaggcgcggcgccgcgcgtca

SEQ ID NO: 84279 - DNA, 1070 bp, Zea Mays
atgccgcagcggcattcgaaaaacaacaacgacctcgccttcttcacgtacgaggagaagcggaagctcgggtacggcacgcagcgggagcgcctgggaaaggactccatcaagcccttcgacgcctgctgcctctgcctcaagccgctcatcggcccgctctgctgccccaagggccacacattctgtaaggagtgcatcctcgagtgcctcctctcccagaagaaggacatcaagcgcaagctagcagcacatgaggcccagaaaaagcaggagaaagaagaggaggaagagaagctaattctgcagaaggctaaggagttggatgcctttgatcagcagaatcatggagctgttccccagtaccatgatcgcagtggttcccaatacaagaatgggtttcatggagcaaatagtgtgaaggtcacttcttttgaagaggaagcccttcgcaatatgaaggcattctggctcccttcagctactcctgaagctacggtcaagaggaaactgctgatcagaagagcagcaaggcaggaaactcctgtagctacatgtgccctagttgcaagtccactctcacaaataccatgtcccttgtggcggtgagcacctgtggccatgtcttctgcaagaaatgttccgacaagtttctagtgaaggataaagcttgcttggagtgcagcaaaccattcagggagaggaatctggttccattggagaaaggaggaactgggtttgctgcacatgatgaacgcctggaggcaagagatttcaagtatttgggtagtggctctgggttagggctagtgaagcctgcaccaaaaacttactaaccttgaataattatagctgatgttgtgtattgtttaccatggtgtcatgaaattatgtaacctggagaattttgttttatggcatcaaaatcgttgtattcagaacagttcatcttcagtcttttaggggctgtttggtattacgcctaaactgccacctcccgccacacttttgctgccgcagctgtggcggccgattcggccgccgcggcttaggcgcggcgccgcgcgtca

SEQ ID NO: 84280 - DNA, 1069 bp, Zea Mays
tcctctcgcggcggcccaaatccaacgcctgcagctcgcgccaagtcattgatccgcgtccacccatctccaccaatctccttccatcatgcccttctacaaaagctaccaccccctttttgcacaccaagaaaagcctccattcccgagtctccagccaaccgcatccagtccacccccatccccctcgaccccgacaaacccgacccgatggcgcccaaggcggagaagacgaccgcaggtaagaagcccaagtccgagaagcgcctgccggcctcgaagtcctccggcaaggagggcggcgagaagaaggggaagaagaaggccaagaagagcgtggagacctacaaaatctacatcttcaaggtcctgaagcaggtgcaccccgacatcggcatctcctccaaggccatgtccatcatgaactccttcatcaacgacatattcgagaagctcgccggcgaggccgccaagctcgcgcggtacaacaagaagcccaccatcacctcccgcgagatccagacctccgtgcgcctcgtcctcccaggagagctcgccaaacatgccgtctccgagggaaccaaggccgtcaccaagttcaccagcaattgagcagcctgcagcgtccacggatttgttaggtctccccttcttacaagggttcttcgtcgtgtcctctacccctccccgcctatgtatgtgctgtgaaatcgttgatgttctcgtcgggtgaacaaaggccagtagctagcttgcctgcttcataaatcgtgccggattgtaatgggcctcttagatttgacgcccctattttggaatatagttgtatcggtgccttccctgcttgctaattttcttctgccctggtaatttgggatctaagattttgaccgggcagtggagaaccgatgaagatacagggtcatgaggtcgaaagctcatgggtttgtttcagtctcaggttcttcggcatggatatatttatgagcggtaactatgtattgcagccatatggttcaccatgtgatgaaatgatgattccatttgcgccacaacttgtgaatgcgtg

SEQ ID NO: 84281 - DNA, 2361 bp, Zea Mays
atgaacgggcggccagccagcgcgcgaacggtttcccgcacccgacgcgctctccgcagattaaaaggcggcggcggcctacctgtggcgtctcttggccctagtcctcgcagaaaccgtcgtgtcgccgaaaccagctcgccggtttcgcctccccaccgttccttgtctcgcgcccctctcggctccagcctccaggtctgcttgttgctatctttcaatatgccggcgtcggagatggaagcgcctgcgtccgcgcacgcctcggcggcggccgctgatgacagccaggaggactctgcgcccacggccgcggtggcggcggccgctgatgaggcgcagccggccgcagctgcagtacccgcgctgtacgtgggcgatctgcacgaggacgtggcggaagaacacctcttcgaagctttcagcaagatcggcactgtcacgtccgtgcgtgtttgccgtgacaacgccacaagcagatctctccgatatggatacgtgaattatttctctcgcgccgacgctgtggtggctcttgataagttgaatcatagcttggttttggataagcccataagggtaatgtggtccaatcgggatccagatgcccggagaagtggcgttggtaacatttttgttaagaaccttagtagttctgttgacaatgccagccttcaagaattgttctccaagtttggagacgttttgtcatgcaaagttgcaaaaaatgaggatgggaccagtagaggatatgggtttgttcaatttacatcacaggagtcagcagatgaagcaattgggaacctcaatggctcccttttcaatgacagaaaattgcatgtagctacgttcattaagaaaagtgaacgatctgcaaataatgatgataagtttactaacttatatatgaagcatctagatgatgacataacagaggaacttgttaaattgaagttctctcagtttggttcgatagtcagcgtgaagattatgaagagacccgatgggtcatctttggggtttgggtttgtcagtttccaaaaccctgagagtgctattaaagcacagagcaccatgaatgggatgctacttggatcaaaagccttatacgtggcgagggctcaaaagaaggaggaaaggaaacaatatttgcaacgcttacatgaggaaaagagaaacgaaataatgactaggtgcaatgaatcaaatgtatatataaaaaacattcatgacgaggttgatgatgatgctcttcgtgctcgctttgttgaatttggtaatatcacatcagcaaaagtcatgcgtgatgacaagggaatcagtagaggctttggatttgtatgctatagtacccctgaggaggcaaagagcgctgtaaacaacatgcgaggtgttatgttttttgggaaaccattgtatgttgctattttccaaagaaaagaggagagaaaagccaagttgcagcaacatttcgctcagcttgcaagaatggttggacctgcgaactctatgatccccactggatatccacaagtttattttgcccatccaagtacccatatccctcaaggtcctccaagacatggttttgtgtatccacccatgggccttagtcatgaatggagaccaagtatgttccccccagcaccaaatctccagcaaatacattcacccgtgatgccaaattcgccaaggcattacagaagcaaccgaggaaggatgggtgggaatatgatgcctcttcctcatgcagttcatacaatgaactatatgacacatccacagccagctaaagaattcatgtctttgcctcgacagcccgaactcgcgagcaaaatcactgggatgctcttggagcttgacaactctgaagtggtcacgttgctttgctcgtcggagatgttgtcggttaaggtcgacgagtgtgtccagctgttgcaagcaaccaagcctaaggctgaggatcatgaggcactgcacccaggattcatgctcgagcctcggcctcctagtgtaaatgccagttgatgaggttctgattgcgcggatgagcttctggatgcgcttgtgtttagggatatggtaacaagctagtcgctagctgctgcgttcgttctctcctagtttgcgaagttttggtgtttggattaatctactgagccgttattgctttctatatatagaacttaatagtaataaggactatatatattcagctagaaactttttatctggacatgttatatgaatgtatgttagaacctttattcctatccaacattaggaatagttgtccatgcgtctcctatacctttcatatgatattttcatttggacatgttatttgaatctcagtattag

SEQ ID NO: 84282 - DNA, 2532 bp, Zea Mays
atgaacgggcggccagccagcgcgcgaacggtttcccgcacccgacgcgctctccgcagattaaaaggcggcggcggcctacctgtggcgtctcttggccctagtcctcgcagaaaccgtcgtgtcgccgaaaccagctcgccggtttcgcctccccaccgttccttgtctcgcgcccctctcggctccagcctccaggtctgcttgttgctatctttcaatatgccggcgtcggagatggaagcgcctgcgtccgcgcacgcctcggcggcggccgctgatgacagccaggaggactctgcgcccacggccgcggtggcggcggccgctgatgaggcgcagccggccgcagctgcagtacccgcgctgtacgtgggcgatctgcacgaggacgtggcggaagaacacctcttcgaagctttcagcaagatcggcactgtcacgtccgtgcgtgtttgccgtgacaacgccacaagcagatctctccgatatggatacgtgaattatttctctcgcgccgacgctgtggtggctcttgataagttgaatcatagcttggttttggataagcccataagggtaatgtggtccaatcgggatccagatgcccggagaagtggcgttggtaacatttttgttaagaaccttagtagttctgttgacaatgccagccttcaagaattgttctccaagtttggagacgttttgtcatgcaaagttgcaaaaaatgaggatgggaccagtagaggatatgggtttgttcaatttacatcacaggagtcagcagatgaagcaattgggaacctcaatggctcccttttcaatgacagaaaattgcatgtagctacgttcattaagaaaagtgaacgatctgcaaataatgatgataagtttactaacttatatatgaagcatctagatgatgacataacagaggaacttgttaaattgaagttctctcagtttggttcgatagtcagcgtgaagattatgaagagacccgatgggtcatctttggggtttgggtttgtcagtttccaaaaccctgagagtgctattaaagcacagagcaccatgaatgggatgctacttgccttatacgtggcgagggctcaaaagaaggaggaaaggaaacaatatttgcaacgcttacatgaggaaaagagaaacgaaataatgactaggtgcaatgaatcaaatgtatatataaaaaacattcatgacgaggttgatgatgatgctcttcgtgctcgctttgttgaatttggtaatatcacatcagcaaaagtcatgcgtgatgacaagggaatcagtagaggctttggatttgtatgctatagtacccctgaggaggcaaagagcgctgtaaacaacatgcgaggtgttatgttttttgggaaaccattgtatgttgctattttccaaagaaaagaggagagaaaagccaagttgcagcaacatttcgctcagcttgcaagaatggttggacctgcgaactctatgatccccactggatatccacaagtttattttgcccatccaagtacccatatccctcaaggtcctccaagacatggttttgtgtatccacccatgggccttagtcatgaatggagaccaagtatgttccccccagcaccaaatctccagcaaatacattcacccgtgatgccaaattcgccaaggcattacagaagcaaccgaggaaggatgggtgggaatatgatgcctcttcctcatgcagttcatacaatgaactatatgacacatccacagccagctaaagaattcatgtctttgcctcgacagcgattcaatcatccgaagtacttctcaaatgatgttatggccaacagcttggccatccatcaaagtgacccggtttcaacaatgaatgattcttttagcaactatttggcctccgctccacccgcggaacaaaagaacttgcttgggaacaggctctatcctcttgttgagaggcatcagcccgaactcgcgagcaaaatcactgggatgctcttggagcttgacaactctgaagtggtcacgttgctttgctcgtcggagatgttgtcggttaaggtcgacgagtgtgtccagctgttgcaagcaaccaagcctaaggctgaggatcatgaggcactgcacccaggattcatgctcgagcctcggcctcctagtgtaaatgccagttgatgaggttctgattgcgcggatgagcttctggatgcgcttgtgtttagggatatggtaacaagctagtcgctagctgctgcgttcgttctctcctagtttgcgaagttttggtgtttggattaatctactgagccgttattgctttctatatatagaacttaatagtaataaggactatatatattcagctagaaactttttatctggacatgttatatgaatgtatgttagaacctttattcctatccaacattaggaatagttgtccatgcgtctcctatacctttcatatgatattttcatttggacatgttatttgaatctcagtattag

SEQ ID NO: 84283 - DNA, 2507 bp, Zea Mays
gttggctcctcgtggtggcgagcgcggtcagagagttagcagacaaagatggcgacttatgagcccaagaacattctcataactggtgctgctggtttcattgcatcgcatgtcgccaaccgtctggtcaggaactatccccaatacaagatcgttgtccttgacaagattgactactgctccaacctaaagaacctcaatccttcacggtcttcaccaaatttcaaatttgtcaagggtgatattgcaagtgctgacctggtgaattaccttctgatcaccgagtcaattgacaccatcatgcactttgctgctcagacgcatgttgataattcttttggcaattcatttgagttcacaaaaaacaatatatatggcacccatgttcttcttgaggcttgcaaggttactggtcagatcaggaggtttattcatgtcagtaccgacgaggtatatggtgaaactgatgaagatgctgtggttggtaaccatgaggcctcacagctgcttccaacaaatccatattcagctacaaaggctggggctgaaatgcttgtgatggcatacggaaggtcttatggtcttcctgtgattaccactcgtggcaacaatgtgtatgggccaaatcaatttcctgagaaactcattcccaaattcattcttttggccatgcaaggtctgcctcttccaattcatggagatggctccaacgtcaggagctacctgtactgtgaggatgtggccgaagcttttgaggtggtccttcacaaaggagaagttggacatgtgtataatattggtactgtgaaggagaggagggtgattgatgtggccaaggacatatgcaagctctttggcttggatactgagaaagtcatcaggtttgttgaaaacaggccattcaatgaccagaggtacttcttagatgatcagaagctaaagagattgggatgggcagagcgcacaccatgggaagagggtttgaagaagacgatggagtggtacaccaccaatcctgattactggggagatgtcactggtgcgctgcttcctcatccaaggatgttgatgactcctggagttgaaaggcataactgggctgaagaaatcaagtctctggcttcttcgccagctgaagctagtacaatagctccagcaaccagtaccaaaagcatctctgatgcccctcagaagccttcctacaggtttttaatctatggtaggactggatggattggtggcctccttggaaagatttgtgaaaagcaagggataccatatgagtatgggaaaggacgcttggaggagcgctctcagctgttggaggacattagaaatgtgaagccaactcatgttttcaatgctgccggagtcactgggagaccaaatgttgactggtgcgagacccataaacaggacactatccgcaccaatgttgtaggcactttgaatctagctgatgtctgtcgcaagcagggtctgctcatgattaattatgctacaggctgtatatttgagtatgatgctaagcaccctgaagggtctggtattggctttaaagaggaagacacgcccaactttattggttccttttattccaaaacaaaagcaatggtggaagagctattgaaggagtatgataatgtctgtactcttagggtcaggatgcctatatcatcagatctaagcaacccccgtaatttcatcacaaagatagctcgttacgacaaggtggtgaacattcccaacagcatgacaatcttggatgagcttctgcctatctccattgagatggcgaaacgggactgcaggggcatatggaacttcaccaaccctggcgctgtaagccacaacgagattctagagatgtacaagaaatacatcaatcctgatttcaagtggaccaacttcacactcgaagagcaggccaaggtgatagtcgcgcctagaagcaacaacgagatggacacgtcgaaactgaaggctgagttccctcagcttctgtccatcaaggattctttgatcaattgtgttcgattcttttgggacaatagcaagcatacctctttctggtcgtctattatacacgcaatctacaaacaggtagatatttagatgttcttttagtggctgatacgaaggcttggcctggtgaagtggtgagagctttcttgctgagccactaggtcatgctttcgaagcagtctctccgtgtttatggtatagtggctgatatgctgagacacggttatcgatgaacactacgaattgtcttaatatattatatatattaactaccaagagcagttgtacatggtcttgtaaatttttatcccttcgttgcagttggctccaattttcctgttcttgttttttctatgccattttcctgttcttgttgtttctatgccaaacgtagcatcaaattttcagttggttttgtgttgctcgtcaatcctcaatggtgtatgctgcagtgttgatggtgcaattggtttctgttgata

SEQ ID NO: 84284 - DNA, 2091 bp, Zea Mays
cgcgctgcgctgtcgccatcgatcgcacgcggcacccgttgtgttgttggaatctcgcgcgcgggggcacaggcaccagcagctttgcttccattggaagcgcaaatgtctgctccatcctccgcctcatcgccccctgcacggtcacggattactggtttcttattgccaccagatcgaaaaggggggaggaattaaattgtggagtcgggtggtgagatctgatttatagattatttgattagcccggttggtagcagcagtcggtggtggtggtggtagtggtgcaagagcaagaccctgaccgacggcctctgcctccttgcatctctgttcgggtttgtgaagcgcgggctctataaatacgactcagatctgagaggccttctcctcgtccgccccagtctaatccgattcaaaccgcccgttccccgtgtccgtgccaagcaagccgagcccaacccccaagagccagctgctcggtgctccacgcgatggcgcagaaggagactaatggcagcaacggcgatcacatctccacccgcccgccgccgaccccctcgcccctccgcttctccaagttctttcaggctaacctgcggatcctggtcactggtggggcgggcttcatcggctcgcacctcgtagacaagctcatggagaacgagaagcacgaggtcattgttgctgataactttttcactggttcaaaagacaacctgaagaagtggattggccacccaagatttgagctcatccgtcatgatgtcaccgagccgcttcttgtggaagttgaccaaatctatcaccttgcttgccctgcttcaccaatcttctacaagcacaaccctgttaagaccatcaagacaaatgttattggtaccctgaacatgctaggacttgcaaagagagttggagctaggattttgttgacatcaacctctgaagtttatggtgatccacttgagcatcctcaaactgaggcctactggggcaatgttaacccgattggagttgttatgatgagggtaagcgtgtagcagagacgctgatgttcgactatcacaggcagcatggcattgaaatccggattgccaggattttcaacacctatgggcctaggatgaacattgatgatggccgtgttgttagcaacttcattgctcaggctgtgcgcggtgagcccctgactgtccagaggccaggaacacagactaggagtttctgctatgttgccgatatggttgatggtcttattaagctgatgaatggaaacaagactggaccgattaacttggggaacccaggtgaattcaccatgctggaacttgctgagaatgtgaaggagttgatcaacccagatgtgacagtgacgatgaccgagaacactcctgatgatccccgccagaggaagccggacatcacaaaggcgaaggaagttctgggatgggagcccaagatcgtcctgcgggacggcttggtgctcatggaggatgatttccgggagcgcctgaccgtgcccaagaaaaccaaggcctaaattgccctgcagttggggaagaatatccacacggggaagcatactcatagtcgggctcgtcattatttgtggccacatttcattacggaatttgagttccaataaacttaatattcctttgtcgttcaccttgaaggattgtattattagaattttcatacagggctggccattcgagtctctgcctacgcagatcttgtggtacttgtgtttgtagccaatgtgtgagtaaaagtcgattatagcaatgttgatgccattttgggcttattgttcgctcctttttgctgcttgagctgagacaagtctcgatccaatgagagcggtactgactgtgtggaggcgccatttcccatttggtatcgatcggtctggtcctaataatggcctgtcgacctgctgaccgatcgggcgttggatggttggtaccagcatgaaccgttaccagtcagatttaaccacgtggattgttcatacatgtgtcacgttagctgtctgtttccaaaccatttgaagtctaaaagattcaaagaaaataaaaaaactaaaaa

SEQ ID NO: 84285 - DNA, 2704 bp, Zea Mays
ccaggctccttctgggggaggccgcggctcaccgtgttggctgcgcccccaccgtcgcctcgccttaaactctccccgcctccgttaccgtcttcccccttcccacctcccccacccgctgtgttcatccatcgaccgcgcgagcccccgcccgccgattcgacgacgtttgattttttttcatttgatttgattgtaacgtaccgcagcaggaggagggagggattcttggaccgttgttcggctggatggtggaggcggttcgtcgatttgagagctccgggtttcttggacctgcgtaggtaaaagcaccaccccccccatttcctctcggctggcggatggacgcgagggaggtgtgaagcctggtcgctaactgatgctcgtggagcgattcggaggagaggagcgcgccgtgcggaggcggtggaggaggaagcgccgaagatttgggcagagaagcgacggaaggggagcagcaggcggacgaggagcgagccgccaggaggacgacggccgccgccgccgccatgggcgagtcgctgctcaccgcgctctccatggacaccaccacggcccaccatccacaccagggccctttcaccttcctctccatggacaccgcctcccacgaccacttcgacctcttcctcccgccacaggggcccttccgccgctgcctacatgccgcggcggtcgccccccctgacatcaacctccccctcaccgccgacccgtctccgccacctccggcgtcgcacgacgccaacgttgacgtgctagatgccggcctcggcggcccgcagcactacgactcggattcgcccgctgctgccgggcctgtcttggccccagcagcagccgcggccaccgtgatcgccgtgtcccacaccaagggctccggttccagcgtggcgcgcaagtgcgtcaagaggaatgatagcatttggggagcgtggttcttcttcacccactacttcaagccagtcatgtccaccgacaagggtggcaaggcgaaggcagccaccaccggcgggaatggtaatagtgccagtgccactctggacgctttcctggtgcagcacgacatggagaacatgtacatgtggatctttaaggagcgatcggagaatgccctggggaagatgcagctgaggagcttcatgaatgggcactcgcgccttggggatccacagttccctttcagcgcagacaaagggtttgtgcgctcacaccggatgcagcgcaagcattatcgtgggctctctaacccgcagtgtattcacgggatcgaaatcgtgagggcgccaaacttggcaggtgtacctgagtctgatttaaagaggtggatggagctcaccgggagggatgccaatttctcgatcccagccgaggcaagtgatttcgagtcttggaggaatctgccgagcacggaatttgagctcgagaggctagcagccgtggttcctacaaagagtagctcacatgggcaccacaagaggttgctgaacggttctggccttaacctatcgacacaaccatccaatcacagttctggggatgccatggagatcgcaaccatctgtaacaagcgcaggaaggattcctcaccgtctgcaacggaagaggactgcagcaattcgaattcagacaaggcccaagacatggatgtgagccacacctttgagccatcatggatgaatgacttcacaggtgtgatgcgccatgcttctggaccagtaactgccgcaaaaacaatatatgaggacagcaagggctacttgatcattgttagcctgcctttctctgattttcagaaggtgaaggtttcatggaagaatactcttacgaatgggattgttaaggtatcttgcattagcgttggtaggatgccattattgaaaaggcatgatcggactttcaagttggcggatccttctcctgagcattgcccaccaggagagtttgtccgggaaatcccactgcctacccggatccctgaagatgccactctggaagcataccgcgatgaaacggggacaggcctggagattattgtcccaaagtaccgtgttggccctgaagaacatgaggtgcatgtgtccatgagaccgccctcgtcatggtgccaatgaaacttgttccgagctcgaggggagacacatctggtgcggaggttccctgttgttaccataaggctgaggctactgtccgagaaacgcagctcagttttgccaattttgatggggaacagtcctaattgattcaagcattctggtagttggcattgcagcatttggaacgtattaggtctatggggttaggtttgctgttatgtttctcaagacttccaattgatcccgttgagacgacaaagtgaacgctgacacaacggtttctaacgcttcccttgaagtgacaagatgtttggatactttactttaccccagagaggcagggcctagactctctccagcaagcttgcagctttcgtgcccatcgtcgatcaggtgcgctgccgtacctccctttcaatgcccgctcagtgtgcacgacgcgcctagaatcttgtcaagttccctcgcgaggaggcgacgttggtggccgccaagcagttcttgcagggtcacaaaaagaagataaactgtttggtcatcttttatcgcaaggataactgtcgattaatgtgtttgcccacatcatt

SEQ ID NO: 84286 - DNA, 2618 bp, Zea Mays
aaacaaatcaagcagggatgcgcgagcgcgagcccatcacccccgctggccgcaccaccccacgcggtctcgaaaccaggcacagggcaggcagccgcgcggggccgtctccccttccgttccgcctcgccgaaacgacagacagacgagttgctccagccgtcaccgtcaagtaacggacccccaccccagccccgcgtccagggcctccaggctccttctgggggaggccgcggctcaccgtgttggctgcgcccccaccgtcgcctcgccttaaactctccccgcctccgttaccgtcttcccccttcccacctcccccacccgctgtgttcatccatcgaccgcgcgagcccccgcccgccgattcgacgacgtttgattttttttcatttgatttgattgtaacgtaccgcagcaggaggagggagggattcttggaccgttgttcggctggatggtggaggcggttcgtcgatttgagagctccgggtttcttggacctgcgtaggtaaaagcaccaccccccccatttcctctcggctggcggatggacgcgagggaggtgtgaagcctggtcgctaactgatgctcgtggagcgattcggaggagaggagcgcgccgccatgggcgagtcgctgctcaccgcgctctccatggacaccaccacggcccaccatccacaccagggccctttcaccttcctctccatggacaccgcctcccacgaccacttcgacctcttcctcccgccacaggggcccttccgccgctgcctacatgccgcggcggtcgccccccctgacatcaacctccccctcaccgccgacccgtctccgccacctccggcgtcgcacgacgccaacgttgacgtgctagatgccggcctcggcggcccgcagcactacgactcggattcgcccgctgctgccgggcctgtcttggccccagcagcagccgcggccaccgtgatcgccgtgtcccacaccaagggctccggttccagcgtggcgcgcaagtgcgtcaagaggaatgatagcatttggggagcgtggttcttcttcacccactacttcaagccagtcatgtccaccgacaagggtggcaaggcgaaggcagccaccaccggcgggaatggtaatagtgccagtgccactctggacgctttcctggtgcagcacgacatggagaacatgtacatgtggatctttaaggagcgatcggagaatgccctggggaagatgcagctgaggagcttcatgaatgggcactcgcgccttggggatccacagttccctttcagcgcagacaaagggtttgtgcgctcacaccggatgcagcgcaagcattatcgtgggctctctaacccgcagtgtattcacgggatcgaaatcgtgagggcgccaaacttggcaggtgtacctgagtctgatttaaagaggtggatggagctcaccgggagggatgccaatttctcgatcccagccgaggcaagtgatttcgagtcttggaggaatctgccgagcacggaatttgagctcgagaggctagcagccgtggttcctacaaagagtagctcacatgggcaccacaagaggttgctgaacggttctggccttaacctatcgacacaaccatccaatcacagttctggggatgccatggagatcgcaaccatctgtaacaagcgcaggaaggattcctcaccgtctgcaacggaagaggactgcagcaattcgaattcagacaaggcccaagacatggatgtgagccacacctttgagccatcatggatgaatgacttcacaggtgtgatgcgccatgcttctggaccagtaactgccgcaaaaacaatatatgaggacagcaagggctacttgatcattgttagcctgcctttctctgattttcagaaggtgaaggtttcatggaagaatactcttacgaatgggattgttaaggtatcttgcattagcgttggtaggatgccattattgaaaaggcatgatcggactttcaagttggcggatccttctcctgagcattgcccaccaggagagtttgtccgggaaatcccactgcctacccggatccctgaagatgccactctggaagcataccgcgatgaaacggggacaggcctggagattattgtcccaaagtaccgtgttggccctgaagaacatgaggtgcatgtgtccatgagaccgccctcgtcatggtgccaatgaaacttgttccgagctcgaggggagacacatctggtgcggaggttccctgttgttaccataaggctgaggctactgtccgagaaacgcagctcagttttgccaattttgatggggaacagtcctaattgattcaagcattctggtagttggcattgcagcatttggaacgtattaggtctatggggttaggtttgctgttatgtttctcaagacttccaattgatcccgttgagacgacaaagtgaacgctgacacaacggtttctaacgcttcccttgaagtgacaagatgtttggatactttactttaccccagagaggcagggcctagactctctccagcaagtgcgctggtgtgtgcacacatttcatcaccaacgagttgac

SEQ ID NO: 84287 - DNA, 2690 bp, Zea Mays
ccaggctccttctgggggaggccgcggctcaccgtgttggctgcgcccccaccgtcgcctcgccttaaactctccccgcctccgttaccgtcttcccccttcccacctcccccacccgctgtgttcatccatcgaccgcgcgagcccccgcccgccgattcgacgacgtttgattttttttcatttgatttgattgtaacgtaccgcagcaggaggagggagggattcttggaccgttgttcggctggatggtggaggcggttcgtcgatttgagagctccgggtttcttggacctgcgtaggtaaaagcaccaccccccccatttcctctcggctggcggatggacgcgagggaggtgtgaagcctggtcgctaactgatgctcgtggagcgattcggaggagaggagcgcgccgccatgggcgagtcgctgctcaccgcgctctccatggacaccaccacggcccaccatccacaccagggccctttcaccttcctctccatggacaccgcctcccacgaccacttcgacctcttcctcccgccacaggggcccttccgccgctgcctacatgccgcggcggtcgccccccctgacatcaacctccccctcaccgccgacccgtctccgccacctccggcgtcgcacgacgccaacgttgacgtgctagatgccggcctcggcggcccgcagcactacgactcggattcgcccgctgctgccgggcctgtcttggccccagcagcagccgcggccaccgtgatcgccgtgtcccacaccaagggctccggttccagcgtggcgcgcaagtgcgtcaagaggaatgatagcatttggggagcgtggttcttcttcacccactacttcaagccagtcatgtccaccgacaagggtggcaaggcgaaggcagccaccaccggcgggaatggtaatagtgccagtgccactctggacgctttcctggtgcagcacgacatggagaacatgtacatgtggatctttaaggagcgatcggagaatgccctggggaagatgcagctgaggagcttcatgaatgggcactcgcgccttggggatccacagttccctttcagcgcagacaaagggtttgtgcgctcacaccggatgcagcgcaagcattatcgtgggctctctaacccgcagtgtattcacgggatcgaaatcgtgagggcgccaaacttggcaggtgtacctgagtctgatttaaagaggtggatggagctcaccgggagggatgccaatttctcgatcccagccgaggcaagtgatttcgagtcttggaggaatctgccgagcacggaatttgagctcgagaggctagcagccgtggttcctacaaagagtagctcacatgggcaccacaagaggttgctgaacggttctggccttaacctatcgacacaaccatccaatcacagttctggggatgccatggagatcgcaaccatctgtaacaagcgcaggaaggattcctcaccgtctgcaacggaagaggactgcagcaattcgaattcagacaaggcccaagacatggatgtgagccacacctttgagccatcatggatgaatgacttcacaggtgtgatgcgccatgcttctggaccagtaactgccgcaaaaacaatatatgaggacagcaagggctacttgatcattgttagcctgcctttctctgattttcagaaggtgaaggtttcatggaagaatactcttacgaatgggattgttaaggtatcttgcattagcgttggtaggatgccattattgaaaaggcatgatcggactttcaagttggcggatccttctcctgagcattgcccaccaggagagtttgtccgggaaatcccactgcctacccggatccctgaagatgccactctggaagcataccgcgatgaaacggggacaggcctggagattattgtcccaaagtaccgtgttggccctgaagaacatgaggtgcatgtgtccatgagaccgccctcgtcatggtgccaatgaaacttgttccgagctcgaggggagacacatctggtgcggaggttccctgttgttaccataaggctgaggctactgtccgagaaacgcagctcagttttgccaattttgatggggaacagtcctaattgattcaagcattctggtagttggcattgcagcatttggaacgtattaggtctatggggttaggtttgctgttatgtttctcaagacttccaattgatcccgttgagacgacaaagtgaacgctgacacaacggtttctaacgcttcccttgaagtgacaagatgtttggatactttactttaccccagagaggcagggcctagactctctccagcaaggtgcgctatatgctcctctactctatatttagcgcatggtgatcaacttttttcctccaacaacgtgcgctaaagggtccggtaaaatagaggacgtcctcaaccacctccaaatgcagcggctcctctattcgtgtctctctacttcagctccgctagaaatgtacaacaacatgcagtataataagtattgtagctgaattaatgaagaataagtagcagcaagcaatattattaggtgtctgctcaaatatgtatagtaatttttttaagatctgccaaggaaactttgtaataaaaaggtgtactattttaggtgaag

SEQ ID NO: 84288 - DNA, 2428 bp, Zea Mays
ctgcggtgcgggtaaggcgctcacctcaccttcacctacatctcgcactctgtccgtctgtctccaccagctaccgagccagccagcaaacaagcaagcaaccgactgcccccttgcccgtacgcagtacacctcgcgccggtgagcgagcgaatgccgcgggagctctagccctcggctcctcgcccgggccggcgtgtcgttccgatccatgaggaagctgccgccagcgcaccgcctccggtggatgcgcgcgctgctcctcgcgctcccgctcgtctcgctccccatcctctacgcggcgctcggcgcggcgcgctcgtcggcctcggcggcgcggccgccgccgccgccgccgcagcagcagcagcagcggaggccgccgccgaggctggcgtacctcataacgggcgcaggccccggggacggcccgcggatccggaggctgatgcgggcgctctaccacccctggaactactacctcgtcggagtggcgggggaggacgagcggacggatctcgaagccttcgtgcgcgcccaggaggcgccgcgccggtacggcaatgtccgggtgtcggccgcgggggagtggggctccgtctcgcggaggggccccaccgaattggcctccacgctccacgccgccgcggtgctgctccgggagttcgacggctggagctggttcatcaatcttagcgcctccgattacccgctcatgccccaagatgacatccttcatatcttctcatacatgccaagagacctcaatttcattgagcacacaagcaatattggttggaaagagtatcaaagagcccgaccaatcattgtagacccagcattgcaggtcccaaataaaactgaggttgtaacaacaaaggagaaaaggagtatgccctcagctttcaaaatatttgtaggttcgtcttgggtgatgcttagtagatcattcctggagttttgcttactgggatgggataaccttcctcgcacactactcattgatctgcgcttcatggcatgggataacccacctcggacgcaccctgctaacctcacaacagagcattttgatgcaatggcagacagcggggcgccgtttgcacactcatttgccaatgataactcagtcctggatatgatcgacgccaagttgttggggcgagcacctgaccgcttcacgccgggtggatggtgcctgggtagctcagtaggcgggaaagatccgtgtaccttcttgggaaggtcctttattctcaggccgaccaaaggctcggccaagctagagaagttgctgttgaaacttttggaacctgataacttcaggcctaaacagtgtaaataacactcattttacatggtagccagttctttttttttttgtggtagtgttcagaagccgaagtttgatgacatgtttcttgttgttgcggcagtaggcattacatacagatgttttatacttgcaaccggaaagctcaactcacaagtgatttgagatcatacacgatacatgtactcttgctgtttcatcacttctacggctgtacaacaaccgatgataatgagaggttcgctggaagtcagtctgatatgagaggttgccctaggtttcggccccaccctgttccatccgggaattaaccggttcggttcgtgtgggagtttatcatacattttgttttggcaacattggtaaagtaaaattcctgagcgctgcagcagtttttgaacacgaaagtgaagacgctttggtcgttaaagatcgcaaatcccactcacctcaagtcacttcccaacttggacatggcggtccactcccaccttcccgaaactgctcgtacgatctcaagcacggctcctccctagttgtcggctctcggccgcatcaccatccccgtcgccccgagcagtctcgttctccaggtacttctctgattctctctttcttcgtcatggcttacccttccggatcggtgctttctccccgccgcagtaagaatccccccacccacgggttccggttaccactcggcggtagacctgacggtgttgaggtgtttccgcttgctggaacaacttcgctggcgcctgcaagctgttcgaccgaatgcttctgcgaatgaaaaggggaggccaaagaacgcagcgaagaccatcaattaccatctccagcgacttgggcacatcaagttcctctaggtgcatgattttgatatcatttccgcattaggctttactgccctgtgtagaagttcaggaagagaattttttttccaaaatagatttgctgaaacgaggaattaatgtgtttgcttagattgggcaatgctcagcaaataactctgtcaaacaataatatatcagcagtatattgatactgtttttttctcctttttcctaaaataaggatcgggtttaggatttt

SEQ ID NO: 84289 - DNA, 2319 bp, Zea Mays
cgctgcggtgcgggtaaggcgctcacctcaccttcacctacatctcgcactctgtccgtctgtctccaccagctaccgagccagccagcaaacaagcaagcaaccgactgcccccttgcccgtacgcagtacacctcgcgccggtgagcgagcgaatgccgcgggagctctagccctcggctcctcgcccgggccggcgtgtcgttccgatccatgaggaagctgccgccagcgcaccgcctccggtggatgcgcgcgctgctcctcgcgctcccgctcgtctcgctccccatcctctacgcggcgctcggcgcggcgcgctcgtcggcctcggcggcgcggccgccgccgccgccgccgcagcagcagcagcagcggaggccgccgccgaggctggcgtacctcataacgggcgcaggccccggggacggcccgcggatccggaggctgatgcgggcgctctaccacccctggaactactacctcgtcggagtggcgggggaggacgagcggacggatctcgaagccttcgtgcgcgcccaggaggcgccgcgccggtacggcaatgtccgggtgtcggccgcgggggagtggggctccgtctcgcggaggggccccaccgaattggcctccacgctccacgccgccgcggtgctgctccgggagttcgacggctggagctggttcatcaatcttagcgcctccgattacccgctcatgccccaagatgacatccttcatatcttctcatacatgccaagagacctcaatttcattgagcacacaagcaatattggttggaaagagtatcaaagagcccgaccaatcattgtagacccagcattgcaggtcccaaataaaactgaggttgtaacaacaaaggagaaaaggagtatgccctcagctttcaaaatatttgtaggttcgtcttgggtgatgcttagtagatcattcctggagttttgcttactgggatgggataaccttcctcgcacactactcatgtatttcaccaacttcctctcgtcctcagaaggctacttccacacagtgatctgcaactcagagtactaccagaacaccactgtgaacagtgatctgcgcttcatggcatgggataacccacctcggacgcaccctgctaacctcacaacagagcattttgatgcaatggcagacagcggggcgccgtttgcacactcatttgccaatgataactcagtcctggatatgatcgacgccaagttgttggggcgagcacctgaccgcttcacgccgggtggatggtgcctgggtagctcagtaggcgggaaagatccgtgtaccttcttgggaaggtcctttattctcaggccgaccaaaggctcggccaagctagagaagttgctgttgaaacttttggaacctgataacttcaggcctaaacagtgtaaataacactcattttacatggtagccagttctttttttttttgtggtagtgttcagaagccgaagtttgatgacatgtttcttgttgttgcggcagtaggcattacatacagatgttttatacttgcaaccggaaagctcaactcacaagtgatttgagatcatacacgatacatgtactcttgctgtttcatcacttctacggctgtacaacaaccgatgataatgagaggttcgctggaagtcagtctgatatgagaggttgccctaggtttcggccccaccctgttccatccgggaattaaccggttcggttcgtgtgggagtttatcatacattttgttttggcaacattggtaaagtaaaattcctgagcgctgcagcagtttttgaacacgaaagtgaagacgctttggtcgttaaagatcgcaaatcccactcacctcaagtcacttcccaacttggacatggcggtccactcccaccttcccgaaactgctcgtacgatctcaagcacggctcctccctagttgtcggctctcggccgcatcaccatccccgtcgccccgagcagtctcgttctccagaaggggaggccaaagaacgcagcgaagaccatcaattaccatctccagcgacttgggcacatcaagttcctctaggtgcatgattttgatatcatttccgcattaggctttactgccctgtgtagaagttcaggaagagaattttttttccaaaatagatttgctgaaacgaggaattaatgtgtttgcttagattgggcaatgctcagcaaataactctgtcaaacaataatatatcagcagtatattgatactgtttttttctcctttttcctaaaataaggatcgggtttaggatttt

SEQ ID NO: 84290 - DNA, 2703 bp, Zea Mays
cgctgcggtgcgggtaaggcgctcacctcaccttcacctacatctcgcactctgtccgtctgtctccaccagctaccgagccagccagcaaacaagcaagcaaccgactgcccccttgcccgtacgcagtacacctcgcgccggtgagcgagcgaatgccgcgggagctctagccctcggctcctcgcccgggccggcgtgtcgttccgatccatgaggaagctgccgccagcgcaccgcctccggtggatgcgcgcgctgctcctcgcgctcccgctcgtctcgctccccatcctctacgcggcgctcggcgcggcgcgctcgtcggcctcggcggcgcggccgccgccgccgccgccgcagcagcagcagcagcggaggccgccgccgaggctggcgtacctcataacgggcgcaggccccggggacggcccgcggatccggaggctgatgcgggcgctctaccacccctggaactactacctcgtcggagtggcgggggaggacgagcggacggatctcgaagccttcgtgcgcgcccaggaggcgccgcgccggtacggcaatgtccgggtgtcggccgcgggggagtggggctccgtctcgcggaggggccccaccgaattggcctccacgctccacgccgccgcggtgctgctccgggagttcgacggctggagctggttcatcaatcttagcgcctccgattacccgctcatgccccaagatgacatccttcatatcttctcatacatgccaagagacctcaatttcattgagcacacaagcaatattggttggaaagagtatcaaagagcccgaccaatcattgtagacccagcattgcaggtcccaaataaaactgaggttgtaacaacaaaggagaaaaggagtatgccctcagctttcaaaatatttgtaggttcgtcttgggtgatgcttagtagatcattcctggagttttgcttactgggatgggataaccttcctcgcacactactcatgtatttcaccaacttcctctcgtcctcagaaggctacttccacacagtgatctgcaactcagagtactaccagaacaccactgtgaacagtgatctgcgcttcatggcatgggataacccacctcggacgcaccctgctaacctcacaacagagcattttgatgcaatggcagacagcggggcgccgtttgcacactcatttgccaatgataactcagtcctggatatgatcgacgccaagttgttggggcgagcacctgaccgcttcacgccgggtggatggtgcctgggtagctcagtaggcgggaaagatccgtgtaccttcttgggaaggtcctttattctcaggccgaccaaaggctcggccaagctagagaagttgctgttgaaacttttggaacctgataacttcaggcctaaacagtgtaaataacactcattttacatggtagccagttctttttttttttgtggtagtgttcagaagccgaagtttgatgacatgtttcttgttgttgcggcagtaggcattacatacagatgttttatacttgcaaccggaaagctcaactcacaagtgatttgagatcatacacgatacatgtactcttgctgtttcatcacttctacggctgtacaacaaccgatgataatgagaggttcgctggaagtcagtctgatatgagaggttgccctaggtttcggccccaccctgttccatccgggaattaaccggttcggttcgtgtgggagtttatcatacattttgttttggcaacattggtaaagtaaaattcctgagcgctgcagcagtttttgaacacgaaagtgaagacgctttggtcgttaaagatcgcaaatcccactcacctcaagtcacttcccaacttggacatggcggtccactcccaccttcccgaaactgctcgtacgatctcaagcacggctcctccctagttgtcggctctcggccgcatcaccatccccgtcgccccgagcagtctcgttctccaggtacttctctgattctctctttcttcgtcatggcttacccttccggatcggtgctttctccccgccgcagtaagaatccccccacccacgggttccggttaccactcggcggtagacctgacggtgttgaggtgtttccgcttgctggaacaacttcgctggcgcctgcaagctgttcgaccgaatgcttctgcgaatgaagtgaaggtgagggtgaagcagcagaatgggtcggtaggctggtgctttgcacataaacccaaagaagtttggtgctgttgcgaagccttgcatgccagaaatggtggcctggccttaaacaaacagaatgatgacaagtgcatcaggcagaagtatcttttggttgcatgcacccaaactcagaaggggaggccaaagaacgcagcgaagaccatcaattaccatctccagcgacttgggcacatcaagttcctctaggtgcatgattttgatatcatttccgcattaggctttactgccctgtgtagaagttcaggaagagaattttttttccaaaatagatttgctgaaacgaggaattaatgtgtttgcttagattgggcaatgctcagcaaataactctgtcaaacaataatatatcagcagtatattgatactgtttttttctcctttttcctaaaataaggatcgggtttaggatttt

SEQ ID NO: 84291 - DNA, 2526 bp, Zea Mays
ttcgggcttgcgctgcggtgcgggtaaggcgctcacctcaccttcacctacatctcgcactctgtccgtctgtctccaccagctaccgagccagccagcaaacaagcaagcaaccgactgcccccttgcccgtacgcagtacacctcgcgccggtgagcgagcgaatgccgcgggagctctagccctcggctcctcgcccgggccggcgtgtcgttccgatccatgaggaagctgccgccagcgcaccgcctccggtggatgcgcgcgctgctcctcgcgctcccgctcgtctcgctccccatcctctacgcggcgctcggcgcggcgcgctcgtcggcctcggcggcgcggccgccgccgccgccgccgcagcagcagcagcagcggaggccgccgccgaggctggcgtacctcataacgggcgcaggccccggggacggcccgcggatccggaggctgatgcgggcgctctaccacccctggaactactacctcgtcggagtggcgggggaggacgagcggacggatctcgaagccttcgtgcgcgcccaggaggcgccgcgccggtacggcaatgtccgggtgtcggccgcgggggagtggggctccgtctcgcggaggggccccaccgaattggcctccacgctccacgccgccgcggtgctgctccgggagttcgacggctggagctggttcatcaatcttagcgcctccgattacccgctcatgccccaagatgacatccttcatatcttctcatacatgccaagagacctcaatttcattgagcacacaagcaatattggttggaaagagtatcaaagagcccgaccaatcattgtagacccagcattgcaggtcccaaataaaactgaggttgtaacaacaaaggagaaaaggagtatgccctcagctttcaaaatatttgttcgtcttgggtgatgcttagtagatcattcctggagttttgcttactgggatgggataaccttcctcgcacactactcatgtatttcaccaacttcctctcgtcctcagaaggctacttccacacagtgatctgcaactcagagtactaccagaacaccactgtgaacagtgatctgcgcttcatggcatgggataacccacctcggacgcaccctgctaacctcacaacagagcattttgatgcaatggcagacagcggggcgccgtttgcacactcatttgccaatgataactcagtcctggatatgatcgacgccaagttgttggggcgagcacctgaccgcttcacgccgggtggatggtgcctgggtagctcagtaggcgggaaagatccgtgtaccttcttgggaaggtcctttattctcaggccgaccaaaggctcggccaagctagagaagttgctgttgaaacttttggaacctgataacttcaggcctaaacagtgtaaataacactcattttacatggtagccagttctttttttttttgtggtagtgttcagaagccgaagtttgatgacatgtttcttgttgttgcggcagtaggcattacatacagatgttttatacttgcaaccggaaagctcaactcacaagtgatttgagatcatacacgatacatgtactcttgctgtttcatcacttctacggctgtacaacaaccgatgataatgagaggttcgctggaagtcagtctgatatgagaggttgccctaggtttcggccccaccctgttccatccgggaattaaccggttcggttcgtgtgggagtttatcatacattttgttttggcaacattggtaaagtaaaattcctgagcgctgcagcagtttttgaacacgaaagtgaagacgctttggtcgttaaagatcgcaaatcccactcacctcaagtcacttcccaacttggacatggcggtccactcccaccttcccgaaactgctcgtacgatctcaagcacggctcctccctagttgtcggctctcggccgcatcaccatccccgtcgccccgagcagtctcgttctccaggtacttctctgattctctctttcttcgtcatggcttacccttccggatcggtgctttctccccgccgcagtaagaatccccccacccacgggttccggttaccactcggcggtagacctgacggtgttgaggtgtttccgcttgctggaacaacttcgctggcgcctgcaagctgttcgaccgaatgcttctgcgaatgaaaaggggaggccaaagaacgcagcgaagaccatcaattaccatctccagcgacttgggcacatcaagttcctctaggtgcatgattttgatatcatttccgcattaggctttactgccctgtgtagaagttcaggaagagaattttttttccaaaatagatttgctgaaacgaggaattaatgtgtttgcttagattgggcaatgctcagcaaataactctgtcaaacaataatatatcagcagtatattgatactgtttttttctcctttttcctaaaataaggatcgggtttaggatttt

SEQ ID NO: 84292 - DNA, 1095 bp, Zea Mays
cgagacctggttgggcttcagtacgaaaaaaaatcagacatccttcatatcttctcatacatgccaagagacctcaatttcattgagcacacaagcaatattggttggaaagagtaagcatatgatttcaatattctgtggttctttattcttaacctctcttttttttattatgattcttgggttgcatgttgcaggtatcaaagagcccgaccaatcattgtagacccagcattgcaggtcccaaataaaactgaggttgtaacaacaaaggagaaaaggagtatgccctcagctttcaaaatatttgttcgtcttgggtgatgcttagtagatcattcctggagttttgcttactgggatgggataaccttcctcgcacactactcatgtatttcaccaacttcctctcgtcctcagaaggctacttccacacagtgatctgcaactcagagtactaccagaacaccactgtgaacagtgatctgcgcttcatggcatgggataacccacctcggacgcaccctgctaacctcacaacagagcattttgatgcaatggcagacagcggggcgccgtttgcacactcatttgccaatgataactcagtcctggatatgatcgacgccaagttgttggggcgagcacctgaccgcttcacgccgggtggatggtgcctgggtagctcagtaggcgggaaagatccgtgtaccttcttgggaaggtcctttattctcaggccgaccaaaggctcggccaagctagagaagttgctgttgaaacttttggaacctgataacttcaggcctaaacagtgtaaataacactcattttacatggtagccagttctttttttttttgtggtagtgttcagaagccgaagtttgatgacatgtttcttgttgttgcggcagtaggcattacatacagatgttttatacttgcaaccggaaagctcaactcacaagtgatttgagatcatacacgatacatgtactcttgctgtttcatcacttctacggctgtacaacaaccgatgataatgagaggttcgctggaagtcagtctgatatgagaggttgccctaggtttcg

SEQ ID NO: 84293 - DNA, 1647 bp, Zea Mays
cttcacctacatctcgcactctgtccgtctgtctccaccagctaccgagccagccagcaaacaagcaagcaaccgactgcccccttgcccgtacgcagtacacctcgcgccggtgagcgagcgaatgccgcgggagctctagccctcggctcctcgcccgggccggcgtgtcgttccgatccatgaggaagctgccgccagcgcaccgcctccggtggatgcgcgcgctgctcctcgcgctcccgctcgtctcgctccccatcctctacgcggcgctcggcgcggcgcgctcgtcggcctcggcggcgcggccgccgccgccgccgccgcagcagcagcagcagcggaggccgccgccgaggctggcgtacctcataacgggcgcaggccccggggacggcccgcggatccggaggctgatgcgggcgctctaccacccctggaactactacctcgtcggagtggcgggggaggacgagcggacggatctcgaagccttcgtgcgcgcccaggaggcgccgcgccggtacggcaatgtccgggtgtcggccgcgggggagtggggctccgtctcgcggaggggccccaccgaattggcctccacgctccacgccgccgcggtgctgctccgggagttcgacggctggagctggttcatcaatcttagcgcctccgattacccgctcatgccccaagatgacatccttcatatcttctcatacatgccaagagacctcaatttcattgagcacacaagcaatattggttggaaagagtatcaaagagcccgaccaatcattgtagacccagcattgcaggtcccaaataaaactgaggttgtaacaacaaaggagaaaaggagttcgtcttgggtgatgcttagtagatcattcctggagttttgcttactgggatgggataaccttcctcgcacactactcatgtatttcaccaacttcctctcgtcctcagaaggctacttccacacagtgatctgcaactcagagtactaccagaacaccactgtgaacagtgatctgcgcttcatggcatgggataacccacctcggacgcaccctgctaacctcacaacagagcattttgatgcaatggcagacagcggggcgccgtttgcacactcatttgccaatgataactcagtcctggatatgatcgacgccaagttgttggggcgagcacctgaccgcttcacgccgggtggatggtgcctgggtagctcagtaggcgggaaagatccgtgtaccttcttgggaaggtcctttattctcaggccgaccaaaggctcggccaagctagagaagttgctgttgaaacttttggaacctgataacttcaggcctaaacagtgtaaataacactcattttacatggtagccagttctttttttttttgtggtagtgttcagaagccgaagtttgatgacatgtttcttgttgttgcggcagtaggcattacatacagatgttttatacttgcaaccggaaagctcaactcacaagtgatttgagatcatacacgatacatgtactcttgctgtttcatcacttctacggctgtacaacaaccgatgataatgagaggttcgctggaagtcagtctgatatgagaggttgccctaggtttcg

SEQ ID NO: 84294 - DNA, 1027 bp, Zea Mays
gcccgatttccttgcacgaaacgccgctgcttcgggcttgcgctgcggtgcggacatccttcatatcttctcatacatgccaagagacctcaatttcattgagcacacaagcaatattggttggaaagagtatcaaagagcccgaccaatcattgtagacccagcattgcaggtcccaaataaaactgaggttgtaacaacaaaggagaaaaggagtatgccctcagctttcaaaatatttgttcgtcttgggtgatgcttagtagatcattcctggagttttgcttactgggatgggataaccttcctcgcacactactcatgtatttcaccaacttcctctcgtcctcagaaggctacttccacacagtgatctgcaactcagagtactaccagaacaccactgtgaacagtgatctgcgcttcatggcatgggataacccacctcggacgcaccctgctaacctcacaacagagcattttgatgcaatggcagacagcggggcgccgtttgcacactcatttgccaatgataactcagtcctggatatgatcgacgccaagttgttggggcgagcacctgaccgcttcacgccgggtggatggtgcctgggtagctcagtaggcgggaaagatccgtgtaccttcttgggaaggtcctttattctcaggccgaccaaaggctcggccaagctagagaagttgctgttgaaacttttggaacctgataacttcaggcctaaacagtgtaaataacactcattttacatggtagccagttctttttttttttgtggtagtgttcagaagccgaagtttgatgacatgtttcttgttgttgcggcagtaggcattacatacagatgttttatacttgcaaccggaaagctcaactcacaagtgatttgagatcatacacgatacatgtactcttgctgtttcatcacttctacggctgtacaacaaccgatgataatgagaggttcgctggaagtcagtctgatatgagaggttgccctaggtttcg

SEQ ID NO: 84295 - DNA, 1511 bp, Zea Mays
ggcttaccgcttacctccgcgcactgcacacgttcgacgaaatgccgccgcgagccctcttcgtcgtcaactgagatttgcctcacatcatctccgattccttcccctacttccgtccccatcagtggacccagccgagatcgactggatctcctggctcgggcggctttgatggttcctggggtcggcccggggaggagttcgaggcgatgagcaggcttgcgtcggggctccagcgcccgcggaggtcgttgtcgccgtgcgaggtgctgtggtgcgcgctcgcgtcatgcggcctagtgcttttctcgcagctcgccgtggcgatggttccccgcctcttcccttccctctatctcctcgccatgctccccatcgcggggctggtgttactcgcggctatcgtgctcggccgcctgtggaggaggttcatcggagtgacggcgtcggcgccgctcttcgtgctcttcaacatcctcctatcgtggggcgtttacatcttcgtaatccgtagaaaaacttcttctctgctggacatgctaataaatgcagaatgtgcactgcttctgtggggattctacaggattttatcttgtgatcctggtatttttgcttgtgattcttcttatttggcagaggctggttgcaaggattttgtggaagctatatacacgaagactcccaatgctctcaagagtcaggcagtgtacctggtgcaaagcaaacattaggggctatgaccatcattgccctgcatttggtacttgtataggacagaaaaatcatcgtctatttatggcccttttgacaggatttgttgttgctgaatcaacatatacgatgtgctcaacaaaatatattactatatgcattagctcaggaactataaaatcagagaatcctgtatctctaaacatggtaatcagtacaatgctcttctctatcctccaagtcctctggcaggtcgtcttctcgttaggtgtttcttgtagctaaaaggtcagattttccagattaactggaagaaatatcctgagttccagatgaaggaacaacctcgatcagattctgaagtcaaatctatgaacccatatgacaaaggcatgctgtgtaacataagagattttctaaaaccagttttgagtacgaagacctgacctctgatggaactatagaaacatgggaaatctgaagtgcgttatactggagccaacatggaagcttgtttcccttgttgctgccgtagcatttattgagactcgtcgtgaggattctgctgtgtaatttaatgtgcaagtagcattcttttataagattacttccgaccgggaattctagtctcttaacttcagaactgatttggtgagtaggtaaatagaggggatctatggggtcccttactattcatatggagttcacatcgtgatcctgcatttttttcctgtctggtcttgccaaagggtaactcttgcaggtgaaaggaccacgatgctcaagagggggtgaattgg

SEQ ID NO: 84296 - DNA, 1477 bp, Zea Mays
ggcttaccgcttacctccgcgcactgcacacgttcgacgaaatgccgccgcgagccctcttcgtcgtcaactgagatttgcctcacatcatctccgattccttcccctacttccgtccccatcagtggacccagccgagatcgactggatctcctggctcgggcggctttgatggttcctggggtcggcccggggaggagttcgaggcgatgagcaggcttgcgtcggggctccagcgcccgcggaggtcgttgtcgccgtgcgaggtgctgtggtgcgcgctcgcgtcatgcggcctagtgcttttctcgcagctcgccgtggcgatggttccccgcctcttcccttccctctatctcctcgccatgctccccatcgcggggctggtgttactcgcggctatcgtgctcggccgcctgtggaggaggttcatcggagtgacggcgtcggcgccgctcttcgtgctcttcaacatcctcctatcgtggggcgtttacatcttcgtaatccgtagaaaaacttcttctctgctggacatgctaataaatgcagaatgtgcactgcttctgtggggattctacaggattttatcttgtgatcctggtatttttgcttgtgattcttcttatttggcagaggctggttgcaaggattttgtggaagctatatacacgagtgagagactcccaatgctctcaagagtcaggcagtgtacctggtgcaaagcaaacattaggggctatgaccatcattgccctgcatttggtacttgtataggatttgttgttgctgaatcaacatatacgatgtgctcaacaaaatatattactatatgcattagctcaggaactataaaatcagagaatcctgtatctctaaacatggtaatcagtacaatgctcttctctatcctccaagtcctctggcaggtcgtcttctcgttaggtgtttcttgtagctaaaaggtcagattttccagattaactggaagaaatatcctgagttccagatgaaggaacaacctcgatcagattctgaagtcaaatctatgaacccatatgacaaaggcatgctgtgtaacataagagattttctaaaaccagttttgagtacgaagacctgacctctgatggaactatagaaacatgggaaatctgaagtgcgttatactggagccaacatggaagcttgtttcccttgttgctgccgtagcatttattgagactcgtcgtgaggattctgctgtgtaatttaatgtgcaagtagcattcttttataagattacttccgaccgggaattctagtctcttaacttcagaactgatttggtgagtaggtaaatagaggggatctatggggtcccttactattcatatggagttcacatcgtgatcctgcatttttttcctgtctggtcttgccaaagggtaactcttgcaggtgaaaggaccacgatgctcaagagggggtgaattgg

SEQ ID NO: 84297 - DNA, 1522 bp, Zea Mays
ggcttaccgcttacctccgcgcactgcacacgttcgacgaaatgccgccgcgagccctcttcgtcgtcaactgagatttgcctcacatcatctccgattccttcccctacttccgtccccatcagtggacccagccgagatcgactggatctcctggctcgggcggctttgatggttcctggggtcggcccggggaggagttcgaggcgatgagcaggcttgcgtcggggctccagcgcccgcggaggtcgttgtcgccgtgcgaggtgctgtggtgcgcgctcgcgtcatgcggcctagtgcttttctcgcagctcgccgtggcgatggttccccgcctcttcccttccctctatctcctcgccatgctccccatcgcggggctggtgttactcgcggctatcgtgctcggccgcctgtggaggaggttcatcggagtgacggcgtcggcgccgctcttcgtgctcttcaacatcctcctatcgtggggcgtttacatcttcgtaatccgtagaaaaacttcttctctgctggacatgctaataaatgcagaatgtgcactgcttctgtggggattctacaggattttatcttgtgatcctggtatttttgcttgtgattcttcttatttggcagaggctggttgcaaggattttgtggaagctatatacacgagtgagagactcccaatgctctcaagagtcaggcagtgtacctggtgcaaagcaaacattaggggctatgaccatcattgccctgcatttggtacttgtataggacagaaaaatcatcgtctatttatggcccttttgacaggatttgttgttgctgaatcaacatatacgatgtgctcaacaaaatatattactatatgcattagctcaggaactataaaatcagagaatcctgtatctctaaacatggtaatcagtacaatgctcttctctatcctccaagtcctctggcagattgtattcttgatgtggcacatatattgcatctgcttcaacatcaagacatatgaattaactggaagaaatatcctgagttccagatgaaggaacaacctcgatcagattctgaagtcaaatctatgaacccatatgacaaaggcatgctgtgtaacataagagattttctaaaaccagttttgagtacgaagacctgacctctgatggaactatagaaacatgggaaatctgaagtgcgttatactggagccaacatggaagcttgtttcccttgttgctgccgtagcatttattgagactcgtcgtgaggattctgctgtgtaatttaatgtgcaagtagcattcttttataagattacttccgaccgggaattctagtctcttaacttcagaactgatttggtgagtaggtaaatagaggggatctatggggtcccttactattcatatggagttcacatcgtgatcctgcatttttttcctgtctggtcttgccaaagggtaactcttgcaggtgaaaggaccacgatgctcaagagggggtgaattgg

SEQ ID NO: 84298 - DNA, 1879 bp, Zea Mays
ggcttaccgcttacctccgcgcactgcacacgttcgacgaaatgccgccgcgagccctcttcgtcgtcaactgagatttgcctcacatcatctccgattccttcccctacttccgtccccatcagtggacccagccgagatcgactggatctcctggctcgggcggctttgatggttcctggggtcggcccggggaggagttcgaggcgatgagcaggcttgcgtcggggctccagcgcccgcggaggtcgttgtcgccgtgcgaggtgctgtggtgcgcgctcgcgtcatgcggcctagtgcttttctcgcagctcgccgtggcgatggttccccgcctcttcccttccctctatctcctcgccatgctccccatcgcggggctggtgttactcgcggctatcgtgctcggccgcctgtggaggaggttcatcggagtgacggcgtcggcgccgctcttcgtgctcttcaacatcctcctatcgtggggcgtttacatcttcgtaatccgtagaagtactgtaaattggattcagccattaagagatgattttatgctccattcaatgagagttgcagacttcaaagcatatactaagggattatttcaactatgaatccctgtagtacttcaacattaggtcactccttgtcaccaaatttgtgctcaactacaaaacccgtatctgctcaagactgagctggcttcggttaagggaccaagtgtggacactgcatgctctagtcaatttgtgctcacttttagagtcctaattcttggtgaatcaaaatgcttcaagagatcaagcatggaagcattactcttggtttgtctgtgctcacctctagttcatcgtgaattgcagtgctattaaccaggtacttcttctctgctggacatgctaataaatgcagaatgtgcactgcttctgtggggattctacaggattttatcttgtgatcctggtatttttgcttgtgattcttcttatttggcagaggctggttgcaaggattttgtggaagctatatacacgagtgagagactcccaatgctctcaagagtcaggcagtgtacctggtgcaaagcaaacattaggggctatgaccatcattgccctgcatttggtacttgtataggacagaaaaatcatcgtctatttatggcccttttgacaggatttgttgttgctgaatcaacatatacgatgtgctcaacaaaatatattactatatgcattagctcaggaactataaaatcagagaatcctgtatctctaaacatggtaatcagtacaatgctcttctctatcctccaagtcctctggcaggtcgtcttctcgttaggtgtttcttgtagctaaaaggtcagattttccagattaactggaagaaatatcctgagttccagatgaaggaacaacctcgatcagattctgaagtcaaatctatgaacccatatgacaaaggcatgctgtgtaacataagagattttctaaaaccagttttgagtacgaagacctgacctctgatggaactatagaaacatgggaaatctgaagtgcgttatactggagccaacatggaagcttgtttcccttgttgctgccgtagcatttattgagactcgtcgtgaggattctgctgtgtaatttaatgtgcaagtagcattcttttataagattacttccgaccgggaattctagtctcttaacttcagaactgatttggtgagtaggtaaatagaggggatctatggggtcccttactattcatatggagttcacatcgtgatcctgcatttttttcctgtctggtcttgccaaagggtaactcttgcaggtgaaaggaccacgatgctcaagagggggtgaattgg

SEQ ID NO: 84299 - DNA, 1619 bp, Zea Mays
ggcttaccgcttacctccgcgcactgcacacgttcgacgaaatgccgccgcgagccctcttcgtcgtcaactgagatttgcctcacatcatctccgattccttcccctacttccgtccccatcagtggacccagccgagatcgactggatctcctggctcgggcggctttgatggttcctggggtcggcccggggaggagttcgaggcgatgagcaggcttgcgtcggggctccagcgcccgcggaggtcgttgtcgccgtgcgaggtgctgtggtgcgcgctcgcgtcatgcggcctagtgcttttctcgcagctcgccgtggcgatggttccccgcctcttcccttccctctatctcctcgccatgctccccatcgcggggctggtgttactcgcggctatcgtgctcggccgcctgtggaggaggttcatcggagtgacggcgtcggcgccgctcttcgtgctcttcaacatcctcctatcgtggggcgtttacatcttcgtaatccgtagaaaaacttcttctctgctggacatgctaataaatgcagaatgtgcactgcttctgtggggattctacaggattttatcttgtgatcctggtatttttgcttgtgattcttcttatttggcagaggctggttgcaaggattttgtggaagctatatacacgaagactcccaatgctctcaagagtcaggcagtgtacctggtgcaaagcaaacattaggggctatgaccatcattgccctgcatttggtacttgtataggacagaaaaatcatcgtctatttatggcccttttgacaggatttgttgttgctgaatcaacatatacgatgtgctcaacaaaatatattactatatgcattagctcaggaactataaaatcagagaatcctgtatctctaaacatggtaatcagtacaatgctcttctctatcctccaagtcctctggcagattgtattcttgatgtggcacatatattgcatctgcttcaacatcaagacatatgagtgggtaatttcaaatttcccatgctttagattcttttttcatcaattgcaggtcgtcttctcgttaggtgtttcttgtagctaaaaggtcagattttccagattaactggaagaaatatcctgagttccagatgaaggaacaacctcgatcagattctgaagtcaaatctatgaacccatatgacaaaggcatgctgtgtaacataagagattttctaaaaccagttttgagtacgaagacctgacctctgatggaactatagaaacatgggaaatctgaagtgcgttatactggagccaacatggaagcttgtttcccttgttgctgccgtagcatttattgagactcgtcgtgaggattctgctgtgtaatttaatgtgcaagtagcattcttttataagattacttccgaccgggaattctagtctcttaacttcagaactgatttggtgagtaggtaaatagaggggatctatggggtcccttactattcatatggagttcacatcgtgatcctgcatttttttcctgtctggtcttgccaaagggtaactcttgcaggtgaaaggaccacgatgctcaagagggggtgaattgg

SEQ ID NO: 84300 - DNA, 1898 bp, Zea Mays
ggcttaccgcttacctccgcgcactgcacacgttcgacgaaatgccgccgcgagccctcttcgtcgtcaactgagatttgcctcacatcatctccgattccttcccctacttccgtccccatcagtggacccagccgagatcgactggatctcctggctcgggcggctttgatggttcctggggtcggcccggggaggagttcgaggcgatgagcaggcttgcgtcggggctccagcgcccgcggaggtcgttgtcgccgtgcgaggtgctgtggtgcgcgctcgcgtcatgcggcctagtgcttttctcgcagctcgccgtggcgatggttccccgcctcttcccttccctctatctcctcgccatgctccccatcgcggggctggtgttactcgcggctatcgtgctcggccgcctgtggaggaggttcatcggagtgacggcgtcggcgccgctcttcgtgctcttcaacatcctcctatcgtggggcgtttacatcttcgtaatccgtagaagtgagctcttgtggtactgtaaattggattcagccattaagagatgattttatgctccattcaatgagagttgcagacttcaaagcatatactaagggattatttcaactatgaatccctgtagtacttcaacattaggtcactccttgtcaccaaatttgtgctcaactacaaaacccgtatctgctcaagactgagctggcttcggttaagggaccaagtgtggacactgcatgctctagtcaatttgtgctcacttttagagtcctaattcttggtgaatcaaaatgcttcaagagatcaagcatggaagcattactcttggtttgtctgtgctcacctctagttcatcgtgaattgcagtgctattaaccagaaacttcttctctgctggacatgctaataaatgcagaatgtgcactgcttctgtggggattctacaggattttatcttgtgatcctggtatttttgcttgtgattcttcttatttggcagaggctggttgcaaggattttgtggaagctatatacacgagtgagagactcccaatgctctcaagagtcaggcagtgtacctggtgcaaagcaaacattaggggctatgaccatcattgccctgcatttggtacttgtataggacagaaaaatcatcgtctatttatggcccttttgacaggatttgttgttgctgaatcaacatatacgatgtgctcaacaaaatatattactatatgcattagctcaggaactataaaatcagagaatcctgtatctctaaacatggtaatcagtacaatgctcttctctatcctccaagtcctctggcagattgtattcttgatgtggcacatatattgcatctgcttcaacatcaagacatatgaattaactggaagaaatatcctgagttccagatgaaggaacaacctcgatcagattctgaagtcaaatctatgaacccatatgacaaaggcatgctgtgtaacataagagattttctaaaaccagttttgagtacgaagacctgacctctgatggaactatagaaacatgggaaatctgaagtgcgttatactggagccaacatggaagcttgtttcccttgttgctgccgtagcatttattgagactcgtcgtgaggattctgctgtgtaatttaatgtgcaagtagcattcttttataagattacttccgaccgggaattctagtctcttaacttcagaactgatttggtgagtaggtaaatagaggggatctatggggtcccttactattcatatggagttcacatcgtgatcctgcatttttttcctgtctggtcttgccaaagggtaactcttgcaggtgaaaggaccacgatgctcaagagggggtgaattgg

SEQ ID NO: 84301 - DNA, 1982 bp, Zea Mays
ggcttaccgcttacctccgcgcactgcacacgttcgacgaaatgccgccgcgagccctcttcgtcgtcaactgagatttgcctcacatcatctccgattccttcccctacttccgtccccatcagtggacccagccgagatcgactggatctcctggctcgggcggctttgatggttcctggggtcggcccggggaggagttcgaggcgatgagcaggcttgcgtcggggctccagcgcccgcggaggtcgttgtcgccgtgcgaggtgctgtggtgcgcgctcgcgtcatgcggcctagtgcttttctcgcagctcgccgtggcgatggttccccgcctcttcccttccctctatctcctcgccatgctccccatcgcggggctggtgttactcgcggctatcgtgctcggccgcctgtggaggaggttcatcggagtgacggcgtcggcgccgctcttcgtgctcttcaacatcctcctatcgtggggcgtttacatcttcgtaatccgtagaagtactgtaaattggattcagccattaagagatgattttatgctccattcaatgagagttgcagacttcaaagcatatactaagggattatttcaactatgaatccctgtagtacttcaacattaggtcactccttgtcaccaaatttgtgctcaactacaaaacccgtatctgctcaagactgagctggcttcggttaagggaccaagtgtggacactgcatgctctagtcaatttgtgctcacttttagagtcctaattcttggtgaatcaaaatgcttcaagagatcaagcatggaagcattactcttggtttgtctgtgctcacctctagttcatcgtgaattgcagtgctattaaccagaaacttcttctctgctggacatgctaataaatgcagaatgtgcactgcttctgtggggattctacaggattttatcttgtgatcctggtatttttgcttgtgattcttcttatttggcagaggctggttgcaaggattttgtggaagctatatacacgaagactcccaatgctctcaagagtcaggcagtgtacctggtgcaaagcaaacattaggggctatgaccatcattgccctgcatttggtacttgtataggacagaaaaatcatcgtctatttatggcccttttgacaggatttgttgttgctgaatcaacatatacgatgtgctcaacaaaatatattactatatgcattagctcaggaactataaaatcagagaatcctgtatctctaaacatggtaatcagtacaatgctcttctctatcctccaagtcctctggcagattgtattcttgatgtggcacatatattgcatctgcttcaacatcaagacatatgagtgggtaatttcaaatttcccatgctttagattcttttttcatcaattgcaggtcgtcttctcgttaggtgtttcttgtagctaaaaggtcagattttccagattaactggaagaaatatcctgagttccagatgaaggaacaacctcgatcagattctgaagtcaaatctatgaacccatatgacaaaggcatgctgtgtaacataagagattttctaaaaccagttttgagtacgaagacctgacctctgatggaactatagaaacatgggaaatctgaagtgcgttatactggagccaacatggaagcttgtttcccttgttgctgccgtagcatttattgagactcgtcgtgaggattctgctgtgtaatttaatgtgcaagtagcattcttttataagattacttccgaccgggaattctagtctcttaacttcagaactgatttggtgagtaggtaaatagaggggatctatggggtcccttactattcatatggagttcacatcgtgatcctgcatttttttcctgtctggtcttgccaaagggtaactcttgcaggtgaaaggaccacgatgctcaagagggggtgaattgg

SEQ ID NO: 84302 - DNA, 1885 bp, Zea Mays
ggcttaccgcttacctccgcgcactgcacacgttcgacgaaatgccgccgcgagccctcttcgtcgtcaactgagatttgcctcacatcatctccgattccttcccctacttccgtccccatcagtggacccagccgagatcgactggatctcctggctcgggcggctttgatggttcctggggtcggcccggggaggagttcgaggcgatgagcaggcttgcgtcggggctccagcgcccgcggaggtcgttgtcgccgtgcgagggctggtgttactcgcggctatcgtgctcggccgcctgtggaggaggttcatcggagtgacggcgtcggcgccgctcttcgtgctcttcaacatcctcctatcgtggggcgtttacatcttcgtaatccgtagaagtgagctcttgtggtactgtaaattggattcagccattaagagatgattttatgctccattcaatgagagttgcagacttcaaagcatatactaagggattatttcaactatgaatccctgtagtacttcaacattaggtcactccttgtcaccaaatttgtgctcaactacaaaacccgtatctgctcaagactgagctggcttcggttaagggaccaagtgtggacactgcatgctctagtcaatttgtgctcacttttagagtcctaattcttggtgaatcaaaatgcttcaagagatcaagcatggaagcattactcttggtttgtctgtgctcacctctagttcatcgtgaattgcagtgctattaaccagaaacttcttctctgctggacatgctaataaatgcagaatgtgcactgcttctgtggggattctacaggattttatcttgtgatcctggtatttttgcttgtgattcttcttatttggcagaggctggttgcaaggattttgtggaagctatatacacgagtgagagactcccaatgctctcaagagtcaggcagtgtacctggtgcaaagcaaacattaggggctatgaccatcattgccctgcatttggtacttgtataggacagaaaaatcatcgtctatttatggcccttttgacaggatttgttgttgctgaatcaacatatacgatgtgctcaacaaaatatattactatatgcattagctcaggaactataaaatcagagaatcctgtatctctaaacatggtaatcagtacaatgctcttctctatcctccaagtcctctggcagattgtattcttgatgtggcacatatattgcatctgcttcaacatcaagacatatgagtgggtaatttcaaatttcccatgctttagattcttttttcatcaattgcaggtcgtcttctcgttaggtgtttcttgtagctaaaaggtcagattttccagattaactggaagaaatatcctgagttccagatgaaggaacaacctcgatcagattctgaagtcaaatctatgaacccatatgacaaaggcatgctgtgtaacataagagattttctaaaaccagttttgagtacgaagacctgacctctgatggaactatagaaacatgggaaatctgaagtgcgttatactggagccaacatggaagcttgtttcccttgttgctgccgtagcatttattgagactcgtcgtgaggattctgctgtgtaatttaatgtgcaagtagcattcttttataagattacttccgaccgggaattctagtctcttaacttcagaactgatttggtgagtaggtaaatagaggggatctatggggtcccttactattcatatggagttcacatcgtgatcctgcatttttttcctgtctggtcttgccaaagggtaactcttgcaggtgaaaggaccacgatgctcaagagggggtgaattgg

SEQ ID NO: 84303 - DNA, 1887 bp, Zea Mays
ggcttaccgcttacctccgcgcactgcacacgttcgacgaaatgccgccgcgagccctcttcgtcgtcaactgagatttgcctcacatcatctccgattccttcccctacttccgtccccatcagtggacccagccgagatcgactggatctcctggctcgggcggctttgatggttcctggggtcggcccggggaggagttcgaggcgatgagcaggcttgcgtcggggctccagcgcccgcggaggtcgttgtcgccgtgcgaggtgctgtggtgcgcgctcgcgtcatgcggcctagtgcttttctcgcagctcgccgtggcgatggttccccgcctcttcccttccctctatctcctcgccatgctccccatcgcggggctggtgttactcgcggctatcgtgctcggccgcctgtggaggaggttcatcggagtgacggcgtcggcgccgctcttcgtgctcttcaacatcctcctatcgtggggcgtttacatcttcgtaatccgtagaagtgagctcttgtggtactgtaaattggattcagccattaagagatgattttatgctccattcaatgagagttgcagacttcaaagcatatactaagggattatttcaactatgaatccctgtagtacttcaacattaggtcactccttgtcaccaaatttgtgctcaactacaaaacccgtatctgctcaagactgagctggcttcggttaagggaccaagtgtggacactgcatgctctagtcaatttgtgctcacttttagagtcctaattcttggtgaatcaaaatgcttcaagagatcaagcatggaagcattactcttggtttgtctgtgctcacctctagttcatcgtgaattgcagtgctattaaccagaaacttcttctctgctggacatgctaataaatgcagaatgtgcactgcttctgtggggattctacaggattttatcttgtgatcctggtatttttgcttgtgattcttcttatttggcagaggctggttgcaaggattttgtggaagctatatacacgaagactcccaatgctctcaagagtcaggcagtgtacctggtgcaaagcaaacattaggggctatgaccatcattgccctgcatttggtacttgtataggacagaaaaatcatcgtctatttatggcccttttgacaggatttgttgttgctgaatcaacatatacgatgtgctcaacaaaatatattactatatgcattagctcaggaactataaaatcagagaatcctgtatctctaaacatggtaatcagtacaatgctcttctctatcctccaagtcctctggcaggtcgtcttctcgttaggtgtttcttgtagctaaaaggtcagattttccagattaactggaagaaatatcctgagttccagatgaaggaacaacctcgatcagattctgaagtcaaatctatgaacccatatgacaaaggcatgctgtgtaacataagagattttctaaaaccagttttgagtacgaagacctgacctctgatggaactatagaaacatgggaaatctgaagtgcgttatactggagccaacatggaagcttgtttcccttgttgctgccgtagcatttattgagactcgtcgtgaggattctgctgtgtaatttaatgtgcaagtagcattcttttataagattacttccgaccgggaattctagtctcttaacttcagaactgatttggtgagtaggtaaatagaggggatctatggggtcccttactattcatatggagttcacatcgtgatcctgcatttttttcctgtctggtcttgccaaagggtaactcttgcaggtgaaaggaccacgatgctcaagagggggtgaattgg

SEQ ID NO: 84304 - DNA, 1526 bp, Zea Mays
ggcttaccgcttacctccgcgcactgcacacgttcgacgaaatgccgccgcgagccctcttcgtcgtcaactgagatttgcctcacatcatctccgattccttcccctacttccgtccccatcagtggacccagccgagatcgactggatctcctggctcgggcggctttgatggttcctggggtcggcccggggaggagttcgaggcgatgagcaggcttgcgtcggggctccagcgcccgcggaggtcgttgtcgccgtgcgaggtgctgtggtgcgcgctcgcgtcatgcggcctagtgcttttctcgcagctcgccgtggcgatggttccccgcctcttcccttccctctatctcctcgccatgctccccatcgcggggctggtgttactcgcggctatcgtgctcggccgcctgtggaggaggttcatcggagtgacggcgtcggcgccgctcttcgtgctcttcaacatcctcctatcgtggggcgtttacatcttcgtaatccgtagaaaaacttcttctctgctggacatgctaataaatgcagaatgtgcactgcttctgtggggattctacaggattttatcttgtgatcctggtatttttgcttgtgattcttcttatttggcagaggctggttgcaaggattttgtggaagctatatacacgagtgagagactcccaatgctctcaagagtcaggcagtgtacctggtgcaaagcaaacattaggggctatgaccatcattgccctgcatttggtacttgtataggacagaaaaatcatcgtctatttatggcccttttgacaggatttgttgttgctgaatcaacatatacgatgtgctcaacaaaatatattactatatgcattagctcaggaactataaaatcagagaatcctgtatctctaaacatggtaatcagtacaatgctcttctctatcctccaagtcctctggcagattgtattcttgatgtggcacatatattgcatctgcttcaacatcaagacatatgagtggattaactggaagaaatatcctgagttccagatgaaggaacaacctcgatcagattctgaagtcaaatctatgaacccatatgacaaaggcatgctgtgtaacataagagattttctaaaaccagttttgagtacgaagacctgacctctgatggaactatagaaacatgggaaatctgaagtgcgttatactggagccaacatggaagcttgtttcccttgttgctgccgtagcatttattgagactcgtcgtgaggattctgctgtgtaatttaatgtgcaagtagcattcttttataagattacttccgaccgggaattctagtctcttaacttcagaactgatttggtgagtaggtaaatagaggggatctatggggtcccttactattcatatggagttcacatcgtgatcctgcatttttttcctgtctggtcttgccaaagggtaactcttgcaggtgaaaggaccacgatgctcaagagggggtgaattgg

SEQ ID NO: 84305 - DNA, 3284 bp, Zea Mays
ctaaataaatgtgtgtcaaatagagctgataccggcttaccgcttacctccgcgcactgcacacgttcgacgaaatgccgccgcgagccctcttcgtcgtcaactgagatttgcctcacatcatctccgattccttcccctacttccgtccccatcagtggacccagccgagatcgactggatctcctggctcgggcggctttgatggttcctggggtcggcccggggaggagttcgaggcgatgagcaggcttgcgtcggggctccagcgcccgcggaggtcgttgtcgccgtgcgaggtgctgtggtgcgcgctcgcgtcatgcggcctagtgcttttctcgcagctcgccgtggcgatggttccccgcctcttcccttccctctatctcctcgccatgctccccatcgcgggtcggtgctctcgggtcgctcgtttccttttttggtttcctgccccggctacgtggtgtctctactttttttttagcttaagcgcaattctgaccctcctttgattgcgtgttgcgtagggctggtgttactcgcggctatcgtgctcggccgcctgtggaggaggttcatcggagtgacggcgtcggcgccgctcttcgtgctcttcaacatcctcctatcgtggggcgtttacatcttcgtaatccgtagaagtactgtaaattggattcagccattaagagatgattttatgctccattcaatgagagttgcagacttcaaagcatatactaagggattatttcaactatgaatccctgtagtacttcaacattaggtcactccttgtcaccaaatttgtgctcaactacaaaacccgtatctgctcaagactgagctggcttcggttaagggaccaagtgtggacactgcatgctctagtcaatttgtgctcacttttagagtcctaattcttggtgaatcaaaatgcttcaagagatcaagcatggaagcattactcttggtttgtctgtgctcacctctagttcatcgtgaattgcagtgctattaaccagaaacttcttctctgctggacatgctaataaatgcagaatgtgcactgcttctgtggggattctacagaggctggttgcaaggattttgtggaagctatatacacgagtgagagactcccaatgctctcaagagtcaggcagtgtacctggtgcaaagcaaacattaggggctatgaccatcattgccctgcatttggtacttgtataggacagaaaaatcatcgtctatttatggcccttttgacaggatttgttgttgctgaatcaacatatacgatgtgctcaacaaaatgtatgctatttgttttcttgctctctgaaatgagtgttgggtttatcctaatagcagatgcggctgcttcttatctctaactaaagtaccaacaactatttatttatttatttccaagttttactgtgttaggtaaccaaataatttcacctacatttccgtgttatgcagatattactatatgcattagctcaggaactataaaatcagaggtatctatgcccatatcttattcttattgcatgtattgtaaggcaatttcgtttggaaaatttaggtatgggccattggtctcagctagtatttcgactcttgccagtttttttttcgaaccattgacttggaccgaataattacaaaaacagtggcaataattgaaacagtaattaacctgatgacacacacacctacattttccattttgttttcaagattttcctgcagtttactgtttttgaaggtgctcagtttcccccacccccatatttctcaaacatgcaggagaagttgaccttagcaaacaagctactcgttaagtaaatgtgtgttcaaccatacaaattattttgttctcttgtaggactatttgcttggatgatttagcatagtagctattcattccttttctcaaacacgccattttttactgcatagtgcatatgcatagtgagtgcatttgtatgtctttagtatttccaatgttaattgttaagcgaaagagcatctagttgagttggttaggtggtttgaatagcactccttagatcctgagttcgaatcccagcgggagcgaatttcaggctaaggttaaaaaaatcactcgttggctcctctagttgtgtgtgtgcacacgagattgactgacttatagggggcggatccttatgtaggggctgtaagggctcaaaacacaagtaaagatttgggctatagggggtggaccctcatgttgcacgggggccagcttttgaccttttttggccggggctctgattgagcttcttcttaatataataccatgggggtggtctttctcttactgtccgagttttttttcggggctccgattgaacttcttaatataataccgtggagtggtctttctcctaacagccgagtttttttcccaattccaatgttaatatattcaaatcaggtctaccatggtataattgaaagcagttgtattaaactatggtgtgggccttttgagtcagtcttccatgtttctgagaaaccatgcaaccttttctttttgttttatttacccatcaaactgtacccttcattcctgatctataagaatgactgcaagatgcttacttagtgtactcatgtactttgcagaatcctgtatctctaaacatggtaatcagtacaatgctcttctctatcctccaagtcctctggcaggtcgtcttctcgttaggtgtttcttgtagctaaaaggtcagattttccagattaactggaagaaatatcctgagttccagatgaaggaacaacctcgatcagattctgaagtcaaatctatgaacccatatgacaaaggcatgctgtgtaacataagagattttctaaaaccagttttgagtacgaagacctgacctctgatggaactatagaaacatgggaaatctgaagtgcgttatactggagccaacatggaagcttgtttcccttgttgctgccgtagcatttattgagactcgtcgtgaggattctgctgtgtaatttaatgtgcaagtagcattcttttataagattacttccgaccgggaattctagtctcttaacttcagaactgatttggtgagtaggtaaatagaggggatctatggggtcccttactattcatatggagttcacatcgtgatcctgcatttttttcctgtctggtcttgccaaagggtaactcttgcaggtgaaaggaccacgatgctcaagagggggtgaattgg

SEQ ID NO: 84306 - DNA, 2917 bp, Zea Mays
tgacgtcttaactcggatcacgagttgaacagatttgggtcggggacaagccatgaacaacgcaaccaccagttgttaactaaccctcttttaaacttcaagcaaccaaagccaagagcagaaatggttttccaaaagtggtcgtcgtcgtcagagatggagtcgtgcggtggaggccaagtcccggagatgccacgcgttcccaagtccgcgaggggcaagagatcggtcaggaagaaggaggcccagagcccggcccagatgtctgcaatcgaccttctcgcaaccgtggcagggaagctgtttgacgagggggcggggtcgctggggaacacgagcgccggtgccccggccttggctgcgttcgcaaaggatgccctggtgaagcaggagcagtgtgatgagcaaatgaagctgttcaagcatgaggcgacggatcaggatagctgcaatgagagtgcaatcctcccccacattgtgctccagcgggtggtgaataatgctaggaatgaggatcctaaggcgaagtctgaggtccaggacaaggaatcctccatgatcagctatacgaaggctgaattgggttgtaattttggtgtgatcgcagacaggtggtcgcctgaatccgtggaatcaggagccttcacaggagatgcagtggcgagactgatgatgacggccccggcaggatttcataagaatgcacccgaaatgtatagtttgcttgattcaatggatgtggatgtcaagccgcctcctttggtcagctctgacagcaccggcgagatgccattgcatggcgataaaattcaccgctcaacctccttaccgagggccccaaagggggtggggttttttgctgtagatagagatgatgacgacgacaagtcctctgggtgcactcatccgagcaccgccactaacaaggatttcacatccaattgtaaagctgagtataatagggtaaggaagctgctcactagtaagcacaggaaagttgctccagcgaggattcacaaatctgatctttcctatagtgatgtcgagcggaagccttctttccggtacaaaaaaatgcatacacgacagaggacacaaaggagtacattcaagcggaggaagctctttgatcgccatttagctctagcatctgaatttggtacagcaaatggaaagggaaacacaaaggttgccggaagaaactccaatgctgtgtctttggaagcaaacaaggggactaattcaatgccattccagaaatcttgtgggtcaaatgattgccatgtgaaacttagaattaagtcttttaacgtgcctgaacttcttgttgaaatcccagacagtgcaactgttggctcactaaagaaaactgttctcgaggcagtgactgcgattcttggaggtggcctacgtgttggtgttcttcaccatggaaagaaagtcagagatgatagtaaaacgttaattcaggctgggattggtcaggatgatatgctggacaaccttggcttttcacttgaacccaactgtactcaaaacccacaagtacaagctcctgaagatgtcagtttcctcgaaaacattgatactaccgaacccctcgcaaggatcacacctgctgactcgtcttctaagcttggtgaagttgacgtatcacaggagcttgcattaaccccattagcaatgaactaccagggcagtgatcatgattccgtgcactcccctggggctgtctcgtcgcgcgataaagactcgcgagccttatttctggttccagctgcagatcccaatgcaggagctgtagttccagcaaataagactaagaggtcaccagagcagggacaccgcagaatcaggcggccgttctctgttgctgaagtagaagcacttgtgctcgcagtcgaaaagcttggaaccggaaggtggcgagatgttaaacttcgcgcttttgacaatgcaaagcaccgtacctacgttgaccttaaggacaaatggaagacgctggtacacacagcgagcatctcgccgcagcagcggcgtggcgagccggtgcctcaggagctgctcgaccgggtcctggcggcccaggcctactggtcccagcagcaagccaagctccagcctaagacgccctcgctggctgaggctcgcttgctcacccaataattcgatgatcccggctgatggcctcctctgaggccgttgcagcctttgtataaagtcaccaggattctctctccttgtgaatttaaccaaaggaaagggcatttctttggcaattgtacattttgatgatggaagaagaagatgatccatgaactgagatctgcagtgtctacctactaatggctcacaatttttgcaattgtgattaagaaattcaaggtgctgcttgaccaagctcggctccggcttccagtttttggattctcttgtgaagaagttgctgcctcttttttatacagcagaagctgagagccgaacagtgtatttggcttgaattgcagcctatatagtttcatccactcatacagacggccacaaatgccgtaaaaggagggtagcttcttttgctgagtctagtcttgggagcaaagctcaggaccgaagtctagacttgagacggagcgggggccaaagcggcacccgaatgaaagcttcagattcttttgttcagttaaattcattctttggtagtggagactgacggaaggataggagattaggtggggtggatctttggttctctttttctttcttcttctattattacattattagttgtattaatgtactatattattttaccaatcttgtagttaccctcaaatttgtaattggtgaaattaacaaaattgaaggaaatacatttccaccacttcgctaccctttttaaattattattatgggtctcatc

SEQ ID NO: 84307 - DNA, 3050 bp, Zea Mays
gctttggtccgatccgccgcgctgtgctccgacagagagatttgggtcggggacaagccatgaacaacgcaaccaccagttgttaactaaccctcttttaaacttcaagcaaccaaagccaagagcagaaatggttttccaaaagtggtcgtcgtcgtcagagatggagtcgtgcggtggaggccaagtcccggagatgccacgcgttcccaagtccgcgaggggcaagagatcggtcaggaagaaggaggcccagagcccggcccagatgtctgcaatcgaccttctcgcaaccgtggcagggaagctgtttgacgagggggcggggtcgctggggaacacgagcgccggtgccccggccttggctgcgttcgcaaaggatgccctggtgaagcaggagcagtgtgatgagcaaatgaagctgttcaagcatgaggcgacggatcaggatagctgcaatgagagtgcaatcctcccccacattgtgctccagcgggtggtgaataatgctaggaatgaggatcctaaggcgaagtctgaggtccaggacaaggaatcctccatgatcagctatacgaaggctgaattgggttgtaattttggtgtgatcgcagacaggtggtcgcctgaatccgtggaatcaggagccttcacaggagatgcagtggcgagactgatgatgacggccccggcaggatttcataagaatgcacccgaaatgtatagtttgcttgattcaatggatgtggatgtcaagccgcctcctttggtcagctctgacagcaccggcgagatgccattgcatggcgataaaattcaccgctcaacctccttaccgagggccccaaagggggtggggttttttgctgtagatagagatgatgacgacgacaagtcctctgggtgcactcatccgagcaccgccactaacaaggatttcacatccaattgtaaagctgagtataatagggtaaggaagctgctcactagtaagcacaggaaagttgctccagcgaggattcacaaatctgatctttcctatagtgatgtcgagcggaagccttctttccggtacaaaaaaatgcatacacgacagaggacacaaaggagtacattcaagcggaggaagctctttgatcgccatttagctctagcatctgaatttggtacagcaaatggaaagggaaacacaaaggttgccggaagaaactccaatgctgtgtctttggaagcaaacaaggggactaattcaatgccattccagaaatcttgtgggtcaaatgattgccatgtgaaacttagaattaagtcttttaacgtgcctgaacttcttgttgaaatcccagacagtgcaactgttggctcactaaagaaaactgttctcgaggcagtgactgcgattcttggaggtggcctacgtgttggtgttcttcaccatggaaagaaagtcagagatgatagtaaaacgttaattcaggctgggattggtcaggatgatatgctggacaaccttggcttttcacttgaacccaactgtactcaaaacccacaagtacaagctcctgaagatgtcagtttcctcgaaaacattgatactaccgaacccctcgcaaggatcacacctgctgactcgtcttctaagcttggtgaagttgacgtatcacaggagcttgcattaaccccattagcaatgaactaccagggcagtgatcatgattccgtgcactcccctggggctgtctcgtcgcgcgataaagactcgcgagccttatttctggttccagctgcagatcccaatgcaggagctgtagttccagcaaataagactaagaggtcaccagagcagggacaccgcagaatcaggcggccgttctctgttgctgaagtagaagcacttgtgctcgcagtcgaaaagcttggaaccggaaggtggcgagatgttaaacttcgcgcttttgacaatgcaaagcaccgtacctacgttgaccttaaggacaaatggaagacgctggtacacacagcgagcatctcgccgcagcagcggcgtggcgagccggtgcctcaggagctgctcgaccgggtcctggcggcccaggcctactggtcccagcagcaagccaagctccagcctaagacgccctcgctggctgaggctcgcttgctcacccaataattcgatgatcccggctgatggcctcctctgaggccgttgcagcctttgtataaagtcagtaagtcccttcacaggaggtttaatgaaaatataatattaggggaaaaaaagaatgcatatataaggtacaagaagcattgaccgatttgttgtaatatctactcaccaccggttattctttaagccaggattctctctccttgtgaatttaaccaaaggaaagggcatttctttggcaattgtacattttgatgatggaagaagaagatgatccatgaactgagatctgcagtgtctacctactaatggctcacaatttttgcaattgtgattaagaaattcaaggtgctgcttgaccaagctcggctccggcttccagtttttggattctcttgtgaagaagttgctgcctcttttttatacagcagaagctgagagccgaacagtgtatttggcttgaattgcagcctatatagtttcatccactcatacagacggccacaaatgccgtaaaaggagggtagcttcttttgctgagtctagtcttgggagcaaagctcaggaccgaagtctagacttgagacggagcgggggccaaagcggcacccgaatgaaagcttcagattcttttgttcagttaaattcattctttggtagtggagactgacggaaggataggagattaggtggggtggatctttggttctctttttctttcttcttctattattacattattagttgtattaatgtactatattattttaccaatcttgtagttaccctcaaatttgtaattggtgaaattaacaaaattgaaggaaatacatttccaccacttcgctaccctttttaaattattattatgggtctcatc

SEQ ID NO: 84308 - DNA, 3271 bp, Zea Mays
accgggagcagccggtggcgcccctctccgggagccgggatggcgtgggccgtgggcgtaagcgtaagaaggcgaggcggggttggggggtttaagaagggggttggtttggaggggttttggccaacccacaccaccgcaccacgcacctccaccaccagaagaaaaaaccaaggcggagggcggagaggagagcaagggggcagaagggaaataaaaataaaagaggagaggcgaagcaaggcgaggaggaggagggagcacccagaggcaggggagggggaataattccgcaggggctcgagggatctcgtcgggtctggccggagcagcacggcgaggcggcgatccgagggcgagcggaggcgggcgagcgtcgacgccggcgagatttgggtcggggacaagccatgaacaacgcaaccaccagttgttaactaaccctcttttaaacttcaagcaaccaaagccaagagcagaaatggttttccaaaagtggtcgtcgtcgtcagagatggagtcgtgcggtggaggccaagtcccggagatgccacgcgttcccaagtccgcgaggggcaagagatcggtcaggaagaaggaggcccagagcccggcccagatgtctgcaatcgaccttctcgcaaccgtggcagggaagctgtttgacgagggggcggggtcgctggggaacacgagcgccggtgccccggccttggctgcgttcgcaaaggatgccctggtgaagcaggagcagtgtgatgagcaaatgaagctgttcaagcatgaggcgacggatcaggatagctgcaatgagagtgcaatcctcccccacattgtgctccagcgggtggtgaataatgctaggaatgaggatcctaaggcgaagtctgaggtccaggacaaggaatcctccatgatcagctatacgaaggctgaattgggttgtaattttggtgtgatcgcagacaggtggtcgcctgaatccgtggaatcaggagccttcacaggagatgcagtggcgagactgatgatgacggccccggcaggatttcataagaatgcacccgaaatgtatagtttgcttgattcaatggatgtggatgtcaagccgcctcctttggtcagctctgacagcaccggcgagatgccattgcatggcgataaaattcaccgctcaacctccttaccgagggccccaaagggggtggggttttttgctgtagatagagatgatgacgacgacaagtcctctgggtgcactcatccgagcaccgccactaacaaggatttcacatccaattgtaaagctgagtataatagggtaaggaagctgctcactagtaagcacaggaaagttgctccagcgaggattcacaaatctgatctttcctatagtgatgtcgagcggaagccttctttccggtacaaaaaaatgcatacacgacagaggacacaaaggagtacattcaagcggaggaagctctttgatcgccatttagctctagcatctgaatttggtacagcaaatggaaagggaaacacaaaggttgccggaagaaactccaatgctgtgtctttggaagcaaacaaggggactaattcaatgccattccagaaatcttgtgggtcaaatgattgccatgtgaaacttagaattaagtcttttaacgtgcctgaacttcttgttgaaatcccagacagtgcaactgttggctcactaaagaaaactgttctcgaggcagtgactgcgattcttggaggtggcctacgtgttggtgttcttcaccatggaaagaaagtcagagatgatagtaaaacgttaattcaggctgggattggtcaggatgatatgctggacaaccttggcttttcacttgaacccaactgtactcaaaacccacaagtacaagctcctgaagatgtcagtttcctcgaaaacattgatactaccgaacccctcgcaaggatcacacctgctgactcgtcttctaagcttggtgaagttgacgtatcacaggagcttgcattaaccccattagcaatgaactaccagggcagtgatcatgattccgtgcactcccctggggctgtctcgtcgcgcgataaagactcgcgagccttatttctggttccagctgcagatcccaatgcaggagctgtagttccagcaaataagactaagaggtcaccagagcagggacaccgcagaatcaggcggccgttctctgttgctgaagtagaagcacttgtgctcgcagtcgaaaagcttggaaccggaaggtggcgagatgttaaacttcgcgcttttgacaatgcaaagcaccgtacctacgttgaccttaaggacaaatggaagacgctggtacacacagcgagcatctcgccgcagcagcggcgtggcgagccggtgcctcaggagctgctcgaccgggtcctggcggcccaggcctactggtcccagcagcaagccaagctccagcctaagacgccctcgctggctgaggctcgcttgctcacccaataattcgatgatcccggctgatggcctcctctgaggccgttgcagcctttgtataaagtcagattctctctccttgtgaatttaaccaaaggaaagggcatttctttggcaattgtacattttgatgatggaagaagaagatgatccatgaactgagatctgcagtgtctacctactaatggctcacaatttttgcaattgtgattaagaaattcaaggtgctgcttgaccaagctcggctccggcttccagtttttggattctcttgtgaagaagttgctgcctcttttttatacagcagaagctgagagccgaacagtgtatttggcttgaattgcagcctatatagtttcatccactcatacagacggccacaaatgccgtaaaaggagggtagcttcttttgctgagtctagtcttgggagcaaagctcaggaccgaagtctagacttgagacggagcgggggccaaagcggcacccgaatgaaagcttcagattcttttgttcagttaaattcattctttggtagtggagactgacggaaggataggagattaggtggggtggatctttggttctctttttctttcttcttctattattacattattagttgtattaatgtactatattattttaccaatcttgtagttaccctcaaatttgtaattggtgaaattaacaaaattgaaggaaatacatttccaccacttcgctaccctttttaaattattattatgggtctcatc

SEQ ID NO: 84309 - DNA, 3415 bp, Zea Mays
accgggagcagccggtggcgcccctctccgggagccgggatggcgtgggccgtgggcgtaagcgtaagaaggcgaggcggggttggggggtttaagaagggggttggtttggaggggttttggccaacccacaccaccgcaccacgcacctccaccaccagaagaaaaaaccaaggcggagggcggagaggagagcaagggggcagaagggaaataaaaataaaagaggagaggcgaagcaaggcgaggaggaggagggagcacccagaggcaggggagggggaataattccgcaggggctcgagggatctcgtcgggtctggccggagcagcacggcgaggcggcgatccgagggcgagcggaggcgggcgagcgtcgacgccggcgagatttgggtcggggacaagccatgaacaacgcaaccaccagttgttaactaaccctcttttaaacttcaagcaaccaaagccaagagcagaaatggttttccaaaagtggtcgtcgtcgtcagagatggagtcgtgcggtggaggccaagtcccggagatgccacgcgttcccaagtccgcgaggggcaagagatcggtcaggaagaaggaggcccagagcccggcccagatgtctgcaatcgaccttctcgcaaccgtggcagggaagctgtttgacgagggggcggggtcgctggggaacacgagcgccggtgccccggccttggctgcgttcgcaaaggatgccctggtgaagcaggagcagtgtgatgagcaaatgaagctgttcaagcatgaggcgacggatcaggatagctgcaatgagagtgcaatcctcccccacattgtgctccagcgggtggtgaataatgctaggaatgaggatcctaaggcgaagtctgaggtccaggacaaggaatcctccatgatcagctatacgaaggctgaattgggttgtaattttggtgtgatcgcagacaggtggtcgcctgaatccgtggaatcaggagccttcacaggagatgcagtggcgagactgatgatgacggccccggcaggatttcataagaatgcacccgaaatgtatagtttgcttgattcaatggatgtggatgtcaagccgcctcctttggtcagctctgacagcaccggcgagatgccattgcatggcgataaaattcaccgctcaacctccttaccgagggccccaaagggggtggggttttttgctgtagatagagatgatgacgacgacaagtcctctgggtgcactcatccgagcaccgccactaacaaggatttcacatccaattgtaaagctgagtataatagggtaaggaagctgctcactagtaagcacaggaaagttgctccagcgaggattcacaaatctgatctttcctatagtgatgtcgagcggaagccttctttccggtacaaaaaaatgcatacacgacagaggacacaaaggagtacattcaagcggaggaagctctttgatcgccatttagctctagcatctgaatttggtacagcaaatggaaagggaaacacaaaggttgccggaagaaactccaatgctgtgtctttggaagcaaacaaggggactaattcaatgccattccagaaatcttgtgggtcaaatgattgccatgtgaaacttagaattaagtcttttaacgtgcctgaacttcttgttgaaatcccagacagtgcaactgttggctcactaaagcatttccaatgcagaaaactgttctcgaggcagtgactgcgattcttggaggtggcctacgtgttggtgttcttcaccatggaaagaaagtcagagatgatagtaaaacgttaattcaggctgggattggtcaggatgatatgctggacaaccttggcttttcacttgaacccaactgtactcaaaacccacaagtacaagctcctgaagatgtcagtttcctcgaaaacattgatactaccgaacccctcgcaaggatcacacctgctgactcgtcttctaagcttggtgaagttgacgtatcacaggagcttgcattaaccccattagcaatgaactaccagggcagtgatcatgattccgtgcactcccctggggctgtctcgtcgcgcgataaagactcgcgagccttatttctggttccagctgcagatcccaatgcaggagctgtagttccagcaaataagactaagaggtcaccagagcagggacaccgcagaatcaggcggccgttctctgttgctgaagtagaagcacttgtgctcgcagtcgaaaagcttggaaccggaaggtggcgagatgttaaacttcgcgcttttgacaatgcaaagcaccgtacctacgttgaccttaaggacaaatggaagacgctggtacacacagcgagcatctcgccgcagcagcggcgtggcgagccggtgcctcaggagctgctcgaccgggtcctggcggcccaggcctactggtcccagcagcaagccaagctccagcctaagacgccctcgctggctgaggctcgcttgctcacccaataattcgatgatcccggctgatggcctcctctgaggccgttgcagcctttgtataaagtcagtaagtcccttcacaggaggtttaatgaaaatataatattaggggaaaaaaagaatgcatatataaggtacaagaagcattgaccgatttgttgtaatatctactcaccaccggttattctttaagccaggattctctctccttgtgaatttaaccaaaggaaagggcatttctttggcaattgtacattttgatgatggaagaagaagatgatccatgaactgagatctgcagtgtctacctactaatggctcacaatttttgcaattgtgattaagaaattcaaggtgctgcttgaccaagctcggctccggcttccagtttttggattctcttgtgaagaagttgctgcctcttttttatacagcagaagctgagagccgaacagtgtatttggcttgaattgcagcctatatagtttcatccactcatacagacggccacaaatgccgtaaaaggagggtagcttcttttgctgagtctagtcttgggagcaaagctcaggaccgaagtctagacttgagacggagcgggggccaaagcggcacccgaatgaaagcttcagattcttttgttcagttaaattcattctttggtagtggagactgacggaaggataggagattaggtggggtggatctttggttctctttttctttcttcttctattattacattattagttgtattaatgtactatattattttaccaatcttgtagttaccctcaaatttgtaattggtgaaattaacaaaattgaaggaaatacatttccaccacttcgctaccctttttaaattattattatgggtctcatc

SEQ ID NO: 84310 - DNA, 3323 bp, Zea Mays
accgggagcagccggtggcgcccctctccgggagccgggatggcgtgggccgtgggcgtaagcgtaagaaggcgaggcggggttggggggtttaagaagggggttggtttggaggggttttggccaacccacaccaccgcaccacgcacctccaccaccagaagaaaaaaccaaggcggagggcggagaggagagcaagggggcagaagggaaataaaaataaaagaggagaggcgaagcaaggcgaggaggaggagggagcacccagaggcaggggagggggaataattccgcaggggctcgagggatctcgtcgggtctggccggagcagcacggcgaggcggcgatccgagggcgagcggaggcgggcgagcgtcgacgccggcgagatttgggtcggggacaagccatgaacaacgcaaccaccagttgttaactaaccctcttttaaacttcaagcaaccaaagccaagagcagaaatggttttccaaaagtggtcgtcgtcgtcagagatggagtcgtgcggtggaggccaagtcccggagatgccacgcgttcccaagtccgcgaggggcaagagatcggtcaggaagaaggaggcccagagcccggcccagatgtctgcaatcgaccttctcgcaaccgtggcagggaagctgtttgacgagggggcggggtcgctggggaacacgagcgccggtgccccggccttggctgcgttcgcaaaggatgccctggtgaagcaggagcagtgtgatgagcaaatgaagctgttcaagcatgaggcgacggatcaggatagctgcaatgagagtgcaatcctcccccacattgtgctccagcgggtggtgaataatgctaggaatgaggatcctaaggcgaagtctgaggtccaggacaaggaatcctccatgatcagctatacgaaggctgaattgggttgtaattttggtgtgatcgcagacaggtggtcgcctgaatccgtggaatcaggagccttcacaggagatgcagtggcgagactgatgatgacggccccggcaggatttcataagaatgcacccgaaatgtatagtttgcttgattcaatggatgtggatgtcaagccgcctcctttggtcagctctgacagcaccggcgagatgccattgcatggcgataaaattcaccgctcaacctccttaccgagggccccaaagggggtggggttttttgctgtagatagagatgatgacgacgacaagtcctctgggtgcactcatccgagcaccgccactaacaaggatttcacatccaattgtaaagctgagtataatagggtaaggaagctgctcactagtaagcacaggaaagttgctccagcgaggattcacaaatctgatctttcctatagtgatgtcgagcggaagccttctttccggtacaaaaaaatgcatacacgacagaggacacaaaggagtacattcaagcggaggaagctctttgatcgccatttagctctagcatctgaatttggtacagcaaatggaaagggaaacacaaaggttgccggaagaaactccaatgctgtgtctttggaagcaaacaaggggactaattcaatgccattccagaaatcttgtgggtcaaatgattgccatgtgaaacttagaattaagtcttttaacgtgcctgaacttcttgttgaaatcccagacagtgcaactgttggctcactaaagcatttccaatgcagaaaactgttctcgaggcagtgactgcgattcttggaggtggcctacgtgttggtgttcttcaccatggaaagaaagtcagagatgatagtaaaacgttaattcaggctgggattggtcaggatgatatgctggacaaccttggcttttcacttgaacccaactgtactcaaaacccacaagtacaagctcctgaagatgtcagtttcctcgaaaacattgatactaccgaacccctcgcaaggatcacacctgctgactcgtcttctaagcttggtgaagttgacgtatcacaggagcttgcattaaccccattagcaatgaactaccagggcagtgatcatgattccgtgcactcccctggggctgtctcgtcgcgcgataaagactcgcgagccttatttctggttccagctgcagatcccaatgcaggagctgtagttccagcaaataagactaagaggtcaccagagcagggacaccgcagaatcaggcggccgttctctgttgctgaagtagaagcacttgtgctcgcagtcgaaaagcttggaaccggaaggtggcgagatgttaaacttcgcgcttttgacaatgcaaagcaccgtacctacgttgaccttaaggcaatgaactaaccgtgtcgagattgtggtgcgaacaggacaaatggaagacgctggtacacacagcgagcatctcgccgcagcagcggcgtggcgagccggtgcctcaggagctgctcgaccgggtcctggcggcccaggcctactggtcccagcagcaagccaagctccagcctaagacgccctcgctggctgaggctcgcttgctcacccaataattcgatgatcccggctgatggcctcctctgaggccgttgcagcctttgtataaagtcagattctctctccttgtgaatttaaccaaaggaaagggcatttctttggcaattgtacattttgatgatggaagaagaagatgatccatgaactgagatctgcagtgtctacctactaatggctcacaatttttgcaattgtgattaagaaattcaaggtgctgcttgaccaagctcggctccggcttccagtttttggattctcttgtgaagaagttgctgcctcttttttatacagcagaagctgagagccgaacagtgtatttggcttgaattgcagcctatatagtttcatccactcatacagacggccacaaatgccgtaaaaggagggtagcttcttttgctgagtctagtcttgggagcaaagctcaggaccgaagtctagacttgagacggagcgggggccaaagcggcacccgaatgaaagcttcagattcttttgttcagttaaattcattctttggtagtggagactgacggaaggataggagattaggtggggtggatctttggttctctttttctttcttcttctattattacattattagttgtattaatgtactatattattttaccaatcttgtagttaccctcaaatttgtaattggtgaaattaacaaaattgaaggaaatacatttccaccacttcgctaccctttttaaattattattatgggtctcatc

SEQ ID NO: 84311 - DNA, 3267 bp, Zea Mays
accgggagcagccggtggcgcccctctccgggagccgggatggcgtgggccgtgggcgtaagcgtaagaaggcgaggcggggttggggggtttaagaagggggttggtttggaggggttttggccaacccacaccaccgcaccacgcacctccaccaccagaagaaaaaaccaaggcggagggcggagaggagagcaagggggcagaagggaaataaaaataaaagaggagaggcgaagcaaggcgaggaggaggagggagcacccagaggcaggggagggggaataattccgcaggggctcgagggatctcgtcgggtctggccggagcagcacggcgaggcggcgatccgagggcgagcggaggcgggcgagcgtcgacgccggcgagatttgggtcggggacaagccatgaacaacgcaaccaccagttgttaactaaccctcttttaaacttcaagcaaccaaagccaagagcagaaatggttttccaaaagtggtcgtcgtcgtcagagatggagtcgtgcggtggaggccaagtcccggagatgccacgcgttcccaagtccgcgaggggcaagagatcggtcaggaagaaggaggcccagagcccggcccagatgtctgcaatcgaccttctcgcaaccgtggcagggaagctgtttgacgagggggcggggtcgctggggaacacgagcgccggtgccccggccttggctgcgttcgcaaaggatgccctggtgaagcaggagcagtgtgatgagcaaatgaagctgttcaagcatgaggcgacggatcaggatagctgcaatgagagtgcaatcctcccccacattgtgctccagcgggtggtgaataatgctaggaatgaggatcctaaggcgaagtctgaggtccaggacaaggaatcctccatgatcagctatacgaaggctgaattgggttgtaattttggtgtgatcgcagacaggtggtcgcctgaatccgtggaatcaggagccttcacaggagatgcagtggcgagactgatgatgacggccccggcaggatttcataagaatgcacccgaaatgtatagtttgcttgattcaatggatgtggatgtcaagccgcctcctttggtcagctctgacagcaccggcgagatgccattgcatggcgataaaattcaccgctcaacctccttaccgagggccccaaagggggtggggttttttgctgtagatagagatgatgacgacgacaagtcctctgggtgcactcatccgagcaccgccactaacaaggatttcacatccaattgtaaagctgagtataatagggtaaggaagctgctcactagtaagcacaggaaagttgctccagcgaggattcacaaatctgatctttcctatagtgatgtcgagcggaagccttctttccggtacaaaaaaatgcatacacgacagaggacacaaaggagtacattcaagcggaggaagctctttgatcgccatttagctctagcatctgaatttggtacagcaaatggaaagggaaacacaaaggttgccggaagaaactccaatgctgtgtctttggaagcaaacaaggggactaattcaatgccattccagaaatcttgtgggtcaaatgattgccatgtgaaacttagaattaagtcttttaacgtgcctgaacttcttgttgaaatcccagacagtgcaactgttggctcactaaagaaaactgttctcgaggcagtgactgcgattcttggaggtggcctacgtgttggtgttcttcaccatggaaagaaagtcagagatgatagtaaaacgttaattcaggctgggattggtcaggatgatatgctggacaaccttggcttttcacttgaacccaactgtactcaaaacccacaagtacaagctcctgaagatgtcagtttcctcgaaaacattgatactaccgaacccctcgcaaggatcacacctgctgactcgtcttctaagcttggtgaagttgacgtatcacaggagcttgcattaaccccattagcaatgaactaccagggcagtgatcatgattccgtgcactcccctggggctgtctcgtcgcgcgataaagactcgcgagccttatttctggttccagctgcagatcccaatgcaggagctgtagttccagcaaataagactaagaggtcaccagagcagggacaccgcagaatcaggcggccgttctctgttgctgaagtagaagcacttgtgctcgcagtcgaaaagcttggaaccggaaggtggcgagatgttaaacttcgcgcttttgacaatgcaaagcaccgtacctacgttgaccttaaggacaaatggaagacgctggtacacacagcgagcatctcgccgcagcagcggcgtggcgagccggtgcctcaggagctgctcgaccgggtcctggcggcccaggcctactggtcccagcagcaagccaagctccagcctaagacgccctcgctggctgaggctcgcttgctcacccaataattcgatgatcccggctgatggcctcctctgaggccgttgcagcctttgtataaagattctctctccttgtgaatttaaccaaaggaaagggcatttctttggcaattgtacattttgatgatggaagaagaagatgatccatgaactgagatctgcagtgtctacctactaatggctcacaatttttgcaattgtgattaagaaattcaaggtgctgcttgaccaagctcggctccggcttccagtttttggattctcttgtgaagaagttgctgcctcttttttatacagcagaagctgagagccgaacagtgtatttggcttgaattgcagcctatatagtttcatccactcatacagacggccacaaatgccgtaaaaggagggtagcttcttttgctgagtctagtcttgggagcaaagctcaggaccgaagtctagacttgagacggagcgggggccaaagcggcacccgaatgaaagcttcagattcttttgttcagttaaattcattctttggtagtggagactgacggaaggataggagattaggtggggtggatctttggttctctttttctttcttcttctattattacattattagttgtattaatgtactatattattttaccaatcttgtagttaccctcaaatttgtaattggtgaaattaacaaaattgaaggaaatacatttccaccacttcgctaccctttttaaattattattatgggtctcatc

SEQ ID NO: 84312 - DNA, 5005 bp, Zea Mays
aatcgctgtcctgtttccgcatcgactttattctcttctatcgaggaaatattatgtttttgcagaattggcttaataaattgtccaaaaaaaagttcatattcgttaacattgccaccagtccaccaccttgtgctggcctgctgggcgtgagctggggggcgtctcgacctgaccaatcctaccgccagcctctgcccttgtgctccagtctcctcccgcgaccgttccaaattcctcctcgcgttcgtattccattccacgcggcgacgtcgccgtcgcggccgccgctccgctccccttccttcgcctatacgtaggtagccgctgcggccgcctccccaaaccctaagcctttccctcccacacgcgcttcaccccgcacatcgccggcgatgggatccaaggaccagggcggaggggccgcctcctcgggcggcggcttcttctcgtcgttcgccgccggcatgcgcagctggggcaccgccgtgcacaaatccgtcaacgggctgcttggttatgaaggccttgaagttattaaccccgatggaggcacagatgatgctgaagaagaagctttaaggggccgatggaagcaagaggatcgtgatagctattggaagatgatgcacaagtacataggatcagatgttacatcacttgtgacacttccagtcataatttttgagccaatgacaatgcttcagaaaatggctgagttgatggaatactgtgagttgttagacaaagcagatgaatgtgaggatccatacatgcgtatggtttatgcttctacatgggctgtttcggtatacttcgcgtatcagcgcacatggaagccttttaatccgatccttggagagacttacgagatggttaaccaccagggcatcacatttcttgccgagcaggtaagccatcatcccccaatgggtgctgctcactgtgagaatgagcattttacttatgatatcacgtctaaggactagagtgacacttaaaaaatctggtgtcgtgttggatttggtgccaccactaacaaaggttaacaacctgatatttgggcgtacttgggttgattctcctggagagatggttatgacaaacctgacaaccggagacaaagctgtgttatatttccagccatgtggctggttcggggctggccggtatgaggtagatgggtatgtgtacagtgcagcggaagaacccaaaataatgattacagggaaatggaacaagtcactgagctgccaaccatgtgaccaagaaggcgaccctcttccaggcacggagctgaaggagatctggagagtcgcccctgccccacagaacgacgggtatcagtacacacactttgcgcacaaaataaacagcttcagcacggcacctaagaagctgttggcatctgattcccggctgaggcccgatagatatgccctcgagaagggcgacatgtccaagtctggctcagaaaagagcaggctggaggagcagcagagagccgagaaaaggactcgagaggccaagggcgagcagttcactccgcgatggttcaacgtgacggatgcggtcgcctccacgccgtggggtgacctggaaatttgtgagtacagcggcagatacacggagcaccgggctgccatagacagctccaacagcaccgacgacgacgacgagatagacgtcacttcggtcgagttcgacccatggcagtatggtggtagctcgtcatctccccaatgattctccgcgtccggaagctgccgtgcctgtgctccttgtgtaaaaaaaaaatgcttccaggcggcctggccttcgctggtttgttgtggcaccagcggtttccgtgcccttgtagtagtattatgacctgccccctctttctcttattaacgctacagatttattcaggaagtggtgtgttttgataaaaaaaagaaacatttcctctctctctctctctgacgtcttaactcggatcacgagttgaaatttgggtcggggacaagccatgaacaacgcaaccaccagttgttaactaaccctcttttaaacttcaagcaaccaaagccaagagcagaaatggttttccaaaagtggtcgtcgtcgtcagagatggagtcgtgcggtggaggccaagtcccggagatgccacgcgttcccaagtccgcgaggggcaagagatcggtcaggaagaaggaggcccagagcccggcccagatgtctgcaatcgaccttctcgcaaccgtggcagggaagctgtttgacgagggggcggggtcgctggggaacacgagcgccggtgccccggccttggctgcgttcgcaaaggatgccctggtgaagcaggagcagtgtgatgagcaaatgaagctgttcaagcatgaggcgacggatcaggatagctgcaatgagagtgcaatcctcccccacattgtgctccagcgggtggtgaataatgctaggaatgaggatcctaaggcgaagtctgaggtccaggacaaggaatcctccatgatcagctatacgaaggctgaattgggttgtaattttggtgtgatcgcagacaggtggtcgcctgaatccgtggaatcaggagccttcacaggagatgcagtggcgagactgatgatgacggccccggcaggatttcataagaatgcacccgaaatgtatagtttgcttgattcaatggatgtggatgtcaagccgcctcctttggtcagctctgacagcaccggcgagatgccattgcatggcgataaaattcaccgctcaacctccttaccgagggccccaaagggggtggggttttttgctgtagatagagatgatgacgacgacaagtcctctgggtgcactcatccgagcaccgccactaacaaggatttcacatccaattgtaaagctgagtataatagggtaaggaagctgctcactagtaagcacaggaaagttgctccagcgaggattcacaaatctgatctttcctatagtgatgtcgagcggaagccttctttccggtacaaaaaaatgcatacacgacagaggacacaaaggagtacattcaagcggaggaagctctttgatcgccatttagctctagcatctgaatttggtacagcaaatggaaagggaaacacaaaggttgccggaagaaactccaatgctgtgtctttggaagcaaacaaggggactaattcaatgccattccagaaatcttgtgggtcaaatgattgccatgtgaaacttagaattaagtcttttaacgtgcctgaacttcttgttgaaatcccagacagtgcaactgttggctcactaaagaaaactgttctcgaggcagtgactgcgattcttggaggtggcctacgtgttggtgttcttcaccatggaaagaaagtcagagatgatagtaaaacgttaattcaggctgggattggtcaggatgatatgctggacaaccttggcttttcacttgaacccaactgtactcaaaacccacaagtacaagctcctgaagatgtcagtttcctcgaaaacattgatactaccgaacccctcgcaaggatcacacctgctgactcgtcttctaagcttggtgaagttgacgtatcacaggagcttgcattaaccccattagcaatgaactaccagggcagtgatcatgattccgtgcactcccctggggctgtctcgtcgcgcgataaagactcgcgagccttatttctggttccagctgcagatcccaatgcaggagctgtagttccagcaaataagactaagaggtcaccagagcagggacaccgcagaatcaggcggccgttctctgttgctgaagtagaagcacttgtgctcgcagtcgaaaagcttggaaccggaaggtggcgagatgttaaacttcgcgcttttgacaatgcaaagcaccgtacctacgttgaccttaaggacaaatggaagacgctggtacacacagcgagcatctcgccgcagcagcggcgtggcgagccggtgcctcaggagctgctcgaccgggtcctggcggcccaggcctactggtcccagcagcaagccaagctccagcctaagacgccctcgctggctgaggctcgcttgctcacccaataattcgatgatcccggctgatggcctcctctgaggccgttgcagcctttgtataaagtcagtaagtcccttcacaggaggtttaatgaaaatataatattaggggaaaaaaagaatgcatatataaggtacaagaagcattgaccgatttgttgtaatatctactcaccaccggttattctttaagccaggattctctctccttgtgaatttaaccaaaggaaagggcatttctttggcaattgtacattttgatgatggaagaagaagatgatccatgaactgagatctgcagtgtctacctactaatggctcacaatttttgcaattgtgattaagaaattcaaggtgctgcttgaccaagctcggctccggcttccagtttttggattctcttgtgaagaagttgctgcctcttttttatacagcagaagctgagagccgaacagtgtatttggcttgaattgcagcctatatagtttcatccactcatacagacggccacaaatgccgtaaaaggagggtagcttcttttgctgagtctagtcttgggagcaaagctcaggaccgaagtctagacttgagacggagcgggggccaaagcggcacccgaatgaaagcttcagattcttttgttcagttaaattcattctttggtagtggagactgacggaaggataggagattaggtggggtggatctttggttctctttttctttcttcttctattattacattattagttgtattaatgtactatattattttaccaatcttgtagttaccctcaaatttgtaattggtgaaattaacaaaattgaaggaaatacatttccaccacttcgctaccctttttaaattattattatgggtctcatc

SEQ ID NO: 84313 - DNA, 2024 bp, Zea Mays
tctctctctgacgtcttaactcggatcacgagttgaaatttgggtcggggacaagccatgaacaacgcaaccaccagttgttaactaaccctcttttaaacttcaagcaaccaaagccaagagcagaaatggttttccaaaagtggtcgtcgtcgtcagagatggagtcgtgcggtggaggccaagtcccggagatgccacgcgttcccaagtccgcgaggggcaagagatcggtcaggaagaaggaggcccagagcccggcccagatgtctgcaatcgaccttctcgcaaccgtggcagggaagctgtttgacgagggggcggggtcgctggggaacacgagcgccggtgccccggccttggctgcgttcgcaaaggatgccctggtgaagcaggagcagtgtgatgagcaaatgaagctgttcaagcatgaggcgacggatcaggatagctgcaatgagagtgcaatcctcccccacattgtgctccagcgggtggtgaataatgctaggaatgaggatcctaaggcgaagtctgaggtccaggacaaggaatcctccatgatcagctatacgaaggctgaattgggttgtaattttggtgtgatcgcagacaggtggtcgcctgaatccgtggaatcaggagccttcacaggagatgcagtggcgagactgatgatgacggccccggcaggatttcataagaatgcacccgaaatgtatagtttgcttgattcaatggatgtggatgtcaagccgcctcctttggtcagctctgacagcaccggcgagatgccattgcatggcgataaaattcaccgctcaacctccttaccgagggccccaaagggggtggggttttttgctgtagatagagatgatgacgacgacaagtcctctgggtgcactcatccgagcaccgccactaacaaggatttcacatccaattgtaaagctgagtataatagggtaaggaagctgctcactagtaagcacaggaaagttgctccagcgaggattcacaaatctgatctttcctatagtgatgtcgagcggaagccttctttccggtacaaaaaaatgcatacacgacagaggacacaaaggagtacattcaagcggaggaagctctttgatcgccatttagctctagcatctgaatttggtacagcaaatggaaagggaaacacaaaggttgccggaagaaactccaatgctgtgtctttggaagcaaacaaggggactaattcaatgccattccagaaatcttgtgggtcaaatgattgccatgtgaaacttagaattaagtcttttaacgtgcctgaacttcttgttgaaatcccagacagtgcaactgttggctcactaaagaaaactgttctcgaggcagtgactgcgattcttggaggtggcctacgtgttggtgttcttcaccatggaaagaaagtcagagatgatagtaaaacgttaattcaggctgggattggtcaggatgatatgctggacaaccttggcttttcacttgaacccaactgtactcaaaacccacaagtacaagctcctgaagatgtcagtttcctcgaaaacattgatactaccgaacccctcgcaaggatcacacctgctgactcgtcttctaagcttggtgaagttgacgtatcacaggagcttgcattaaccccattagcaatgaactaccagggcagtgatcatgattccgtgcactcccctggggctgtctcgtcgcgcgataaagactcgcgagccttatttctggttccagctgcagatcccaatgcaggagctgtagttccagcaaataagactaagaggtcaccagagcagggacaccgcagaatcaggcggccgttctctgttgctgaagtagaagcacttgtgctcgcagtcgaaaagcttggaaccggaaggtggcgagatgttaaacttcgcgcttttgacaatgcaaagcaccgtacctacgttgaccttaaggcaatgaactaaccgtgtcgagattgtggtgcg

SEQ ID NO: 84314 - DNA, 753 bp, Zea Mays
gtcatacttccttccactttctatctggagagtcgcccctgccccacagaacgacgggtatcagtacacacactttgcgcacaaaataaacagcttcagcacggcacctaagaagctgttggcatctgattcccggctgaggcccgatagatatgccctcgagaagggcgacatgtccaagtctggctcagaaaagagcaggctggaggagcagcagagagccgagaaaaggactcgagaggccaagggcgagcagttcactccgcgatggttcaacgtgacggatgcggtcgcctccacgccgtggggtgacctggaaatttgtgagtacagcggcagatacacggagcaccgggctgccatagacagctccaacagcaccgacgacgacgacgagatagacgtcacttcggtcgagttcgacccatggcagtatggtggtagctcgtcatctccccaatgattctccgcgtccggaagctgccgtgcctgtgctccttgtgtaaaaaaaaaatgcttccaggcggcctggccttcgctggtttgttgtggcaccagcggtttccgtgcccttgtagtagtattatgacctgccccctctttctcttattaacgctacagatttattcaggaagtggtgtgttttgatagtagtccgcgtactgtcgtgtcgtggatctggcagaagctgcagagttttccttgagccgttggattgtttcatttacgcgcgacagctgaaggtaacgacgc

SEQ ID NO: 84315 - DNA, 1603 bp, Zea Mays
caacgtttttccagcgaagcttcggcggcggccgcggtggccagcctcacatcgcatgtgcgagaggaggaatcggctgcttggttatgaaggccttgaagttattaaccccgatggaggcacagatgatgctgaagaagaagctttaaggggccgatggaagcaagaggatcgtgatagctattggaagatgatgcacaagtacataggatcagatgttacatcacttgtgacacttccagtcataatttttgagccaatgacaatgcttcagaaaatggctgagttgatggaatactgtgagttgttagacaaagcagatgaatgtgaggatccatacatgcgtatggtttatgcttctacatgggctgtttcggtatacttcgcgtatcagcgcacatggaagccttttaatccgatccttggagagacttacgagatggttaaccaccagggcatcacatttcttgccgagcaggtaagccatcatcccccaatgggtgctgctcactgtgagaatgagcattttacttatgatatcacgtctaaggactagagtgacacttaaaaaatctggtgtcgtgttggatttggtgccaccactaacaaaggttaacaacctgatatttgggcgtacttgggttgattctcctggagagatggttatgacaaacctgacaaccggagacaaagctgtgttatatttccagccatgtggctggttcggggctggccggtatgaggtagatgggtatgtgtacagtgcagcggaagaacccaaaataatgattacagggaaatggaacaagtcactgagctgccaaccatgtgaccaagaaggcgaccctcttccaggcacggagctgaaggagatctggagagtcgcccctgccccacagaacgacgggtatcagtacacacactttgcgcacaaaataaacagcttcagcacggcacctaagaagctgttggcatctgattcccggctgaggcccgatagatatgccctcgagaagggcgacatgtccaagtctggctcagaaaagagcaggctggaggagcagcagagagccgagaaaaggactcgagaggccaagggcgagcagttcactccgcgatggttcaacgtgacggatgcggtcgcctccacgccgtggggtgacctggaaatttgtgagtacagcggcagatacacggagcaccgggctgccatagacagctccaacagcaccgacgacgacgacgagatagacgtcacttcggtcgagttcgacccatggcagtatggtggtagctcgtcatctccccaatgattctccgcgtccggaagctgccgtgcctgtgctccttgtgtaaaaaaaaaatgcttccaggcggcctggccttcgctggtttgttgtggcaccagcggtttccgtgcccttgtagtagtattatgacctgccccctctttctcttattaacgctacagatttattcaggaagtggtgtgttttgatagtagtccgcgtactgtcgtgtcgtggatctggcagaagctgcagagttttccttgagccgttggattgtttcatttacgcgcgacagctgaaggtaacgacgc

SEQ ID NO: 84316 - DNA, 259 bp, Zea Mays
gtcaaaatttatctatagtctgcttttttatctacattgtcaggttgctgaattgtttatgctttggtggtaaaaataagcgaggtaacttctaaagttacgcatgtataaaaggaggccctcaggagcatcaacctcgactactatgcttgctggccactaagaaccctggcacccagcccagcccgtcggagttggaggtttctcaaatcttgaagctgtggcctgcgacattagatcaccacaatttcgattgtac

SEQ ID NO: 84317 - DNA, 753 bp, Zea Mays
ggttgcagccgactccatgggatcgccggatgtggacgaacgaacgtcatatcacatggacgcccatttcttgccactacttgctcggttgttcttttatctcggaacgcggtaggggttgcggattgggagcaaaggaggagagggagtactgggccgccgccggctgcgaacgcggaggaggcagcttccaccaatcagtgcaccctcatcctcaaaggctggtgagaagcttaccatcgatcaagaattcgagcagtatttttcgaacctgatgctgtaggatcgaatggatagttttgtgaccaaaaaaatggcgctagctgggacctccaaacatggtttgcttgctgagcgaggtgccgaaccgtggctattagtattattggagccatcggtttatatgtacaccgaatcctatcactgaatgtatgtatctgtggtatgtgtatctttttcagcttgaccatcagatgttagcatcatggtgtatggtaatgtgtgcagataagaacatgtctaagcaatatagtaaatagtgtattccttgtatacttatgttccagtgtttctgaatagatgggtgagtagacggaagcgactactagacaccgtgaacgaccatcagtgttcacacacacaccgttcacacgcgcgcacggatccaaacggcggtgctacacgtgcgtatcgcaggcgcgtgcagccagccccggcacctggatctccttggcacccaccggcagattttcc

SEQ ID NO: 84318 - DNA, 788 bp, Zea Mays
atagagaataaggttgcagccgactccatgggatcgccggatgtggacgaacgaacgtcatatcacatggacgcccatttcttgccactacttgctcggttgttcttttatctcggaacgcggtaggggttgcggattgggagcaaaggaggagagggagtactgggccgccgccggctgcgaacgcggaggaggcagcttccaccaatcagtgcaccctcatcctcaaaggctggccagagccagaccggccatcacagtgagaagcttaccatcgatcaagaattcgagcagtatttttcgaacctgatgctgtaggatcgaatggatagttttgtgaccaaaaaaatggcgctagctgggacctccaaacatggtttgcttgctgagcgaggtgccgaaccgtggctattagtattattggagccatcggtttatatgtacaccgaatcctatcactgaatgtatgtatctgtggtatgtgtatctttttcagcttgaccatcagatgttagcatcatggtgtatggtaatgtgtgcagataagaacatgtctaagcaatatagtaaatagtgtattccttgtatacttatgttccagtgtttctgaatagatgggtgagtagacggaagcgactactagacaccgtgaacgaccatcagtgttcacacacacaccgttcacacgcgcgcacggatccaaacggcggtgctacacgtgcgtatcgcaggcgcgtgcagccagccccggcacctggatctccttggcacccaccggcagattttcc

SEQ ID NO: 84319 - DNA, 826 bp, Zea Mays
tctgactgaggaatggggttggcgtatagagaataaggttgcagccgactccatgggatcgccggatgtggacgaacgaacgtcatatcacatggacgcccatttcttgccactacttgctcggttgttcttttatctcggaacgcggtaggggttgcggattgggagcaaaggaggagagggagtactgggccgccgccggctgcgaacgcggaggaggcagcttccaccaatcagtgcaccctcatcctcaaaggctgattttgccaacaggccagagccagaccggccatcacagtgagaagcttaccatcgatcaagaattcgagcagtatttttcgaacctgatgctgtaggatcgaatggatagttttgtgaccaaaaaaatggcgctagctgggacctccaaacatggtttgcttgctgagcgaggtgccgaaccgtggctattagtattattggagccatcggtttatatgtacaccgaatcctatcactgaatgtatgtatctgtggtatgtgtatctttttcagcttgaccatcagatgttagcatcatggtgtatggtaatgtgtgcagataagaacatgtctaagcaatatagtaaatagtgtattccttgtatacttatgttccagtgtttctgaatagatgggtgagtagacggaagcgactactagacaccgtgaacgaccatcagtgttcacacacacaccgttcacacgcgcgcacggatccaaacggcggtgctacacgtgcgtatcgcaggcgcgtgcagccagccccggcacctggatctccttggcacccaccggcagattttcc

SEQ ID NO: 84320 - DNA, 1270 bp, Zea Mays
cgcctttctagctcctgcagtcctgctgttagtgctgttcccctctctcttccccgtcctgcaggctccaggcgctgctgctctcgtcctccgctagcgagcgaatcgctgacgctggcccgacgccgcggcgggaggtatctcgctttcgatcaggattttggttggggcgtcgttctccggtgcttatctcatttctatttatcggtgcctcgggttcacggccaaattcgctgctgcgtggggctttggagattggagccgattccttaaagtggcggtggcagcgtctggtgggaaccatgagcttcgtgttccgaggaagcagggccgacatcgaggccggtggcttcacagggttcgcccccgagcgccgcaccatgcgaattcatgcagggagcaggccggtgaatagcaattccttggtttttcttctaactgtttttgttttgttcatggtactgaactcacaccagatgtctcccaatcttttgctttggatagtcttgggagccttcctaatggccacgagccttagaatgtatgccacgtgccagcagcttgctcatgctgcagctgccaacagttttcttggccacactgagctgcgtgtgcatgtaccgccgaccattgcccttgctacgagaggccagttacagagccttagacttcaactggctcttcttgaccgtgaatttgatgatttagattatgacactctgagagcactggatgctgacaatagcctgcatgttccttctatgagtgaagaagaaataaattctcttcctgtcttcaaatataaagtccaggcacagcagggaaatgcccctgcccgaaaaagtgatgaggcatcgcagctatcggtttcttcaactggctccggcaatgagtttcacgtaaactgcatcgacccatggctgcgccaacagggtacatgcccaatctgcaagcaccaggtcagtgatgggtggcatgccacaggcaacggtgaagaggatgcttcatacatggtgtaagtagctgcccaggagtaggccataggtaactagtagctgctaacagaatccgtggaacgctgttttggaggtgacggtttggacttgcaatctagggatgtggtctaatccctgtctaccctaacaaaaaaccgagtgtggaatcagctgtccagtgcactgagttcttgtacaactcatgtttatttctctcattctctgtgatgttgatgcataaaaaggttgctgataatcttcttacccgtcctttc

SEQ ID NO: 84321 - DNA, 1246 bp, Zea Mays
cgcctttctagctcctgcagtcctgctgttagtgctgttcccctctctcttccccgtcctgcaggctccaggcgctgctgctctcgtcctccgctagcgagcgaatcgctgacgctggcccgacgccgcggcgggaggtatctcgctttcgatcaggtgcgcgtcctactctaactcccagtcgccttcctcatctggctttcgattcggtccggtctgcgcccaacccgtgcgctgggcgaagcttccggaagcttcagggtttatcccggcatttcgttttcagcgacggcgcgcccggatcgcttgatctgacggagtttctatctaggattttggttggggcgtcgttctccggtgcttatctcatttctatttatcggtgcctcgggttcacggccaaattcgctgctgcgtggggctttggagattggagccgattccttaaagtggcggtggcagcgtctggtgggaaccatgagcttcgtgttccgaggaagcagggccgacatcgaggccggtggcttcacagggttcgcccccgagcgccgcaccatgattatgacactctgagagcactggatgctgacaatagcctgcatgttccttctatgagtgaagaagaaataaattctcttcctgtcttcaaatataaagtccaggcacagcagggaaatgcccctgcccgaaaaagtgatgaggcatcgcagctatcggtttcttcaactggctccggcaatgagaaaaagcaggatggtttaaaagcagatggaactggcaaaactccacaggatgaactaacatgtagtgtttgcttagagcaagtcatggtgggtgatctgttgagaagcctaccatgcttgcatcagtttcacgtaaactgcatcgacccatggctgcgccaacagggtacatgcccaatctgcaagcaccaggtcagtgatgggtggcatgccacaggcaacggtgaagaggatgcttcatacatggtgtaagtagctgcccaggagtaggccataggtaactagtagctgctaacagaatccgtggaacgctgttttggaggtgacggtttggacttgcaatctagggatgtggtctaatccctgtctaccctaacaaaaaaccgagtgtggaatcagctgtccagtgcactgagttcttgtacaactcatgtttatttctctcattctctgtgatgttgatgcataaaaaggttgctgataatcttcttacccgtcctttc

SEQ ID NO: 84322 - DNA, 1393 bp, Zea Mays
agaaaacccacgcctttctagctcctgcagtcctgctgttagtgctgttcccctctctcttccccgtcctgcaggctccaggcgctgctgctctcgtcctccgctagcgagcgaatcgctgacgctggcccgacgccgcggcgggaggtatctcgctttcgatcaggattttggttggggcgtcgttctccggtgcttatctcatttctatttatcggtgcctcgggttcacggccaaattcgctgctgcgtggggctttggagattggagccgattccttaaagtggcggtggcagcgtctggtgggaaccatgagcttcgtgttccgaggaagcagggccgacatcgaggccggtggcttcacagggttcgcccccgagcgccgcaccatgggagcaggccggtgaatagcaattccttggtttttcttctaactgtttttgttttgttcatggtactgaactcacaccagatgtctcccaatcttttgctttggatagtcttgggagccttcctaatggccacgagccttagaatgtatgccacgtgccagcagcttgctcatgctgcagctgccaacagttttcttggccacactgagctgcgtgtgcatgtaccgccgaccattgcccttgctacgagaggccagttacagagccttagacttcaactggctcttcttgaccgtgaatttgatgatttagattatgacactctgagagcactggatgctgacaatagcctgcatgttccttctatgagtgaagaagaaataaattctcttcctgtcttcaaatataaagtccaggcacagcagggaaatgcccctgcccgaaaaagtgatgaggcatcgcagctatcggtttcttcaactggctccggcaatgagaaaaagcaggatggtttaaaagcagatggaactggcaaaactccacaggatgaactaacatgtagtgtttgcttagagcaagtcatggtgggtgatctgttgagaagcctaccatgcttgcatcagtttcacgtaaactgcatcgacccatggctgcgccaacagggtacatgcccaatctgcaagcaccaggtcagtgatgggtggcatgccacaggcaacggtgaagaggatgcttcatacatggtgtaagtagctgcccaggagtaggccataggtaactagtagctgctaacagaatccgtggaacgctgttttggaggtgacggtttggacttgcaatctagggatgtggtctaatccctgtctaccctaacaaaaaaccgagtgtggaatcagctgtccagtgcactgagttcttgtacaactcatgtttatttctctcattctctgtgatgttgatgcataaaaaggttgctgataatcttcttacccgtcctttc

SEQ ID NO: 84323 - DNA, 213 bp, Zea Mays
tgatttggggatttggctcgggttgctactgaactgcgtgtccctgtaagaaacacacacgtttatgcatttgtggaacatgggactgaccttgggagttccaaggatgtcaaagggaaccctacagagtttttcaggcgtgttggtcatggatcttcatatggtgttggtgtcaagcttgggttggtaaggggagagtacattgtagatctt

SEQ ID NO: 84324 - DNA, 3014 bp, Zea Mays
cacacgcacatgaggtattgttgcttttgtctttgtgttcaaagaccaataattttatttatataatctgagcatccaaatagttatatacatattataatctagattatataatttataaattgaaacaaacatgcgattaattcaataaaggcatcaaaacagcaccagaaaagaaaaaaaaagaaaaaagaaaaatgctcataaagtgaagcgtccaaaccccaactgcccaacagggcttcctttcgcaactcgcgagtcgcgagtagcacgccatcacggcctgacgggccgccgtgcgaggtagccacgccacgccgccgcgcccactgcccagcgcagctaaaccctcaatagaaaactcgaaaactgacccaaccggccaaccctgacccaaggaggcgaggaagacgcacctcctccgcccctcctcgccctccgccctcgctcccccacgccgacgccgacacctatcctcaccgtatccgcggtcgcaaatggcgctaacctcccaaggcatcaccctccgttccccgccagcggggccccgcggccacggcgggaggcggtcctcttccgtgcccaccgccgcgaccccgcgcgtcttggggcagccccacgcggggcaagccttatccatctcgcccgtcaggtatgaacccgccgctcgcccaccacggggaggctccgccgccgccgccatacgtgccgccgcctcggccggcgcgcagcccggcagcgacccggtctctgctgagcccagaatcgagctccccacgatattttccgtcttctccgagaccgctaagaccggcgctgccttcttcattgcctcgtcgggcgcggccttcctcctcggctcgtttggggggttcggcggcggtgctgggggtctcttcggcggcggcggtggtggagggggtggatggggcgcggggggtggtggtgccggtggcggagggggtggagacttctggtaccggctcatctcttccggcgcggcgcacgcggacgacaagtcatcgggggattgggacgcgcacgggctccccgtcaacatgacggtgccgctcacgaagctgagcgggctgaagaggtataagctgtctgagctcaagttctttgatcgggcagctgccagcggtggcgcctatacggggccagaggattccttcttcgaaatggtgacactgcagcctggtggcgtgtacaccaagtcgcagctgttgaaggagctcgagacactcgtctcctgtggcatgtttgagcgggttgatctggaggtgaagcccaagccagataacacaattgggctcacagtctcctttgtggagagtgtgtggagttctgcaaagcagttcaagtgcatcaatgtggggcttatgtcacagtcagggcaggttgacttcgaccaggacatgacagagagggagaaaatggattacctccgtaagcaggaacgtgattaccagcagcgtgtacgaggtgccaatccctgcatcttgccagaaaatgtacgtggagaggtgctgggaatgatgaagaagcaggagaaagtgagtgccaggatgctgcagaagatcagagatcatgtccagaaatggtaccacaatgagggtttcgtatgcgcacaggtggttaactttggaaaccttaacaccaatgaggttgtgtgtgaggtggtcgagggtgacatcaccaaggtggagtaccagttccaggataagcttggaaatattgttgaaggaaatacccagcttgcgatcatagaccgagagctgccgcagcagcttcgacctggccacatctttaacattggagcagggaaacaggctctgaagaatataaattcacttgctttgttttccaacatagaagttaatccacgtcctgatgagacaaaggaagggggcatagtagttgaaattaagcttaaggaactggaacccaagtcagctgaagtaagcacagaatggagtattgtacctgggcgtgaaggccgaccaactttggcatccatacaacccggaggaactgtgtcatttgagcaccggaacatctatggtcttaatagatctattgttggttctgttacatccagcaacctgctgaatcctcaggatgatctttcattcaagcttgagtatgtccatccttatttggatggtgtcgatgatcgtagtaaaaaccgcacattcaaaactagctgcttcaacaccaggaaattgagtcctgtctttgttgctggtcccaacatggatgaggctccacctgtttggatcgacagagttggatttaaagccaacataacagagagcttcacacgtcaaagcaaattcacatatggccttgtggttgaagagattacaacacgtgatgaaactaatactgtctgtacccatggttctcgagcaatgcctagcggcggtctgaacatggatggacctcccacaaccctcagtggtactggagttgaccgaatggcatttcttcaggctaatataacccgtgacaatactgagtttgtgaatggtgcaattgttggagacagatacattttccagttagaccaaggtcttggcattggaagcaaaaacccgttcttcaaccgtcatcaacttactctgaccaagttcatcaatttaaataagcaagagaaaggtgtcggcaagccactaccagctgttttggttcttcatggtcattatgctggttgtgtgggtgatttgccgagctatgacgcctttgcacttggagggccttattctgttaggggctttagtaatggtgaactgggcgcttctaggaatattcttgaggttgctactgaactgcgtgtccctgtaagaaacacacacgtttatgcatttgtggaacatgggactgaccttgggagttccaaggatgtcaaagggaaccctacagagtttttcaggcgtgttggtcatggatcttcatatggtgttggtgtcaagcttgggttggtaaggggagagtacattgtagatctt

SEQ ID NO: 84325 - DNA, 3010 bp, Zea Mays
cacacgcacatgaggtattgttgcttttgtctttgtgttcaaagaccaataattttatttatataatctgagcatccaaatagttatatacatattataatctagattatataatttataaattgaaacaaacatgcgattaattcaataaaggcatcaaaacagcaccagaaaagaaaaaaaaagaaaaaagaaaaatgctcataaagtgaagcgtccaaaccccaactgcccaacagggcttcctttcgcaactcgcgagtcgcgagtagcacgccatcacggcctgacgggccgccgtgcgaggtagccacgccacgccgccgcgcccactgcccagcgcagctaaaccctcaatagaaaactcgaaaactgacccaaccggccaaccctgacccaaggaggcgaggaagacgcacctcctccgcccctcctcgccctccgccctcgctcccccacgccgacgccgacacctatcctcaccgtatccgcggtcgcaaatggcgctaacctcccaaggcatcaccctccgttccccgccagcggggccccgcggccacggcgggaggcggtcctcttccgtgcccaccgccgcgaccccgcgcgtcttggggcagccccacgcggggcaagccttatccatctcgcccgtcaggtatgaacccgccgctcgcccaccacggggaggctccgccgccgccgccatacgtgccgccgcctcggccggcgcgcagcccggcagcgacccggtctctgctgagcccagaatcgagctccccacgatattttccgtcttctccgagaccgctaagaccggcgctgccttcttcattgcctcgtcgggcgcggccttcctcctcggctcgtttggggggttcggcggcggtgctgggggtctcttcggcggcggcggtggtggagggggtggatggggcgcggggggtggtggtgccggtggcggagggggtggagacttctggtaccggctcatctcttccggcgcggcgcacgcggacgacaagtcatcgggggattgggacgcgcacgggctccccgtcaacatgacggtgccgctcacgaagctgagcgggctgaagaggtataagctgtctgagctcaagttctttgatcgggcagctgccagcggtggcgcctatacggggccagaggattccttcttcgaaatggtgacactgcagcctggtggcgtgtacaccaagtcgcagctgttgaaggagctcgagacactcgtctcctgtggcatgtttgagcgggttgatctggaggtgaagcccaagccagataacacaattgggctcacagtctcctttgtggagagtgtgtggagttctgcaaagcagttcaagtgcatcaatgtggggcttatgtcacagtcagggcaggttgacttcgaccaggacatgacagagagggagaaaatggattacctccgtaagcaggaacgtgattaccagcagcgtgtacgaggtgccaatccctgcatcttgccagaaaatgtacgtggagaggtgctgggaatgatgaagaagcaggagaaagtgagtgccaggatgctgcagaagatcagagatcatgtccagaaatggtaccacaatgagggtttcgtatgcgcacaggtggttaactttggaaaccttaacaccaatgaggttgtgtgtgaggtggtcgagggtgacatcaccaaggtggagtaccagttccaggataagcttggaaatattgttgaaggaaatacccagcttgcgatcatagaccgagagctgccgcagcagcttcgacctggccacatctttaacattggagcagggaaacaggctctgaagaatataaattcacttgctttgttttccaacatagaagttaatccacgtcctgatgagacaaaggaagggggcatagtagttgaaattaagcttaaggaactggaacccaagtcagctgaagtaagcacagaatggagtattgtacctgggcgtgaaggccgaccaactttggcatccatacaacccggaggaactgtgtcatttgagcaccggaacatctatggtcttaatagatctattgttggttctgttacatccagcaacctgctgaatcctcaggatgatctttcattcaagcttgagtatgtccatccttatttggatggtgtcgatgatcgtagtaaaaaccgcacattcaaaactagctgcttcaacaccaggaaattgagtcctgtctttgttgctggtcccaacatggatgaggctccacctgtttggatcgacagagttggatttaaagccaacataacagagagcttcacacgtcaaagcaaattcacatatggccttgtggttgaagagattacaacacgtgatgaaactaatactgtctgtacccatggttctcgagcaatgcctagcggcggtctgaacatggatggacctcccacaaccctcagtggtactggagttgaccgaatggcatttcttcaggctaatataacccgtgacaatactgagtttgtgaatggtgcaattgttggagacagatacattttccagaccaaggtcttggcattggaagcaaaaacccgttcttcaaccgtcatcaacttactctgaccaagttcatcaatttaaataagcaagagaaaggtgtcggcaagccactaccagctgttttggttcttcatggtcattatgctggttgtgtgggtgatttgccgagctatgacgcctttgcacttggagggccttattctgttaggggctttagtaatggtgaactgggcgcttctaggaatattcttgaggttgctactgaactgcgtgtccctgtaagaaacacacacgtttatgcatttgtggaacatgggactgaccttgggagttccaaggatgtcaaagggaaccctacagagtttttcaggcgtgttggtcatggatcttcatatggtgttggtgtcaagcttgggttggtaaggggagagtacattgtagatctt

SEQ ID NO: 84326 - DNA, 951 bp, Zea Mays
atggcgaaaagctggttggacatcggccttgcggtttttgtagccatcccgtctttagagggcgggcaggtgttcgtacagactgcatttaatgcacatgtcttggggtttcgagaagtcggtcgaggctgggctcataccgggacctcgcctgagatgccctcgggtgaggcggacacgcgttctccgcccaagggtgcccttggtaggttgctgatccacgtagatgtagcattcaccggagtggatgtttgctgcaagaagaaagtggagagggcaaataaggctctcctgtggatgcatcaagacaacagcatgatggcgccaaacttgaggtcagcattgggcaagggcaactaccagagcagagaaaccaaataatataccatacctaactgttcgcctggaagttactcttcatgacaggaaaaattctgaacatcaaggagtttctgtttgcaagtttcactatttaaaagcaggtcgtgtcacttgtgcggagttaaggactggaccgaggcagtattatcagtttctggatatggattgttgtgctagtttcgatgcaggtgtcaaacaacaattaggctgaagaggtgagcaacatttaaggaggtgctgatgcttgctgataacctatgaaaaggcgttgctgtagctgactacttggtttgtggtcagataattctggacgtgaattttgatatgttggccagattagctgccaaataggtatttcgtatctcttgatttatgggattcacattaactgattcttggttgccattcacttgtcttggttatggtgctacatgggcgtgcaaagcatgaaggcaatcgtttgactttgcttggtaatgcgttttgcgcacaacaatctgatcaaggcaaaaatggtaatggtttcctagcaccgtttggaatataggattgataaaatgcaggaatagg

SEQ ID NO: 84327 - DNA, 2577 bp, Zea Mays
ttatgatttacttgctctagtgcaatgttgtagcgacaagtcaatttattctgcaaggaatgacaagtacatatgcacaattagctttttaggttatttacatgaaaagttggtgtcaatgttttgacccgagggtcctaaccaacaagtgaatttatgctgcgtgccccggtccagatggatgatgcaagaagacacaagatttacccttgttcgggcaagagaaggccctacttccagcgaggggggatgagacttatattatcttgtacctaggtgctcatagtagggggtacaagctggtcgagagagggagtgagtcccaagtctccgagagattgaagcgagtgccaatatcgggagtgaagagcaaacagtgaagtgtagtgtgtttctcctctccccctttggagactctagactcctccttttatagtcgcaaaggggaagccatgagttacaagggttgttgcgctgctcttgtgataagaggatacgagtccgagcccttgtagcagtatggtcgacgggatgtcccttgtcctgggcgttgtatttgatcaggagaaggatgtttgatccctgtaacctgcgctttgatcgtatagatgcgtacccaagcctgtcttgtgaggggcgcagatgagacgtttataagtttgtcgagtcgtagtggttgaaatgtcactcgacatggtaaaaagtgcgtggtaatttggcccgtgcgttatccgggatggcgaaaagctggttggacatcggccttgcggtttttgtagccatcccgtctttagaggggttcgtaggagggtcggcggtggcgtgcgtatctctgttggtgttgttggccgaggctgggctcaggcgagacagagatttcccccgaggccgagaccgggtcggcatacagatacatagtcatgactagagtgattggaatagcagtcggagttgtctcctgcgggattcacgggagggttggtggcatttaatgcgctctgctagggtagttggccgaggccgagctcgggtgaggcggagttttctcttgaggctcggagttgtttgaaacgataaccggagtgggggaacaatgcatcgtattcgcgtccgtgcattgcgggtgctgaaagtagattagactacggtcgcgtcgtcctttgttgactttggcgccctcagcgggcaggtgttcgtacagactgcatttaatgcacatgtcttggggtttcgagaagtcggtcgaggctgggctcataccgggacctcgcctgagatgccctcgggtgaggcggacacgcgttctccgcccaagggtgcccttggtaggttgctgatccacgtagatgtagcattcaccggaggtttggcttaggcaaagcgtagttgcgcagtcggcacgcggagcctcggacgaatcatggcttggtcctgcgtgaccttggaggtcagggcgtgtttgccctgtgatttcctggtactcgggtgtcttggtacgattagggatgtaatctgggtacccttaattatggtacccgatagttgggttcgcagaggcacaaagaactagttctacacaatagatctcataatttttctggaagtgccacatgaagaaagtctagcagtgtgccagctggaactgggaagtttgttagtttctctattgaatatttaattatctggaaaaataaagacctatttttgcattgcctagtcattctgttaatgattattaggccatgtttggttcctttagtcactagactaaactttagtcgctaaagtaccccgtttggttccagtgactaaaccggactaaagaacattaattgctgtgaataatgactgtattgctcctattaattagtggatgtttgctgcaagaagaaagtggagagggcaaataaggctctcctgtggatgcatcaagacaacagcatgatggcgccaaacttgaggtcagcattgggcaagggcaactaccagagcagagaaaccaaataatataccatacctaactgttcgcctggaagttactcttcatgacaggaaaaattctgaacatcaaggagtttctgtttgcaagtttcactatttaaaagcaggtcgtgtcacttgtgcggagttaaggactggaccgaggcagtattatcagtttctggatatggattgttgtgctagtttcgatgcaggtgtcaaacaacaattaggctgaagaggtgagcaacatttaaggaggtgctgatgcttgctgataacctatgaaaaggcgttgctgtagctgactacttggtttgtggtcagataattctggacgtgaattttgatatgttggccagattagctgccaaataggtatttcgtatctcttgatttatgggattcacattaactgattcttggttgccattcacttgtcttggttatggtgctacatgggcgtgcaaagcatgaaggcaatcgtttgactttgcttggtaatgcgttttgcgcacaacaatctgatcaaggcaaaaatggtaatggtttcctagcaccgtttggaatataggattgataaaatgcaggaatagg

SEQ ID NO: 84328 - DNA, 1150 bp, Zea Mays
acatcgccgttgcagacccaccagggtaggtcaccacgaacgaacgcgtcgcgtatacggcgcaccaccatggcactagcgggaaaatttcagtgaccgaataaacgaaacacctcagtcgagacgcgagagtttatctacctatctggtgtccgctttaatttctttcctcggtccctccaccccccttcgccctttccgacgcgccgcccgaaaccctagccccactgattctctccagcccagcccagccaaggggaggggatgtcggcggcgccagcggcgggagggcagggtggcgggggcattgacgccgcgctcctcgacgacatcatccgccgcctgctcgaggtgcggaccgcgcgcccagggaagcaggtgcagctctctgagtcggagatccgccagctgtgcaccgtctcccgcgccatcttcctcagccagcccaacctcctcgagctcgaggcgcccatcaagatctgcggctctcctgtggatgcatcaagacaacagcatgatggcgccaaacttgaggtcagcattgggcaagggcaactaccagagcagagaaaccaaataatataccatacctaactgttcgcctggaagttactcttcatgacaggaaaaattctgaacatcaaggagtttctgtttgcaagtttcactatttaaaagcaggtcgtgtcacttgtgcggagttaaggactggaccgaggcagtattatcagtttctggatatggattgttgtgctagtttcgatgcaggtgtcaaacaacaattaggctgaagaggtgagcaacatttaaggaggtgctgatgcttgctgataacctatgaaaaggcgttgctgtagctgactacttggtttgtggtcagataattctggacgtgaattttgatatgttggccagattagctgccaaataggtatttcgtatctcttgatttatgggattcacattaactgattcttggttgccattcacttgtcttggttatggtgctacatgggcgtgcaaagcatgaaggcaatcgtttgactttgcttggtaatgcgttttgcgcacaacaatctgatcaaggcaaaaatggtaatggtttcctagcaccgtttggaatataggattgataaaatgcaggaatagg

SEQ ID NO: 84329 - DNA, 1223 bp, Zea Mays
tatcatctctaccactgtaatgatgttggtgttagattgctaggtggtggtttatcaggaatcactgcagcttctgcgacgtatccactggacttggtgcggacacgtcttgctgcccagacaaatactgcctactacaggggcatatctcatgctctttatgcgatctgcagagatgagggtgtccgtggattgtacaagggtcttggtgccactttactgggagtgggccccagcattgcagtaagcttctctgtgtatgaaactttacgttcccattggcaaatagagaggccatgtgattcccctgttctgatcagtttggcttgtggaagtctttcaggaattgcatcgtctacttttacattcccattggatcttgtgagacgtcgcatgcaattggaaggagcagccgggagggctcgcgtctaccagacaggactttttggaaccttcggacatattgtccgtacggagggttttagaggcatgtatagaggaatcttgcctgagtactgcaaagtggttcctggtgtcggcatcgtatttatgacatatgagatgcttaaggccatcctcacaggactggaatctgatgattagatatctgcgaggtcatgctacgcaattttgatacatggtgtcagaacaacatttgaggctgattagactgggagaaatatgagcatgtagcatacgttagggtttaggatgtgctaaggtttgcagtttgtgttatatggttacagatgtttatgtagtgcaccgtgaacgatgccacaggtcttccaaaatgaatatttttttggcatcaccatcattttgtgtatcttcaataacattgtaatggtacatgaagctgttgtctttagcctgatgatctttataactgtgagatatggtctccaattttaccagtgttatagcaaggttgatcaatggtggcaagagaactgtgaatagccttgacttgatatatgtttatcctgatatgaccatgggtctgtttcttgcatatcagtttagcaacttctcgttgcaggtgttcgtttatctccattttgtgagcgagaacccaatggctagtaatggaccacttcattttgttctcttttttttcttgctttggaaaccaaattgtttattttgttgagttcagaattgatccaatgacccaagagaaggcagaactttcatttgttgttagaatgatattcatatgc

SEQ ID NO: 84330 - DNA, 2899 bp, Zea Mays
ccgaggccccaggacaggcactgaggtctgaggcacgcacatacataccacgcgcgctccagaggacttgtgcgctcgtcaggccacaaccgcagcgcggcacaagaccaacggggaagaggaaggcagtgagctgttccgcacccgccgcccgcccgtctcatctgatgaggaaggtctgcccgaacctcgagcgcgacgacgcgctggacacggtgctggaggtgcccatccccgaggagatgttctccggcggcggcggcggcggcggcggctcctgcgggttcaggttcggctgcaccagcgtcaaggcgtggatgcggtcgcacgccgctgaccggtgcggcgcgggcgagccgtgctccatgagccgcggggagctgcagctcatgctaggcgtcatcggcgcgccgctcgtcccgctgcccgtcgccgtctgctgccgcgccgagcagtcgccctgctccgtcctctgcgagcagctcaagaccggtccaatcgagtcgtcgtccgccaagtacatcgtgcagcagtacgtcgcggcgtcgggcggggagcgggcgctggacagggtcaagagcatgtacgcgatgggcaaggtgcggatgacggccgcggagcagctcaacggcagcgacgccgccggcggccactgcggaggagccaccggaaaggggaaccgcggcgggaggaggaagggccgcggcggcgaggtcggcgggttcgtgctgtggcagaagaggccggagctgtggtgcctagagctcgtcgtgtccggctgcaagatcagcgccggcagcgacggaaaggtcgcgtggcgccagacgccgtggcaccagtcccacgcttcccgcggccccccgcgcccgctccgccgctcgctccaggtgcgtagccgtagcgtagcgtacgcccgtggtttcgtgtacggtttccagctagctccgcactgtttcacgcggtgtgctctcgagtgccttccgtacgcacgcggccgtagcccgtaaggcacgtagccacctaggacttgtcgaatgtgtggtcgcgtagcattttgcttgaaaacgtagcacttaactcatttcaaagttcaaacccccagcgataaaaagcctgtccaactcacagtcagagaagccgatcttaatctgacgtactgagcagagcagagcaaccccattgctagagtctagagttgctggacatgatgccacagcacgtagcatgtacacacccacggtccacccgattcccagtgacagtgacaggacaaattcatcatcacgtaggcaatagatacctttgtcagggcatgtcgatctccgctgcatatactgtcggcaggacagtgcagatagatcgaacgcggaacgcccacgcggactagagacatcatgaggccttttcagcactcgccgatcgccgaaatcatgtcaccgacgccggagctgcgatccgcagccgaggtccaggccagtgtcgggggggataaggccgaccaagtggtacacagactcatcatcattggccgtggcccgtggcaacattctgtcgcctccctcccgggaggggtctgtactctgtaattagcggaacagcagcggcgcggaggatgcacacgcgtaggcgcttagcgcggggcagcgtgattaatagatcggactcggccggccggccggccctggtcctttagcactccaacgtgcggccatgtgcgcggacgcggccggacacaacacgtgagagtgagacccttcgcgcaccacatcaatcggttggtggtgccggacagcagcaggcggtctacccgactctccccgctaatcgcgctgcaccaacctgatggtagtaaacagcaacgtacgggcccaggggaccgacacggcacgctgaccgatcgtttacatggtagtatctactgacatgcagggcctcgacccgcagctgacggcgagcctgttcgcggactcggtgtgcatcggcgagcggagcgtcgacggcgaggactgcttcgtgctcaaggtggaggcggaggcgtccagcctgcgcgcgcgcaacagcggcagcgtcgagatcgtccggcacacgctgtggggctacttcagccagcgcacgggcctgctggtgcagctcgaggactcgcacctgctgcagatcaggtccggcggcggcggcggcggcgggagcatcttctgggagaccaccgtggagtcccgcctcggcgactaccgcgccgtcgacggcgtgaacatcgcccacgccgggcgcaccgccgtctcgctcgtcaggttcggcgactgccagcaggacggcagcagcgccaggacgcgcatggaggagacgtgggacatcgaggaggtggacttcaacatctggggcctgtccatggactgcttcttgccgcccagcgacctccgggaggggggcaaggagagccaggacgtcgccgtcgctgtcgccaaggccgatgcgcgacccccgccgataaggatacctgcggtggccgtgcgcgtcgggccctcgcaggtggctgccgtcagcatggacgactcggactcgctcatcgcgaggccatgactactcctgccgtacccgtacgtacgtgcttacagtgctgagtgaagagcaagtatacgtggcacttgttagttgttactacaggatcatacttgtcgcaagatctgtaaatatattgcagtttgagatttttcccccttcgagaggtgtcaggtgtggatttacctcagctagaattgaggccagaagcagtagtgagtaatccgaactagatgttcggcgtatagctgcattgtaaattctaatgaactagtcctgtaaatctgaaagaaaatcccagttcttctgcccagtcacaatactgaagtacgtaatttatttt

SEQ ID NO: 84331 - DNA, 2266 bp, Zea Mays
atgagatgctaggtcacacttgcaattgattctgatatagggcaatgatctaaaggttgaaaatatttttggagcacaccaaatccctgttctcttttgaggttatctatagcccttataaaacaaaacccactagcatgcatttatgatattctatctcttcatgcaagctatccacaccatcccacatttgttgttgtccacttgtcactacaagtacaaattccatccgtccaagtccaatgtcatcccatctcttagattcacaagcccagtcaatggaaacgaaaagtctgaacagttggattgggatgcacgtattaacatcatacttggagctgcaaaaggcttgtcttacttgcatcacgattgttcgcctcgaataatacatcgtgatatcaagtcgagcaacatcttgcttgacggcagttttgaggcccgcgtatcagactttggacttgcaaagcttttagaggacgaagaatcccatatcactacaatagttgcaggaacatttggttatcttgcgccagagtatatgcagtttggcagagccaccgagaagaccgatgtctacagttttggggttctggtacttgaaatactcagcggaaagcggcctacggatgcatccttcattgagaagggattaaacattgttggatggttaaattttctggctggcgagaaccgggagagggaaatcgtcgatctgaattgtgaaggagtgcacaccgagaccttggacgctctgctctctctcgccaagcagtgtgtcagctctttgccggaggagcggccgacgatgcacagggtggtacagatgctggagtcggatgtagttacgccgtgccctagcgacttctacgattcagagtagcctcctggacggacaagccacagtggtgccgctagtttcccgtggaggcgcattcctttattctttgcagatattgtgtaaatgcattgccgcggtgtttgtttggtctcctccaatcggctggttcaacgggtgacatttttgcgtctgtgtttatctgtcatgctacaagttggctatgtgctgatttaataagagagaacttaccagtgtgtgtttaaaacattgatcttttggggttgtttggttccgaaggttaaattttagtctcatcaaatcggatgataacccaattacacacacaaaaactaagcagtaagatgagtatattaaacctaattaatctacaataaattagatttaatgaatttgtttcttagtttagttttcaactatctaattattttctaattagattatatttaatactgttaattggctattttataattagattatatttaatactgttaattggcgttcaaacataatacatacaccaaactttagaaccaaacaactcaacttcgaaatgctttaaaactgggttcgttacagacggcactgatacacgacggatgagacttcaatatcgttcggaacacagtagccacaacacacgctactcaagacagccatgataccggtacaacacagttacacggacgctggcattttatggacacccggcatgtgaagaactacccgatcgatcaacactaagacgaagacggcacaccatcggttgtgggcttgagcatactagccggagatctggatagacttgacgtcggccttcttggcctcctccttaggcacggtgacggtgagcacgccgttctccatggacgcactgatctgctccgtcctggcgttctccgtcaggcggaacctgcgcaggaacttgccgctgctgcgctccacgcggtgccaggtgtccgtcttctcctcctgctccttgcagcgctcgccgctgatctggagcacgttgccgtcctccagctccaccttcacctcctccttcttcagccccggcacgtcggtcttgaacacgtgcgcctccggcgtctccttccagtcgacgcgagcgccggcgaaggcggccgtctccgagctggtggtggtgcctccgaacgaggggaacaggctgctgctgctgctgcttccagagccgaagggaaataagccctggaaggggtcccagaggtcgagggagaaggggtcgaatgcgcttccacggcgaatcagcgacattgttgctcgagctcgagttttgagtgacgaggggggattgggattgttgttgtttcggcgactcgggtatgtgcttttcttggctgctctaggcttctagcttctgatgaggagcgtcgacgcgggagcggc

SEQ ID NO: 84332 - DNA, 3224 bp, Zea Mays
ccagaggcaaattaggaaagtttgcatcacatagaaaaaagagaacatttctaacttcccactgtatggccatcgatgtgtgctgcatttggtctgctgtgtgttctttgtgatcatataatgggttggaaatctgtttgaccactcagtgagtggcttcatgttaaatccatttctggtttcaagatgcttcatcaatgacatctggaaactgtaatagcgaagcacttcttgctttcaaaaaggcagttacaaattcagatggagtcttcctaaattggcgcgagcaagatgcagacccctgcaattggaagggtgttagatgtgatagtcatagcaagagagtgattaatctgattcttgcataccacagattagttgggcccataccaccagaaattggaaggttaaatcagttgcaaaccttgtcattgcaggggaacagtttgtatggttcactccctcctgaactggggaattgtaccaagttgcaacaactgtatctacaaggaaattacttaagtggatacatcccttcagaattcggcgaactggtggaactcgtggcattggacttatccagtaatacattgagtggatctgttccgcattctcttgataagttgtccaaacttacatcattcaatgtttccatgaacttcctgacaggagcaataccatcttctggttcacttgtcaatttcaatgagacaacgatgaggcttgtggagaaccaaaatgacgacatgattaacaaaaggaacgggaagaattctaccagacttgttataagtgcagtggcaacagtgggagctctcctattggtggctttaatgtgtttctggggttgctttctttacaaaaattttggaaagaaagatatgcgtggtttcagagttgagctctgtggaggctcttctgttgtgatgttccatggagacctcccttactcctcaaaagacatactcaagaagctagagactatggatgaagaaaatatcattggagcaggaggcttcggaactgtttataaacttgcaatggatgatggcaatgtctttgctttgaaaagaatagtgaaaacaaatgaagggctagatcggttctttgatagagaacttgagatattgggaagtgttaaacatcgttacttggtcaatcttcgtggttattgcaactctccttcatcaaaacttttgatatatgattatcttcaaggtggaagcctggatgaagtgctgcatgaaaagtctgaacagttggattgggatgcacgtattaacatcatacttggagctgcaaaaggcttgtcttacttgcatcacgattgttcgcctcgaataatacatcgtgatatcaagtcgagcaacatcttgcttgacggcagttttgaggcccgcgtatcagactttggacttgcaaagcttttagaggacgaagaatcccatatcactacaatagttgcaggaacatttggttatcttgcgccagagtatatgcagtttggcagagccaccgagaagaccgatgtctacagttttggggttctggtacttgaaatactcagcggaaagcggcctacggatgcatccttcattgagaagggattaaacattgttggatggttaaattttctggctggcgagaaccgggagagggaaatcgtcgatctgaattgtgaaggagtgcacaccgagaccttggacgctctgctctctctcgccaagcagtgtgtcagctctttgccggaggagcggccgacgatgcacagggtggtacagatgctggagtcggatgtagttacgccgtgccctagcgacttctacgattcagagtagcctcctggacggacaagccacagtggtgccgctagtttcccgtggaggcgcattcctttattctttgcagatattgtgtaaatgcattgccgcggtgtttgtttggtctcctccaatcggctggttcaacgggtgacatttttgcgtctgtgtttatctgtcatgctacaagttggctatgtgctgatttaataagagagaacttaccagtgtgtgtttaaaacattgatcttttggggttgtttggttccgaaggttaaattttagtctcatcaaatcggatgataacccaattacacacacaaaaactaagcagtaagatgagtatattaaacctaattaatctacaataaattagatttaatgaatttgtttcttagtttagttttcaactatctaattattttctaattagattatatttaatactgttaattggctattttataattagattatatttaatactgttaattggcgttcaaacataatacatacaccaaactttagaaccaaacaactcaacttcgaaatgctttaaaactgggttcgttacagacggcactgatacacgacggatgagacttcaatatcgttcggaacacagtagccacaacacacgctactcaagacagccatgataccggtacaacacagttacacggacgctggcattttatggacacccggcatgtgaagaactacccgatcgatcaacactaagacgaagacggcacaccatcggttgtgggcttgagcatactagccggagatctggatagacttgacgtcggccttcttggcctcctccttaggcacggtgacggtgagcacgccgttctccatggacgcactgatctgctccgtcctggcgttctccgtcaggcggaacctgcgcaggaacttgccgctgctgcgctccacgcggtgccaggtgtccgtcttctcctcctgctccttgcagcgctcgccgctgatctggagcacgttgccgtcctccagctccaccttcacctcctccttcttcagccccggcacgtcggtcttgaacacgtgcgcctccggcgtctccttccagtcgacgcgagcgccggcgaaggcggccgtctccgagctggtggtggtgcctccgaacgaggggaacaggctgctgctgctgctgcttccagagccgaagggaaataagccctggaaggggtcccagaggtcgagggagaaggggtcgaatgcgcttccacggcgaatcagcgacattgttgctcgagctcgagttttgagtgacgaggggggattgggattgttgttgtttcggcgactcgggtatgtgcttttcttggctgctctaggcttctagcttctgatgaggagcgtcgacgcgggagcggc

SEQ ID NO: 84333 - DNA, 4376 bp, Zea Mays
gctgttcgtcccgtgtcccgttccagtcctcgcccaccaccgcacgcggacaaaaccgctctccgctcctcacgacctcgccacactcctcactcgcgcacaccaccaccagtcagtccagttcccgcagtgcagcagcggccagcggctgcctaatctctccagccctttttcgtcccctagccacgccgcccaccgctgccgcgtcatccgccagtcgtcgcctgccccgcggcttccgcccccattcgccgccgaagcacgccgagccccgtcccagatcgccgccgcgcttcctgccgccgccggcgcggcgcagggttggaaatctgtttgaccactcagtgagtggcttcatgttaaatccatttctggtttcaagatgcttcatcaatgacatctggaaactgtaatagtatgtgctgatcttctatgcttcatcacctgatcatcaatgggctctttcctgaggaaacagcccagctacctcttcattttaataattctgcaccttgttgctcatgaggcaagaacactgagttcagatggcgaagcacttcttgctttcaaaaaggcagttacaaattcagatggagtcttcctaaattggcgcgagcaagatgcagacccctgcaattggaagggtgttagatgtgatagtcatagcaagagagtgattaatctgattcttgcataccacagattagttgggcccataccaccagaaattggaaggttaaatcagttgcaaaccttgtcattgcaggggaacagtttgtatggttcactccctcctgaactggggaattgtaccaagttgcaacaactgtatctacaaggaaattacttaagtggatacatcccttcagaattcggcgaactggtggaactcgtggcattggacttatccagtaatacattgagtggatctgttccgcattctcttgataagttgtccaaacttacatcattcaatgtttccatgaacttcctgacaggagcaataccatcttctggttcacttgtcaatttcaatgagacaacgatgaggcttgtggagaaccaaaatgacgacatgattaacaaaaggaacgggaagaattctaccagacttgttataagtgcagtggcaacagtgggagctctcctattggtggctttaatgtgtttctggggttgctttctttacaaaaattttggaaagaaagatatgcgtggtttcagagttgagctctgtggaggctcttctgttgtgatgttccatggagacctcccttactcctcaaaagacatactcaagaagctagagactatggatgaagaaaatatcattggagcaggaggcttcggaactgtttataaacttgcaatggatgatggcaatgtctttgctttgaaaagaatagtgaaaacaaatgaagggctagatcggttctttgatagagaacttgagatattgggaagtgttaaacatcgttacttggtcaatcttcgtggttattgcaactctccttcatcaaaacttttgatatatgattatcttcaaggtggaagcctggatgaagtgctgcatggtaaagtgtcatttttgtttatcagcatacatcttgattgcatttatcttttcatctttaattgcttttttttaaataaacacattaacaagcttgttaccagtccttttgccactatgacaagtatatcatgtttttgttcaatgtgaataacaataaggcttcttgatattgtgggcatagctattatgggcacatgagagtatgagatgctaggtcacacttgcaattgattctgatatagggcaatgatctaaaggttgaaaatatttttggagcacaccaaatccctgttctcttttgaggttatctatagcccttataaaacaaaacccactagcatgcatttatgatattctatctcttcatgcaagctatccacaccatcccacatttgttgttgtccacttgtcactacaagtacaaattccatccgtccaagtccaatgtcatcccatctcttagattcacaagcccagtcaatggaaacggtaatttttttccacgaatactgtcacttgagagtattgtctatttaaatgcaaattttaatgcacttctcatttctcatcataaatttgttactccaccaaaatagtcatcacaatcatacactttttaatttaaataatgctcctgcataacttctgtgatccctacagcaatgtgcaaggcgtccttctagtgcttagagaattttgcagccagtctcaacgaatcttttaggattcacacattttttttcttgatccgacacagtgcaaaatagcattaatattttatgtttactccttgctttgtttttgtccgtaaatctttgcagaaaagtctgaacagttggattgggatgcacgtattaacatcatacttggagctgcaaaaggcttgtcttacttgcatcacgattgttcgcctcgaataatacatcgtgatatcaagtcgagcaacatcttgcttgacggcagttttgaggcccgcgtatcagactttggacttgcaaagcttttagaggacgaagaatcccatatcactacaatagttgcaggaacatttggttatcttgcgccagagtatatgcagtttggcagagccaccgagaagaccgatgtctacagttttggggttctggtacttgaaatactcagcggaaagcggcctacggatgcatccttcattgagaagggattaaacattgttggatggttaaattttctggctggcgagaaccgggagagggaaatcgtcgatctgaattgtgaaggagtgcacaccgagaccttggacgctctgctctctctcgccaagcagtgtgtcagctctttgccggaggagcggccgacgatgcacagggtggtacagatgctggagtcggatgtagttacgccgtgccctagcgacttctacgattcagagtagcctcctggacggacaagccacagtggtgccgctagtttcccgtggaggcgcattcctttattctttgcagatattgtgtaaatgcattgccgcggtgtttgtttggtctcctccaatcggctggttcaacgggtgacatttttgcgtctgtgtttatctgtcatgctacaagttggctatgtgctgatttaataagagagaacttaccagtgtgtgtttaaaacattgatcttttggggttgtttggttccgaaggttaaattttagtctcatcaaatcggatgataacccaattacacacacaaaaactaagcagtaagatgagtatattaaacctaattaatctacaataaattagatttaatgaatttgtttcttagtttagttttcaactatctaattattttctaattagattatatttaatactgttaattggctattttataattagattatatttaatactgttaattggcgttcaaacataatacatacaccaaactttagaaccaaacaactcaacttcgaaatgctttaaaactgggttcgttacagacggcactgatacacgacggatgagacttcaatatcgttcggaacacagtagccacaacacacgctactcaagacagccatgataccggtacaacacagttacacggacgctggcattttatggacacccggcatgtgaagaactacccgatcgatcaacactaagacgaagacggcacaccatcggttgtgggcttgagcatactagccggagatctggatagacttgacgtcggccttcttggcctcctccttaggcacggtgacggtgagcacgccgttctccatggacgcactgatctgctccgtcctggcgttctccgtcaggcggaacctgcgcaggaacttgccgctgctgcgctccacgcggtgccaggtgtccgtcttctcctcctgctccttgcagcgctcgccgctgatctggagcacgttgccgtcctccagctccaccttcacctcctccttcttcagccccggcacgtcggtcttgaacacgtgcgcctccggcgtctccttccagtcgacgcgagcgccggcgaaggcggccgtctccgagctggtggtggtgcctccgaacgaggggaacaggctgctgctgctgctgcttccagagccgaagggaaataagccctggaaggggtcccagaggtcgagggagaaggggtcgaatgcgcttccacggcgaatcagcgacattgttgctcgagctcgagttttgagtgacgaggggggattgggattgttgttgtttcggcgactcgggtatgtgcttttcttggctgctctaggcttctagcttctgatgaggagcgtcgacgcgggagcggc

SEQ ID NO: 84334 - DNA, 3477 bp, Zea Mays
ggaaggaaaggcagagaaagcggtggcgaggagcagaaaacgagggtggtttagctagctgttcgtcccgtgtcccgttccagtcctcgcccaccaccgcacgcggacaaaaccgctctccgctcctcacgacctcgccacactcctcactcgcgcacaccaccaccagtcagtccagttcccgcagtgcagcagcggccagcggctgcctaatctctccagccctttttcgtcccctagccacgccgcccaccgctgccgcgtcatccgccagtcgtcgcctgccccgcggcttccgcccccattcgccgccgaagcacgccgagccccgtcccagatcgccgccgcgcttcctgccgccgccggcgcggcgcagggttggaaatctgtttgaccactcagtgagtggcttcatgttaaatccatttctggtttcaagatgcttcatcaatgacatctggaaactgtaatagcgaagcacttcttgctttcaaaaaggcagttacaaattcagatggagtcttcctaaattggcgcgagcaagatgcagacccctgcaattggaagggtgttagatgtgatagtcatagcaagagagtgattaatctgattcttgcataccacagattagttgggcccataccaccagaaattggaaggttaaatcagttgcaaaccttgtcattgcaggggaacagtttgtatggttcactccctcctgaactggggaattgtaccaagttgcaacaactgtatctacaaggaaattacttaagtggatacatcccttcagaattcggcgaactggtggaactcgtggcattggacttatccagtaatacattgagtggatctgttccgcattctcttgataagttgtccaaacttacatcattcaatgtttccatgaacttcctgacaggagcaataccatcttctggttcacttgtcaatttcaatgagacaacgatgaggcttgtggagaaccaaaatgacgacatgattaacaaaaggaacgggaagaattctaccagacttgttataagtgcagtggcaacagtgggagctctcctattggtggctttaatgtgtttctggggttgctttctttacaaaaattttggaaagaaagatatgcgtggtttcagagttgagctctgtggaggctcttctgttgtgatgttccatggagacctcccttactcctcaaaagacatactcaagaagctagagactatggatgaagaaaatatcattggagcaggaggcttcggaactgtttataaacttgcaatggatgatggcaatgtctttgctttgaaaagaatagtgaaaacaaatgaagggctagatcggttctttgatagagaacttgagatattgggaagtgttaaacatcgttacttggtcaatcttcgtggttattgcaactctccttcatcaaaacttttgatatatgattatcttcaaggtggaagcctggatgaagtgctgcatgaaaagtctgaacagttggattgggatgcacgtattaacatcatacttggagctgcaaaaggcttgtcttacttgcatcacgattgttcgcctcgaataatacatcgtgatatcaagtcgagcaacatcttgcttgacggcagttttgaggcccgcgtatcagactttggacttgcaaagcttttagaggacgaagaatcccatatcactacaatagttgcaggaacatttggttatcttgcgccagagtatatgcagtttggcagagccaccgagaagaccgatgtctacagttttggggttctggtacttgaaatactcagcggaaagcggcctacggatgcatccttcattgagaagggattaaacattgttggatggttaaattttctggctggcgagaaccgggagagggaaatcgtcgatctgaattgtgaaggagtgcacaccgagaccttggacgctctgctctctctcgccaagcagtgtgtcagctctttgccggaggagcggccgacgatgcacagggtggtacagatgctggagtcggatgtagttacgccgtgccctagcgacttctacgattcagagtagcctcctggacggacaagccacagtggtgccgctagtttcccgtggaggcgcattcctttattctttgcagatattgtgtaaatgcattgccgcggtgtttgtttggtctcctccaatcggctggttcaacgggtgacatttttgcgtctgtgtttatctgtcatgctacaagttggctatgtgctgatttaataagagagaacttaccagtgtgtgtttaaaacattgatcttttggggttgtttggttccgaaggttaaattttagtctcatcaaatcggatgataacccaattacacacacaaaaactaagcagtaagatgagtatattaaacctaattaatctacaataaattagatttaatgaatttgtttcttagtttagttttcaactatctaattattttctaattagattatatttaatactgttaattggctattttataattagattatatttaatactgttaattggcgttcaaacataatacatacaccaaactttagaaccaaacaactcaacttcgaaatgctttaaaactgggttcgttacagacggcactgatacacgacggatgagacttcaatatcgttcggaacacagtagccacaacacacgctactcaagacagccatgataccggtacaacacagttacacggacgctggcattttatggacacccggcatgtgaagaactacccgatcgatcaacactaagacgaagacggcacaccatcggttgtgggcttgagcatactagccggagatctggatagacttgacgtcggccttcttggcctcctccttaggcacggtgacggtgagcacgccgttctccatggacgcactgatctgctccgtcctggcgttctccgtcaggcggaacctgcgcaggaacttgccgctgctgcgctccacgcggtgccaggtgtccgtcttctcctcctgctccttgcagcgctcgccgctgatctggagcacgttgccgtcctccagctccaccttcacctcctccttcttcagccccggcacgtcggtcttgaacacgtgcgcctccggcgtctccttccagtcgacgcgagcgccggcgaaggcggccgtctccgagctggtggtggtgcctccgaacgaggggaacaggctgctgctgctgctgcttccagagccgaagggaaataagccctggaaggggtcccagaggtcgagggagaaggggtcgaatgcgcttccacggcgaatcagcgacattgttgctcgagctcgagttttgagtgacgaggggggattgggattgttgttgtttcggcgactcgggtatgtgcttttcttggctgctctaggcttctagcttctgatgaggagcgtcgacgcgggagcggc

SEQ ID NO: 84335 - DNA, 3615 bp, Zea Mays
cgactacgagagaaaagagcggtggggggaaggaaaggcagagaaagcggtggcgaggagcagaaaacgagggtggtttagctagctgttcgtcccgtgtcccgttccagtcctcgcccaccaccgcacgcggacaaaaccgctctccgctcctcacgacctcgccacactcctcactcgcgcacaccaccaccagtcagtccagttcccgcagtgcagcagcggccagcggctgcctaatctctccagccctttttcgtcccctagccacgccgcccaccgctgccgcgtcatccgccagtcgtcgcctgccccgcggcttccgcccccattcgccgccgaagcacgccgagccccgtcccagatcgccgccgcgcttcctgccgccgccggcgcggcgcagggttggaaatctgtttgaccactcagtgagtggcttcatgttaaatccatttctggtttcaagatgcttcatcaatgacatctggaaactgtaatagtatgtgctgatcttctatgcttcatcacctgatcatcaatgggctctttcctgaggaaacagcccagctacctcttcattttaataattctgcaccttgttgctcatgaggcgaagcacttcttgctttcaaaaaggcagttacaaattcagatggagtcttcctaaattggcgcgagcaagatgcagacccctgcaattggaagggtgttagatgtgatagtcatagcaagagagtgattaatctgattcttgcataccacagattagttgggcccataccaccagaaattggaaggttaaatcagttgcaaaccttgtcattgcaggggaacagtttgtatggttcactccctcctgaactggggaattgtaccaagttgcaacaactgtatctacaaggaaattacttaagtggatacatcccttcagaattcggcgaactggtggaactcgtggcattggacttatccagtaatacattgagtggatctgttccgcattctcttgataagttgtccaaacttacatcattcaatgtttccatgaacttcctgacaggagcaataccatcttctggttcacttgtcaatttcaatgagacaacgatgaggcttgtggagaaccaaaatgacgacatgattaacaaaaggaacgggaagaattctaccagacttgttataagtgcagtggcaacagtgggagctctcctattggtggctttaatgtgtttctggggttgctttctttacaaaaattttggaaagaaagatatgcgtggtttcagagttgagctctgtggaggctcttctgttgtgatgttccatggagacctcccttactcctcaaaagacatactcaagaagctagagactatggatgaagaaaatatcattggagcaggaggcttcggaactgtttataaacttgcaatggatgatggcaatgtctttgctttgaaaagaatagtgaaaacaaatgaagggctagatcggttctttgatagagaacttgagatattgggaagtgttaaacatcgttacttggtcaatcttcgtggttattgcaactctccttcatcaaaacttttgatatatgattatcttcaaggtggaagcctggatgaagtgctgcatgaaaagtctgaacagttggattgggatgcacgtattaacatcatacttggagctgcaaaaggcttgtcttacttgcatcacgattgttcgcctcgaataatacatcgtgatatcaagtcgagcaacatcttgcttgacggcagttttgaggcccgcgtatcagactttggacttgcaaagcttttagaggacgaagaatcccatatcactacaatagttgcaggaacatttggttatcttgcgccagagtatatgcagtttggcagagccaccgagaagaccgatgtctacagttttggggttctggtacttgaaatactcagcggaaagcggcctacggatgcatccttcattgagaagggattaaacattgttggatggttaaattttctggctggcgagaaccgggagagggaaatcgtcgatctgaattgtgaaggagtgcacaccgagaccttggacgctctgctctctctcgccaagcagtgtgtcagctctttgccggaggagcggccgacgatgcacagggtggtacagatgctggagtcggatgtagttacgccgtgccctagcgacttctacgattcagagtagcctcctggacggacaagccacagtggtgccgctagtttcccgtggaggcgcattcctttattctttgcagatattgtgtaaatgcattgccgcggtgtttgtttggtctcctccaatcggctggttcaacgggtgacatttttgcgtctgtgtttatctgtcatgctacaagttggctatgtgctgatttaataagagagaacttaccagtgtgtgtttaaaacattgatcttttggggttgtttggttccgaaggttaaattttagtctcatcaaatcggatgataacccaattacacacacaaaaactaagcagtaagatgagtatattaaacctaattaatctacaataaattagatttaatgaatttgtttcttagtttagttttcaactatctaattattttctaattagattatatttaatactgttaattggctattttataattagattatatttaatactgttaattggcgttcaaacataatacatacaccaaactttagaaccaaacaactcaacttcgaaatgctttaaaactgggttcgttacagacggcactgatacacgacggatgagacttcaatatcgttcggaacacagtagccacaacacacgctactcaagacagccatgataccggtacaacacagttacacggacgctggcattttatggacacccggcatgtgaagaactacccgatcgatcaacactaagacgaagacggcacaccatcggttgtgggcttgagcatactagccggagatctggatagacttgacgtcggccttcttggcctcctccttaggcacggtgacggtgagcacgccgttctccatggacgcactgatctgctccgtcctggcgttctccgtcaggcggaacctgcgcaggaacttgccgctgctgcgctccacgcggtgccaggtgtccgtcttctcctcctgctccttgcagcgctcgccgctgatctggagcacgttgccgtcctccagctccaccttcacctcctccttcttcagccccggcacgtcggtcttgaacacgtgcgcctccggcgtctccttccagtcgacgcgagcgccggcgaaggcggccgtctccgagctggtggtggtgcctccgaacgaggggaacaggctgctgctgctgctgcttccagagccgaagggaaataagccctggaaggggtcccagaggtcgagggagaaggggtcgaatgcgcttccacggcgaatcagcgacattgttgctcgagctcgagttttgagtgacgaggggggattgggattgttgttgtttcggcgactcgggtatgtgcttttcttggctgctctaggcttctagcttctgatgaggagcgtcgacgcgggagcggc

SEQ ID NO: 84336 - DNA, 2933 bp, Zea Mays
tattttctccctcgtcgacggctgtgtccggcttgatttcgatcggcagctggagagaatcgattcgattccccgtctgccgctgtcctttggctctggctcgctcattcgttcgctcgtcctaattgtctccaccactttttttttctgcccggccactgccagtccaccacaaccacgtcccgccgtcgtcgtcgcgcttcccccacgcgcgccccgtcgcgtcccggtgctgctgttgagtgcgcccgcgcccgcgcgttgccgtgaagctgcttccgcgcgccgccgccgccgcctgcctgcgtgggttgcaagtcaagcggcaggcggggggacgggcgccggagggagcggacgacccgggaggaagcaggaggagtgcaggacaagggcagccgcggcacgcgcttgagcggcacaagcgaagcaggctgcgtttagttcgtgcggtggactgcggccggggatcgctcgcttcggaggaggatgtcgcagacaggggaggtgcaggtgccgctgttgcagaccgaggaggcggatggcgagtggagctccaagccacgccgcattgctctcttcgtcgagccgtcgccctttgcttacatttccggctacaagaatcggtttcagaacttcatcaagcatctacgagagatgggcgatgaggtattggtggtgactacacacaagggagctcctgaggagttccatggtgcaaaggtcattggctcttggagctttccatgtcctctgtaccaaaatgttccactctcgctggcattgagccccagaatattttctgaggtgaataaattcaagccagacataatccatgcgacatcacctggaattatggttctcggtgctctggctatagctaaaatgatatcggttccaatattgatgtcttatcacacacatcttccagcgtgagtcccttttgttgaaatgatattcttttgacgcaacatgagtttgtttccatgtatgatctaactaggtacagatctttcaaacattcaaagtagtgatcagctttggaagttcaattataccttgtttgtctagcatctgattttttttcatagaatgagttgccatcattgtaggatacagatccctgtggggtcaatatttttcatttttatgttctgtgtacttgcatataatcatcaacaatgttttggccactttttgtgcaaaaaatctagccagttgaccattcagattatactaactaatagtcttttgaatatgttggcgaggggtcattcacttgttgtacatgtagatatcacattagagaatgttctgcatgtaaattcatttcaggtagaattgaataacgagtttcctaaacaatgttctggctgatatggagaattctcagtaaatcagttcaacaaaatgtgtcctgaaatagactcaaacatagttttgggcaggcattatgaacctgtggtgagccggtgataccatgagacaaatctgtttgtgccaatcatatgtggtcatagaacctcaggtgcaatgctgcagagcttaattggtatagtgcatgtggagtgtggacatagatccagtacaggtttgtcgcaatacaaaacaaaggaactcccacatagatgtatgtgtgaggaaatcaatgaactcactttctgcttctgatatgatagaacaatgattgaacatttttcatttttctagtacacatcagctgggttgtatcatttatttccattacaaattttaatattcgatgtcatggctgttaacgcttttgtggttttgaattcatgtgctgttatggcttgcaggtacataccgagatacaatttaaattggttacttgagcccacgtggagttttataaggtgcctccacagatcagcagatcttactctagttccttcattagctattgctgaagactttgaaaccgctaaagtagtgccagcaaacagaatacggctttggaataagggtgtagattctgaaagctttcatactaaatatcggaggcacgaaatgcgtgtcagattgaggtatcacggcttgcttcaatttttaataacagagtgttaacatggaataacacaatttcttttcctctcccattagtggtggtgaaccagaaaaaccattggtaatacatgtgggccgttttggacgtgaaaaaaatttggattttctgaaaagggttatggagaggctcccaggagcaaggattgccttcgttggagacgggccatacagggctgagttggaaaaaatgttcatgggcatgcctgcagtttttaccggaatgctccaaggtgaggagctctcacaagcgtacgccagtgcggatgtatttgcaatgccttcagaatccgagaccctcgggcaagtagtgctggagtccatggcttctggagtcccagtcgtcgctgctcgtgctggagggatacctgatataatacccaaggacaaggagggtaaaacaagctttttgtttacaccgggagatctcgatgagtgcgtgaggaagatagagcaagtcctcagttcaaaggatctcagggaaaccgttggaaaggctgccagggaagagatggagaagtgtgactggagagcagcctcgaagaaaatccgcaatgagcactacagcactgcgatatcgtactggcggaagaagatggacaagagtaactaggcttccgtgttccgggttcttctgtcgctgccctctccaactagttgctgttaataaccaaagaatttgtacattgtacccaaacagctcgcgagtttgtgtggctggctgcattcaaatgtccacagtttgactgacgacggcttgtatgcaattcgtgtacaattagacagctcttaagattgccgaactgctaactcaggaaggttcgacacaaaattctccaataatttcg

SEQ ID NO: 84337 - DNA, 1977 bp, Zea Mays
cttagccttgacagttattttctccctcgtcgacggctgtgtccggcttgatttcgatcggcagctggagagaatcgattcgattccccgtctgccgctgtcctttggctctggctcgctcattcgttcgctcgtcctaattgtctccaccactttttttttctgcccggccactgccagtccaccacaaccacgtcccgccgtcgtcgtcgcgcttcccccacgcgcgccccgtcgcgtcccggtgctgctgttgagtgcgcccgcgcccgcgcgttgccgtgaagctgcttccgcgcgccgccgccgccgcctgcctgcgtgggttgcaagtcaagcggcaggcggggggacgggcgccggagggagcggacgacccgggaggaagcaggaggagtgcaggacaagggcagccgcggcacgcgcttgagcggcacaagcgaagcaggctgcgtttagttcgtgcggtggactgcggccggggatcgctcgcttcggaggaggatgtcgcagacaggggaggtgcaggtgccgctgttgcagaccgaggaggcggatggcgagtggagctccaagccacgccgcattgctctcttcgtcgagccgtcgccctttgcttacatttccggctacaagaatcggtttcagaacttcatcaagcatctacgagagatgggcgatgaggtattggtggtgactacacacaagggagctcctgaggagttccatggtgcaaaggtcattggctcttggagctttccatgtcctctgtaccaaaatgttccactctcgctggcattgagccccagaatattttctgaggtgaataaattcaagccagacataatccatgcgacatcacctggaattatggttctcggtgctctggctatagctaaaatgatatcggttccaatattgatgtcttatcacacacatcttccagcgtacataccgagatacaatttaaattggttacttgagcccacgtggagttttataaggtgcctccacagatcagcagatcttactctagttccttcattagctattgctgaagactttgaaaccgctaaagtagtgccagaatacggctttggaataagggtgtagattctgaaagctttcatactaaatatcggaggcacgaaatgcgtgtcagattgagtggtggtgaaccagaaaaaccattggtaatacatgtgggccgttttggacgtgaaaaaaatttggattttctgaaaagggttatggagaggctcccaggagcaaggattgccttcgttggagacgggccatacagggctgagttggaaaaaatgttcatgggcatgcctgcagtttttaccggaatgctccaaggtgaggagctctcacaagcgtacgccagtgcggatgtatttgcaatgccttcagaatccgagaccctcgggcaagtagtgctggagtccatggcttctggagtcccagtcgtcgctgctcgtgctggagggatacctgatataatacccaaggacaaggagggtaaaacaagctttttgtttacaccgggagatctcgatgagtgcgtgaggaagatagagcaagtcctcagttcaaaggatctcagggaaaccgttggaaaggctgccagggaagagatggagaagtgtgactggagagcagcctcgaagaaaatccgcaatgagcactacagcactgcgatatcgtactggcggaagaagatggacaagagtaactaggcttccgtgttccgggttcttctgtcgctgccctctccaactagttgctgttaataaccaaagaatttgtacattgtacccaaacagctcgcgagtttgtgtggctggctgcattcaaatgtccacagtttgactgacgacggcttgtatgcaattcgtgtacaattagacagctcttaagattgccgaactgctaactcaggaaggttcgacacaaaattctccaataatttcg

SEQ ID NO: 84338 - DNA, 1988 bp, Zea Mays
gcggccttagccttgacagttattttctccctcgtcgacggctgtgtccggcttgatttcgatcggcagctggagagaatcgattcgattccccgtctgccgctgtcctttggctctggctcgctcattcgttcgctcgtcctaattgtctccaccactttttttttctgcccggccactgccagtccaccacaaccacgtcccgccgtcgtcgtcgcgcttcccccacgcgcgccccgtcgcgtcccggtgctgctgttgagtgcgcccgcgcccgcgcgttgccgtgaagctgcttccgcgcgccgccgccgccgcctgcctgcgtgggttgcaagtcaagcggcaggcggggggacgggcgccggagggagcggacgacccgggaggaagcaggaggagtgcaggacaagggcagccgcggcacgcgcttgagcggcacaagcgaagcaggctgcgtttagttcgtgcggtggactgcggccggggatcgctcgcttcggaggaggatgtcgcagacaggggaggtgcaggtgccgctgttgcagaccgaggaggcggatggcgagtggagctccaagccacgccgcattgctctcttcgtcgagccgtcgccctttgcttacatttccggctacaagaatcggtttcagaacttcatcaagcatctacgagagatgggcgatgaggtattggtggtgactacacacaagggagctcctgaggagttccatggtgcaaaggtcattggctcttggagctttccatgtcctctgtaccaaaatgttccactctcgctggcattgagccccagaatattttctgaggtgaataaattcaagccagacataatccatgcgacatcacctggaattatggttctcggtgctctggctatagctaaaatgatatcggttccaatattgatgtcttatcacacacatcttccaggtacataccgagatacaatttaaattggttacttgagcccacgtggagttttataaggtgcctccacagatcagcagatcttactctagttccttcattagctattgctgaagactttgaaaccgctaaagtagtgccagcaaacagaatacggctttggaataagggtgtagattctgaaagctttcatactaaatatcggaggcacgaaatgcgtgtcagattgagtggtggtgaaccagaaaaaccattggtaatacatgtgggccgttttggacgtgaaaaaaatttggattttctgaaaagggttatggagaggctcccaggagcaaggattgccttcgttggagacgggccatacagggctgagttggaaaaaatgttcatgggcatgcctgcagtttttaccggaatgctccaaggtgaggagctctcacaagcgtacgccagtgcggatgtatttgcaatgccttcagaatccgagaccctcgggcaagtagtgctggagtccatggcttctggagtcccagtcgtcgctgctcgtgctggagggatacctgatataatacccaaggacaaggagggtaaaacaagctttttgtttacaccgggagatctcgatgagtgcgtgaggaagatagagcaagtcctcagttcaaaggatctcagggaaaccgttggaaaggctgccagggaagagatggagaagtgtgactggagagcagcctcgaagaaaatccgcaatgagcactacagcactgcgatatcgtactggcggaagaagatggacaagagtaactaggcttccgtgttccgggttcttctgtcgctgccctctccaactagttgctgttaataaccaaagaatttgtacattgtacccaaacagctcgcgagtttgtgtggctggctgcattcaaatgtccacagtttgactgacgacggcttgtatgcaattcgtgtacaattagacagctcttaagattgccgaactgctaactcaggaaggttcgacacaaaattctccaataatttcg

SEQ ID NO: 84339 - DNA, 2172 bp, Zea Mays
ggcggccttagccttgacagttattttctccctcgtcgacggctgtgtccggcttgatttcgatcggcagctggagagaatcgattcgattccccgtctgccgctgtcctttggctctggctcgctcattcgttcgctcgtcctaattgtctccaccactttttttttctgcccggccactgccagtccaccacaaccacgtcccgccgtcgtcgtcgcgcttcccccacgcgcgccccgtcgcgtcccggtgctgctgttgagtgcgcccgcgcccgcgcgttgccgtgaagctgcttccgcgcgccgccgccgccgcctgcctgcgtgggttgcaagtcaagcggcaggcggggggacgggcgccggagggagcggacgacccgggaggaagcaggaggagtgcaggacaagggcagccgcggcacgcgcttgagcggcacaagcgaagcaggctgcgtttagttcgtgcggtggactgcggccggggatcgctcgcttcggaggaggatgtcgcagacaggggaggtgcaggtgccgctgttgcagaccgaggaggcggatggcgagtggagctccaagccacgccgcattgctctcttcgtcgagccgtcgccctttgcttacatttccggctacaagaatcggtttcagaacttcatcaagcatctacgagagatgggcgatgaggtattggtggtgactacacacaagggagctcctgaggagttccatggtgcaaaggtcattggctcttggagctttccatgtcctctgtaccaaaatgttccactctcgctggcattgagccccagaatattttctgaggtgaataaattcaagccagacataatccatgcgacatcacctggaattatggttctcggtgctctggctatagctaaaatgatatcggttccaatattgatgtcttatcacacacatcttccagcgcattatgaacctgtggtgagccggtgataccatgagacaaatctgtttgtgccaatcatatgtggtcatagaacctcaggtgcaatgctgcagagcttaattggtatagtgcatgtggagtgtggacatagatccagtacaggtttgtcgcaatacaaaacaaaggaactcccacatagatgtacataccgagatacaatttaaattggttacttgagcccacgtggagttttataaggtgcctccacagatcagcagatcttactctagttccttcattagctattgctgaagactttgaaaccgctaaagtagtgccagcaaacagaatacggctttggaataagggtgtagattctgaaagctttcatactaaatatcggaggcacgaaatgcgtgtcagattgagtggtggtgaaccagaaaaaccattggtaatacatgtgggccgttttggacgtgaaaaaaatttggattttctgaaaagggttatggagaggctcccaggagcaaggattgccttcgttggagacgggccatacagggctgagttggaaaaaatgttcatgggcatgcctgcagtttttaccggaatgctccaaggtgaggagctctcacaagcgtacgccagtgcggatgtatttgcaatgccttcagaatccgagaccctcgggcaagtagtgctggagtccatggcttctggagtcccagtcgtcgctgctcgtgctggagggatacctgatataatacccaaggacaaggagggtaaaacaagctttttgtttacaccgggagatctcgatgagtgcgtgaggaagatagagcaagtcctcagttcaaaggatctcagggaaaccgttggaaaggctgccagggaagagatggagaagtgtgactggagagcagcctcgaagaaaatccgcaatgagcactacagcactgcgatatcgtactggcggaagaagatggacaagagtaactaggcttccgtgttccgggttcttctgtcgctgccctctccaactagttgctgttaataaccaaagaatttgtacattgtacccaaacagctcgcgagtttgtgtggctggctgcattcaaatgtccacagtttgactgacgacggcttgtatgcaattcgtgtacaattagacagctcttaagattgccgaactgctaactcaggaaggttcgacacaaaattctccaataatttcg

SEQ ID NO: 84340 - DNA, 2070 bp, Zea Mays
ggcggccttagccttgacagttattttctccctcgtcgacggctgtgtccggcttgatttcgatcggcagctggagagaatcgattcgattccccgtctgccgctgtcctttggctctggctcgctcattcgttcgctcgtcctaattgtctccaccactttttttttctgcccggccactgccagtccaccacaaccacgtcccgccgtcgtcgtcgcgcttcccccacgcgcgccccgtcgcgtcccggtgctgctgttgagtgcgcccgcgcccgcgcgttgccgtgaagctgcttccgcgcgccgccgccgccgcctgcctgcgtgggttgcaagtcaagcggcaggcggggggacgggcgccggagggagcggacgacccgggaggaagcaggaggagtgcaggacaagggcagccgcggcacgcgcttgagcggcacaagcgaagcaggctgcgtttagttcgtgcggtggactgcggccggggatcgctcgcttcggaggaggatgtcgcagacaggggaggtgcaggtgccgctgttgcagaccgaggaggcggatggcgagtggagctccaagccacgccgcattgctctcttcgtcgagccgtcgccctttgcttacatttccggctacaagaatcggtttcagaacttcatcaagcatctacgagagatgggcgatgaggtattggtggtgactacacacaagggagctcctgaggagttccatggtgcaaaggtcattggctcttggagctttccatgtcctctgtaccaaaatgttccactctcgctggcattgagccccagaatattttctgaggtgaataaattcaagccagacataatccatgcgacatcacctggaattatggttctcggtgctctggctatagctaaaatgatatcggttccaatattgatgtcttatcacacacatcttccagcgcattatgaacctgtggtgagccggtgataccatgagacaaatctgtttgtgccaatcatatgtggtcatagaacctcaggtacataccgagatacaatttaaattggttacttgagcccacgtggagttttataaggtgcctccacagatcagcagatcttactctagttccttcattagctattgctgaagactttgaaaccgctaaagtagtgccagcaaacagaatacggctttggaataagggtgtagattctgaaagctttcatactaaatatcggaggcacgaaatgcgtgtcagattgagtggtggtgaaccagaaaaaccattggtaatacatgtgggccgttttggacgtgaaaaaaatttggattttctgaaaagggttatggagaggctcccaggagcaaggattgccttcgttggagacgggccatacagggctgagttggaaaaaatgttcatgggcatgcctgcagtttttaccggaatgctccaaggtgaggagctctcacaagcgtacgccagtgcggatgtatttgcaatgccttcagaatccgagaccctcgggcaagtagtgctggagtccatggcttctggagtcccagtcgtcgctgctcgtgctggagggatacctgatataatacccaaggacaaggagggtaaaacaagctttttgtttacaccgggagatctcgatgagtgcgtgaggaagatagagcaagtcctcagttcaaaggatctcagggaaaccgttggaaaggctgccagggaagagatggagaagtgtgactggagagcagcctcgaagaaaatccgcaatgagcactacagcactgcgatatcgtactggcggaagaagatggacaagagtaactaggcttccgtgttccgggttcttctgtcgctgccctctccaactagttgctgttaataaccaaagaatttgtacattgtacccaaacagctcgcgagtttgtgtggctggctgcattcaaatgtccacagtttgactgacgacggcttgtatgcaattcgtgtacaattagacagctcttaagattgccgaactgctaactcaggaaggttcgacacaaaattctccaataatttcg

SEQ ID NO: 84341 - DNA, 6195 bp, Zea Mays
ggaagcaacaaaccttcgtaccatcagtgaactaacaaagaatccgctatggctatcggataagccttatcttctccaacaaacaacaaataaatcccgccataacatgcatgacgatcgtgctcgccaaagtgatccgtgtcttctacccgctcgccgacatgctccgccaggacgacgcctaccgactcgacggccgcatccaccaggacgacaccgatggcggcgctctcaccgtcgagaacgacgagggcgtggaggtcttcgagggcgaagccgaggccgagcgcgtctccttccacccgctcgtcggtcgcatcctccaggacgaacggcgacgcgctcgccgtcgagggcgacgagggcgtggacttctttgaaggcaggcaagcggcggcaattgctgtcgcgggcgaccatgcagcgcaactggagaaggccgatctagccgccgcgatgatgctcctcctcctcgacgctacctcgctccgctactcgcccgccgcgctggtagccgcgcacgagaggttgtgggcctgcagggtctccatcgccgtacgcacgagaggtttgctaatattgtgagagcgaaagaaattatccaactttagacatcagcaaagccatgttcatatatttttcatttcaatgttatgtgtgcaattacatttattcatctactcattcttacatgcatatttatgtagtaaaactggaatagtgttcatatcaacttagcttaggaacatacatgaattatttgtactacaaaccgaactataggttgtatatactttcgtgcctataccattagtgagggaagtagcgtgcacggtcgtactaccatcttcgtgcattgttttggggtttcaactctgtcatgttctcttattaactaatctgttgttcttttgtttcaagtgcccacacgcagagatttcacaagcgtttttatgcggtttcagatgttgatgagtgtcattaatatgaccagcgtttttaggcgttgctgaaagaaaaaaaataaggcagcaatgttgggtcattaatatgcagattcttgcatatagaatcatattatattgaatgtctctcctacttagagtaaaactaattgcttcttgcatatagactcatattataatagatttcaaatcatcatgtgaatagtatgcaagatctttgctatctactgtagactgtagtatgtgacaatgtaggcatggtcctgttccttgtttctgtacagtttctaccatgttcttgcctccatttatggaacgaaacttgcctgagtatggccacaagccatataaaattttactctcgtgagtacttaatacttatgaaaataaattcaaagggtgaatctcatgatactttgaacaattatattgtgaaaataaattcaatgatgtacctaatgatatttatttggtaatgaactgacggaaacaatttgacaagattatatataacatactaatatacatcagtacataccagattaccagctaataatcaattgatctaagacaatctagacaatgtaggtgtgaactaagattgatttatagagtcactcattatatatgattgtgtgttattgttcctgtgcgccgtcgtatcgcacgggcacagtactagtaatcatgtatggatcgcttggggggtttattccgcgtgcgtgtagtttaggtgcggatcgtttctacgatggtcgtcacgcgctgattgtgagtccatcattattggttttctgttaaaaccgaattccgggtacgcccaagcgtatttgtcagatgtaggctccgagaccctcgagcaattcatgtggaataaaccgatccaacgcgtctgatcaagggtcacggctaattcgactcaaaccggcactatgcatgggtctaaaaaatgatcaatgaataggcgcgtcgccacagaagcgagcaaaaaaagcaacagcgacgcggggcagtggagcggttaaaaatccgccgggcatcggccgcctcctaccccctctagtccaccctgtccccggacaggcagcgtcggagcgccggcgttgccaacgccaacgcggaggcgagacgatcgggaaggaggggagcagaggaaggatacagtccggagcttcagctgtctgctgtctgcggtctgcgggagcgatcacgtctacggtctacagtcgacaggttcgtgcccgattcttgtctgctttgctttggggaatggtatggcgcatcgaatccagctattctcatgcgtttttcaagatttttctcattttgtcctcgatttcgccccccttttcagtttatgtagcttgttgcgaacgagcagagtatacaatattgcttcgtctatcgacagttcgacgcgctaaagtaaacaagcttttacagctttatttactgataacttcgcaccctccgcgcagttgcgacctccaactggagctggcttcacatagacttctggaggaggcaacgggattgcgatttggaacatggggagttcggtcggctgcttggtaggcggctccaagtcgaggcaagatcagaattgtcaggtcgtcgcgggttcgtctcacagttcaggtcatgtcttatcaagagctggaaataatgtacaggtattctccctaaacgagttgaagactgccacacaaaactttcacatgttgaattgcattggccgtgggggtttcggagcagtgtataaggcacccaaaccttgtcaggctgattggttgctgcgctgaagggaaaaacagactattggtgtatgagtatgcggagaataatagtttggcgaatgctttgcttggtaagttaatattgaacttggactttcgaagtcggtcaatccaaacatattaactttacctttgtgaattatggccaggaccaaagaataaatgtatcccattggactggcagaaaagagctgctatatgtattggaactgcttctggccttgcttttcttcatgagaaagcacaaccatgcattgtccaccgtgatatcaaggctagcaacattttacttgataagaaactgctgcccaaaattggagattttggattggccaagatttttcctgataccgttactcacattagcacgcgtgttgcaggaacaatgttagtgcatttctaaatctttttatgtatcttcctctcaaaaagggaacatttccctgtatttacttgcttatatacaatgaacttatgtgtatgtcatgtcgtgtttttttttcattgtgctattctggttttacccagcgattttgttgtttttgctgccagtttaccagggcgccgatcgactaatagtagtctgttataacgtacttgcattgaaatctcaatatataattttcctgcaggggttatttggcaccagagtatgcattgttgggacaattaaccaagaaagcagacatatatagttttggtgtgcttcttctcgaagtgataagtggtgaaaacagcagcaagccgacttgggggcctaatatgcatgttcttgtggaatggacatggaagctgcgagaagaaggaagactcttggaaattgttgatccagaactgaaaaagtacccagaggagcaaatgcttcgtttcatcaaggtggcactgctgtgcacacaagccacgtcccaacagaggccatccatgaagcaggttgtcaatatgctatctaacaaagcagaaattgacctgcaaaatgtagttgcaccaggtgtactgaaagaacctcggcagcgtactggcggctttgggagtttgacagcaggcacgtcctcaaagccaaagcaccaaaggcaatccagctgaatcatacagtacaattgtacaaagaccaacatgaacagctgtcagtttagcacaaccgacgcatcaccaaggtgacgtgatagactgtcagcttgcaagcttgtttgacgtcttcactcttcaaaggtgtcacaaactctagtgatatggaaggcctgatccattttcatcctgttttagagttacgtagtatgcgaaggccgctgtgaattgctgatgtacaggaattgtagctcatcttttttttgttcttttgcaaaagaggaattgtagtttgatttgacgattgattttaccttctggcggccacgttacaaaggacagttattttaggcatcaagttctctatatattagacacatttagtagcagtttatactattcaacgtttttttacaatatactattcaacattgagttgcaactgtacatggttgtttctggcaaccgtactagtaatacaatgaatgtaaaacttaattaaagttgtcggagaaggaatatatataccactagcatataactatgtaatataatttgcaacaaagaggatcacacatgagtgatgagtcgtattgagagtctatactactctactcagtctaccttatctaacaagccatttgcatacttgttggttctaatgccataagccaatctgcttggttcagctatatctaaggagcttttctaagaatggctatgtggataatctaaatatcgtggagattacatgcataaaagataaaagagtccaaagggtttaggtgaagaaagtgacggtctcctactatcgtaacaactcgaccaattttgtgttcacgttgattttagatggtgactaaagtgattctcatagaagcagactaaaaagctggacgttcggcagtctacaacaacttatggtagccaaaagctgaaacaaacaactccgatatctaccgccacatcactgtccaccgatctgtcgaccattgtcagcatttatctttcacaactttttaatgcactatatataccatcggcctacactatatcaacgccacgtccgttttcctttttacagactccatacacaatgaaacacgggttttaattcaaatatcataagtaaaatgagaaaaaataaataatatatagctagttaaaaataatactacataaattaaacaaagtgcattaaatttaaaaacaataaaagaataaagttattattcagttcggcgaccacgattctattcaaaaactggtttttattgtaccatatggtgttcttgcactggccatataagagcaaccaatgtggtgcaatagaaatttgttgtttaaaaaaggcaaaagttttatagttagtgctacacttcgaattcatatctaaaagaaggataaaattatacgaacgtgggtgaatatgaatgaaagaaggaaaggtgaatgtgggtgaaagaatggaaatatccccatctaattatatggtgaatctagttttttttcttgaatttctttagttttttaattcaaatgctttaaattgagtaggcaaatagaatgctaatacatgtataacactaaccaacaggtaagcatatacaatgtaagcaatacacaacccaacagagcgctggtacaaaatataagaagctaagaatctgttctagatataaaccaaacagtaggcactattagagatataaaccaaacagtaggcatacacaaataaaactgctatagatatgagaatgcaatgttccgaaatctctaaccttgactttcgtcgcaagagcaagtgctagaagttcaaatccttggactgaaaacgcaaagaggcatgagacagtggtggtatatattgggggtgggggatgactggcacatttggcatgcgcagatgtcaacgtgatttggaaggtgcgctcgacattgtcaaatcggcatcgatctcaaattgccaaatggcgtcgatctctaattgcaaattcacgggtaacagcgtaaaacgagaaagtcggtgtttccaaatgggagaacagagccgtgggcgcgtgcggattctcggcacggccagacgactcggtgccaagggaggggggaccgggggagcgtgggtagcggtgtataggacgggagcaccatccgagaacaggaccgtggggcttgggaggcgcggattctcggcgctgaggcggggggagcggggtagcggcacataggctttgggaacgtggttggggagcggctccgaggcgttgcgcgtggagcaccagtgcgcgtggacgcaagaccagattgtcagtgtgtggttagagacgagggctcattaggctggggcattcgtgcgagtcaccgtcgac

SEQ ID NO: 84342 - DNA, 6015 bp, Zea Mays
ggaagcaacaaaccttcgtaccatcagtgaactaacaaagaatccgctatggctatcggataagccttatcttctccaacaaacaacaaataaatcccgccataacatgcatgacgatcgtgctcgccaaagtgatccgtgtcttctacccgctcgccgacatgctccgccaggacgacgcctaccgactcgacggccgcatccaccaggacgacaccgatggcggcgctctcaccgtcgagaacgacgagggcgtggaggtcttcgagggcgaagccgaggccgagcgcgtctccttccacccgctcgtcggtcgcatcctccaggacgaacggcgacgcgctcgccgtcgagggcgacgagggcgtggacttctttgaaggcaggcaagcggcggcaattgctgtcgcgggcgaccatgcagcgcaactggagaaggccgatctagccgccgcgatgatgctcctcctcctcgacgctacctcgctccgctactcgcccgccgcgctggtagccgcgcacgagaggttgtgggcctgcagggtctccatcgccgtacgcacgagaggtttgctaatattgtgagagcgaaagaaattatccaactttagacatcagcaaagccatgttcatatatttttcatttcaatgttatgtgtgcaattacatttattcatctactcattcttacatgcatatttatgtagtaaaactggaatagtgttcatatcaacttagcttaggaacatacatgaattatttgtactacaaaccgaactataggttgtatatactttcgtgcctataccattagtgagggaagtagcgtgcacggtcgtactaccatcttcgtgcattgttttggggtttcaactctgtcatgttctcttattaactaatctgttgttcttttgtttcaagtgcccacacgcagagatttcacaagcgtttttatgcggtttcagatgttgatgagtgtcattaatatgaccagcgtttttaggcgttgctgaaagaaaaaaaataaggcagcaatgttgggtcattaatatgcagattcttgcatatagaatcatattatattgaatgtctctcctacttagagtaaaactaattgcttcttgcatatagactcatattataatagatttcaaatcatcatgtgaatagtatgcaagatctttgctatctactgtagactgtagtatgtgacaatgtaggcatggtcctgttccttgtttctgtacagtttctaccatgttcttgcctccatttatggaacgaaacttgcctgagtatggccacaagccatataaaattttactctcgtgagtacttaatacttatgaaaataaattcaaagggtgaatctcatgatactttgaacaattatattgtgaaaataaattcaatgatgtacctaatgatatttatttggtaatgaactgacggaaacaatttgacaagattatatataacatactaatatacatcagtacataccagattaccagctaataatcaattgatctaagacaatctagacaatgtaggtgtgaactaagattgatttatagagtcactcattatatatgattgtgtgttattgttcctgtgcgccgtcgtatcgcacgggcacagtactagtaatcatgtatggatcgcttggggggtttattccgcgtgcgtgtagtttaggtgcggatcgtttctacgatggtcgtcacgcgctgattgtgagtccatcattattggttttctgttaaaaccgaattccgggtacgcccaagcgtatttgtcagatgtaggctccgagaccctcgagcaattcatgtggaataaaccgatccaacgcgtctgatcaagggtcacggctaattcgactcaaaccggcactatgcatgggtctaaaaaatgatcaatgaataggcgcgtcgccacagaagcgagcaaaaaaagcaacagcgacgcggggcagtggagcggttaaaaatccgccgggcatcggccgcctcctaccccctctagtccaccctgtccccggacaggcagcgtcggagcgccggcgttgccaacgccaacgcggaggcgagacgatcgggaaggaggggagcagaggaaggatacagtccggagcttcagctgtctgctgtctgcggtctgcgggagcgatcacgtctacggtctacagtcgacagttgcgacctccaactggagctggcttcacatagacttctggaggaggcaacgggattgcgatttggaacatggggagttcggtcggctgcttggtaggcggctccaagtcgaggcaagatcagaattgtcaggtcgtcgcgggttcgtctcacagttcaggtacatccgttctgtgagcacatgattcgaggagactactgctcaatagtgtcgtgacttcatttcatcttcgaattgaagaacacttgtgtttgtgtcgctttgcattgaaagcgtggacaacattgtattttttttttcctttttagccacacgtaactgtataccattgacaaagtgacagttatcctatttcagtgcacttctgtgctgacattactttcgtgtctgtgttcttgtgctcaacagcaattgatgatgcaactctgataaaagtgcaggtcatgtcttatcaagagctggaaataatgtacaggtattctccctaaacgagttgaagactgccacacaaaactttcacatgttgaattgcattggccgtgggggtttcggagcagtgtataagggaaacctcaaagatggcactcaaattgcaattaaaaagcttgcagttgagtcaaaacaaagaattagtgaattcttgacagaaattaatgtcatatcaaatgttaggcacccaaaccttgtcaggctgattggttgctgcgctgaagggaaaaacagactattggtgtatgagtatgcggagaataatagtttggcgaatgctttgcttggaccaaagaataaatgtatcccattggactggcagaaaagagctgctatatgtattggaactgcttctggccttgcttttcttcatgagaaagcacaaccatgcattgtccaccgtgatatcaaggctagcaacattttacttgataagaaactgctgcccaaaattggagattttggattggccaagatttttcctgataccgttactcacattagcacgcgtgttgcaggaacaatgggttatttggcaccagagtatgcattgttgggacaattaaccaagaaagcagacatatatagttttggtgtgcttcttctcgaagtgataagtggtgaaaacagcagcaagccgacttgggggcctaatatgcatgttcttgtggaatggacatggaagctgcgagaagaaggaagactcttggaaattgttgatccagaactgaaaaagtacccagaggagcaaatgcttcgtttcatcaaggtggcactgctgtgcacacaagccacgtcccaacagaggccatccatgaagcaggttgtcaatatgctatctaacaaagcagaaattgacctgcaaaatgtagttgcaccaggtgtactgaaagaacctcggcagcgtactggcggctttgggagtttgacagcaggcacgtcctcaaagccaaagcaccaaaggcaatccagctgaatcatacagtacaattgtacaaagaccaacatgaacagctgtcagtttagcacaaccgacgcatcaccaaggtgacgtgatagactgtcagcttgcaagcttgtttgacgtcttcactcttcaaaggtgtcacaaactctagtgatatggaaggcctgatccattttcatcctgttttagagttacgtagtatgcgaaggccgctgtgaattgctgatgtacaggaattgtagctcatcttttttttgttcttttgcaaaagaggaattgtagtttgatttgacgattgattttaccttctggcggccacgttacaaaggacagttattttaggcatcaagttctctatatattagacacatttagtagcagtttatactattcaacgtttttttacaatatactattcaacattgagttgcaactgtacatggttgtttctggcaaccgtactagtaatacaatgaatgtaaaacttaattaaagttgtcggagaaggaatatatataccactagcatataactatgtaatataatttgcaacaaagaggatcacacatgagtgatgagtcgtattgagagtctatactactctactcagtctaccttatctaacaagccatttgcatacttgttggttctaatgccataagccaatctgcttggttcagctatatctaaggagcttttctaagaatggctatgtggataatctaaatatcgtggagattacatgcataaaagataaaagagtccaaagggtttaggtgaagaaagtgacggtctcctactatcgtaacaactcgaccaattttgtgttcacgttgattttagatggtgactaaagtgattctcatagaagcagactaaaaagctggacgttcggcagtctacaacaacttatggtagccaaaagctgaaacaaacaactccgatatctaccgccacatcactgtccaccgatctgtcgaccattgtcagcatttatctttcacaactttttaatgcactatatataccatcggcctacactatatcaacgccacgtccgttttcctttttacagactccatacacaatgaaacacgggttttaattcaaatatcataagtaaaatgagaaaaaataaataatatatagctagttaaaaataatactacataaattaaacaaagtgcattaaatttaaaaacaataaaagaataaagttattattcagttcggcgaccacgattctattcaaaaactggtttttattgtaccatatggtgttcttgcactggccatataagagcaaccaatgtggtgcaatagaaatttgttgtttaaaaaaggcaaaagttttatagttagtgctacacttcgaattcatatctaaaagaaggataaaattatacgaacgtgggtgaatatgaatgaaagaaggaaaggtgaatgtgggtgaaagaatggaaatatccccatctaattatatggtgaatctagttttttttcttgaatttctttagttttttaattcaaatgctttaaattgagtaggcaaatagaatgctaatacatgtataacactaaccaacaggtaagcatatacaatgtaagcaatacacaacccaacagagcgctggtacaaaatataagaagctaagaatctgttctagatataaaccaaacagtaggcactattagagatataaaccaaacagtaggcatacacaaataaaactgctatagatatgagaatgcaatgttccgaaatctctaaccttgactttcgtcgcaagagcaagtgctagaagttcaaatccttggactgaaaacgcaaagaggcatgagacagtggtggtatatattgggggtgggggatgactggcacatttggcatgcgcagatgtcaacgtgatttggaaggtgcgctcgacattgtcaaatcggcatcgatctcaaattgccaaatggcgtcgatctctaattgcaaattcacgggtaacagcgtaaaacgagaaagtcggtgtttccaaatgggagaacagagccgtgggcgcgtgcggattctcggcacggccagacgactcggtgccaagggaggggggaccgggggagcgtgggtagcggtgtataggacgggagcaccatccgagaacaggaccgtggggcttgggaggcgcggattctcggcgctgaggcggggggagcggggtagcggcacataggctttgggaacgtggttggggagcggctccgaggcgttgcgcgtggagcaccagtgcgcgtggacgcaagaccagattgtcagtgtgtggttagagacgagggctcattaggctggggcattcgtgcgagtcaccgtcgac

SEQ ID NO: 84343 - DNA, 6224 bp, Zea Mays
ggaagcaacaaaccttcgtaccatcagtgaactaacaaagaatccgctatggctatcggataagccttatcttctccaacaaacaacaaataaatcccgccataacatgcatgacgatcgtgctcgccaaagtgatccgtgtcttctacccgctcgccgacatgctccgccaggacgacgcctaccgactcgacggccgcatccaccaggacgacaccgatggcggcgctctcaccgtcgagaacgacgagggcgtggaggtcttcgagggcgaagccgaggccgagcgcgtctccttccacccgctcgtcggtcgcatcctccaggacgaacggcgacgcgctcgccgtcgagggcgacgagggcgtggacttctttgaaggcaggcaagcggcggcaattgctgtcgcgggcgaccatgcagcgcaactggagaaggccgatctagccgccgcgatgatgctcctcctcctcgacgctacctcgctccgctactcgcccgccgcgctggtagccgcgcacgagaggttgtgggcctgcagggtctccatcgccgtacgcacgagaggtttgctaatattgtgagagcgaaagaaattatccaactttagacatcagcaaagccatgttcatatatttttcatttcaatgttatgtgtgcaattacatttattcatctactcattcttacatgcatatttatgtagtaaaactggaatagtgttcatatcaacttagcttaggaacatacatgaattatttgtactacaaaccgaactataggttgtatatactttcgtgcctataccattagtgagggaagtagcgtgcacggtcgtactaccatcttcgtgcattgttttggggtttcaactctgtcatgttctcttattaactaatctgttgttcttttgtttcaagtgcccacacgcagagatttcacaagcgtttttatgcggtttcagatgttgatgagtgtcattaatatgaccagcgtttttaggcgttgctgaaagaaaaaaaataaggcagcaatgttgggtcattaatatgcagattcttgcatatagaatcatattatattgaatgtctctcctacttagagtaaaactaattgcttcttgcatatagactcatattataatagatttcaaatcatcatgtgaatagtatgcaagatctttgctatctactgtagactgtagtatgtgacaatgtaggcatggtcctgttccttgtttctgtacagtttctaccatgttcttgcctccatttatggaacgaaacttgcctgagtatggccacaagccatataaaattttactctcgtgagtacttaatacttatgaaaataaattcaaagggtgaatctcatgatactttgaacaattatattgtgaaaataaattcaatgatgtacctaatgatatttatttggtaatgaactgacggaaacaatttgacaagattatatataacatactaatatacatcagtacataccagattaccagctaataatcaattgatctaagacaatctagacaatgtaggtgtgaactaagattgatttatagagtcactcattatatatgattgtgtgttattgttcctgtgcgccgtcgtatcgcacgggcacagtactagtaatcatgtatggatcgcttggggggtttattccgcgtgcgtgtagtttaggtgcggatcgtttctacgatggtcgtcacgcgctgattgtgagtccatcattattggttttctgttaaaaccgaattccgggtacgcccaagcgtatttgtcagatgtaggctccgagaccctcgagcaattcatgtggaataaaccgatccaacgcgtctgatcaagggtcacggctaattcgactcaaaccggcactatgcatgggtctaaaaaatgatcaatgaataggcgcgtcgccacagaagcgagcaaaaaaagcaacagcgacgcggggcagtggagcggttaaaaatccgccgggcatcggccgcctcctaccccctctagtccaccctgtccccggacaggcagcgtcggagcgccggcgttgccaacgccaacgcggaggcgagacgatcgggaaggaggggagcagaggaaggatacagtccggagcttcagctgtctgctgtctgcggtctgcgggagcgatcacgtctacggtctacagtcgacaggttcgtgcccgattcttgtctgctttgctttggggaatggtatggcgcatcgaatccagctattctcatgcgtttttcaagatttttctcattttgtcctcgatttcgccccccttttcagtttatgtagcttgttgcgaacgagcagagtatacaatattgcttcgtctatcgacagttcgacgcgctaaagtaaacaagcttttacagctttatttactgataacttcgcaccctccgcgcagttgcgacctccaactggagctggcttcacatagacttctggaggaggcaacgggattgcgatttggaacatggggagttcggtcggctgcttggtaggcggctccaagtcgaggcaagatcagaattgtcaggtcgtcgcgggttcgtctcacagttcaggtcatgtcttatcaagagctggaaataatgtacaggtattctccctaaacgagttgaagactgccacacaaaactttcacatgttgaattgcattggccgtgggggtttcggagcagtgtataagggaaacctcaaagatggcactcaaattgcaattaaaaagcttgcagttgagtcaaaacaaagaattagtgaattcttgacagaaattaatgtcatatcaaatgttaggcacccaaaccttgtcaggctgattggttgctgcgctgaagggaaaaacagactattggtgtatgagtatgcggagaataatagtttggcgaatgctttgcttggaccaaagaataaatgtatcccattggactggcagaaaagagctgctatatgtattggaactgcttctggccttgcttttcttcatgagaaagcacaaccatgcattgtccaccgtgatatcaaggctagcaacattttacttgataagaaactgctgcccaaaattggagattttggattggccaagatttttcctgataccgttactcacattagcacgcgtgttgcaggaacaatgttagtgcatttctaaatctttttatgtatcttcctctcaaaaagggaacatttccctgtatttacttgcttatatacaatgaacttatgtgtatgtcatgtcgtgtttttttttcattgtgctattctggttttacccagcgattttgttgtttttgctgccagtttaccagggcgccgatcgactaatagtagtctgttataacgtacttgcattgaaatctcaatatataattttcctgcaggggttatttggcaccagagtatgcattgttgggacaattaaccaagaaagcagacatatatagttttggtgtgcttcttctcgaagtgataagtggtgaaaacagcagcaagccgacttgggggcctaatatgcatgttcttgtggaatggacatggaagctgcgagaagaaggaagactcttggaaattgttgatccagaactgaaaaagtacccagaggagcaaatgcttcgtttcatcaaggtggcactgctgtgcacacaagccacgtcccaacagaggccatccatgaagcaggttgtcaatatgctatctaacaaagcagaaattgacctgcaaaatgtagttgcaccaggtgtactgaaagaacctcggcagcgtactggcggctttgggagtttgacagcaggcacgtcctcaaagccaaagcaccaaaggcaatccagctgaatcatacagtacaattgtacaaagaccaacatgaacagctgtcagtttagcacaaccgacgcatcaccaaggtgacgtgatagactgtcagcttgcaagcttgtttgacgtcttcactcttcaaaggtgtcacaaactctagtgatatggaaggcctgatccattttcatcctgttttagagttacgtagtatgcgaaggccgctgtgaattgctgatgtacaggaattgtagctcatcttttttttgttcttttgcaaaagaggaattgtagtttgatttgacgattgattttaccttctggcggccacgttacaaaggacagttattttaggcatcaagttctctatatattagacacatttagtagcagtttatactattcaacgtttttttacaatatactattcaacattgagttgcaactgtacatggttgtttctggcaaccgtactagtaatacaatgaatgtaaaacttaattaaagttgtcggagaaggaatatatataccactagcatataactatgtaatataatttgcaacaaagaggatcacacatgagtgatgagtcgtattgagagtctatactactctactcagtctaccttatctaacaagccatttgcatacttgttggttctaatgccataagccaatctgcttggttcagctatatctaaggagcttttctaagaatggctatgtggataatctaaatatcgtggagattacatgcataaaagataaaagagtccaaagggtttaggtgaagaaagtgacggtctcctactatcgtaacaactcgaccaattttgtgttcacgttgattttagatggtgactaaagtgattctcatagaagcagactaaaaagctggacgttcggcagtctacaacaacttatggtagccaaaagctgaaacaaacaactccgatatctaccgccacatcactgtccaccgatctgtcgaccattgtcagcatttatctttcacaactttttaatgcactatatataccatcggcctacactatatcaacgccacgtccgttttcctttttacagactccatacacaatgaaacacgggttttaattcaaatatcataagtaaaatgagaaaaaataaataatatatagctagttaaaaataatactacataaattaaacaaagtgcattaaatttaaaaacaataaaagaataaagttattattcagttcggcgaccacgattctattcaaaaactggtttttattgtaccatatggtgttcttgcactggccatataagagcaaccaatgtggtgcaatagaaatttgttgtttaaaaaaggcaaaagttttatagttagtgctacacttcgaattcatatctaaaagaaggataaaattatacgaacgtgggtgaatatgaatgaaagaaggaaaggtgaatgtgggtgaaagaatggaaatatccccatctaattatatggtgaatctagttttttttcttgaatttctttagttttttaattcaaatgctttaaattgagtaggcaaatagaatgctaatacatgtataacactaaccaacaggtaagcatatacaatgtaagcaatacacaacccaacagagcgctggtacaaaatataagaagctaagaatctgttctagatataaaccaaacagtaggcactattagagatataaaccaaacagtaggcatacacaaataaaactgctatagatatgagaatgcaatgttccgaaatctctaaccttgactttcgtcgcaagagcaagtgctagaagttcaaatccttggactgaaaacgcaaagaggcatgagacagtggtggtatatattgggggtgggggatgactggcacatttggcatgcgcagatgtcaacgtgatttggaaggtgcgctcgacattgtcaaatcggcatcgatctcaaattgccaaatggcgtcgatctctaattgcaaattcacgggtaacagcgtaaaacgagaaagtcggtgtttccaaatgggagaacagagccgtgggcgcgtgcggattctcggcacggccagacgactcggtgccaagggaggggggaccgggggagcgtgggtagcggtgtataggacgggagcaccatccgagaacaggaccgtggggcttgggaggcgcggattctcggcgctgaggcggggggagcggggtagcggcacataggctttgggaacgtggttggggagcggctccgaggcgttgcgcgtggagcaccagtgcgcgtggacgcaagaccagattgtcagtgtgtggttagagacgagggctcattaggctggggcattcgtgcgagtcaccgtcgac

SEQ ID NO: 84344 - DNA, 5285 bp, Zea Mays
ggaagcaacaaaccttcgtaccatcagtgaactaacaaagaatccgctatggctatcggataagccttatcttctccaacaaacaacaaataaatcccgccataacatgcatgacgatcgtgctcgccaaagtgatccgtgtcttctacccgctcgccgacatgctccgccaggacgacgcctaccgactcgacggccgcatccaccaggacgacaccgatggcggcgctctcaccgtcgagaacgacgagggcgtggaggtcttcgagggcgaagccgaggccgagcgcgtctccttccacccgctcgtcggtcgcatcctccaggacgaacggcgacgcgctcgccgtcgagggcgacgagggcgtggacttctttgaaggcaggcaagcggcggcaattgctgtcgcgggcgaccatgcagcgcaactggagaaggccgatctagccgccgcgatgatgctcctcctcctcgacgctacctcgctccgctactcgcccgccgcgctggtagccgcgcacgagaggttgtgggcctgcagggtctccatcgccgtacgcacgagaggtttgctaatattgtgagagcgaaagaaattatccaactttagacatcagcaaagccatgttcatatatttttcatttcaatgttatgtgtgcaattacatttattcatctactcattcttacatgcatatttatgtagtaaaactggaatagtgttcatatcaacttagcttaggaacatacatgaattatttgtactacaaaccgaactataggttgtatatactttcgtgcctataccattagtgagggaagtagcgtgcacggtcgtactaccatcttcgtgcattgttttggggtttcaactctgtcatgttctcttattaactaatctgttgttcttttgtttcaagtgcccacacgcagagatttcacaagcgtttttatgcggtttcagatgttgatgagtgtcattaatatgaccagcgtttttaggcgttgctgaaagaaaaaaaataaggcagcaatgttgggtcattaatatgcagattcttgcatatagaatcatattatattgaatgtctctcctacttagagtaaaactaattgcttcttgcatatagactcatattataatagatttcaaatcatcatgtgaatagtatgcaagatctttgctatctactgtagactgtagtatgtgacaatgtaggcatggtcctgttccttgtttctgtacagtttctaccatgttcttgcctccatttatggaacgaaacttgcctgagtatggccacaagccatataaaattttactctcgtgagtacttaatacttatgaaaataaattcaaagggtgaatctcatgatactttgaacaattatattgtgaaaataaattcaatgatgtacctaatgatatttatttggtaatgaactgacggaaacaatttgacaagattatatataacatactaatatacatcagtacataccagattaccagctaataatcaattgatctaagacaatctagacaatgtaggtgtgaactaagattgatttatagagtcactcattatatatgattgtgtgttattgttcctgtgcgccgtcgtatcgcacgggcacagtactagtaatcatgtatggatcgcttggggggtttattccgcgtgcgtgtagtttaggtgcggatcgtttctacgatggtcgtcacgcgctgattgtgagtccatcattattggttttctgttaaaaccgaattccgggtacgcccaagcgtatttgtcagatgtaggctccgagaccctcgagcaattcatgtggaataaaccgatccaacgcgtctgatcaagggtcacggctaattcgactcaaaccggcactatgcatgggtctaaaaaatgatcaatgaataggcgcgtcgccacagaagcgagcaaaaaaagcaacagcgacgcggggcagtggagcggttaaaaatccgccgggcatcggccgcctcctaccccctctagtccaccctgtccccggacaggcagcgtcggagcgccggcgttgccaacgccaacgcggaggcgagacgatcgggaaggaggggagcagaggaaggatacagtccggagcttcagctgtctgctgtctgcggtctgcgggagcgatcacgtctacggtctacagtcgacagttgcgacctccaactggagctggcttcacatagacttctggaggaggcaacgggattgcgatttggaacatggggagttcggtcggctgcttggtaggcggctccaagtcgaggcaagatcagaattgtcaggtcgtcgcgggttcgtctcacagttcaggtcatgtcttatcaagagctggaaataatgtacaggtattctccctaaacgagttgaagactgccacacaaaactttcacatgttgaattgcattggccgtgggggtttcggagcagtgtataaggggttatttggcaccagagtatgcattgttgggacaattaaccaagaaagcagacatatatagttttggtgtgcttcttctcgaagtgataagtggtgaaaacagcagcaagccgacttgggggcctaatatgcatgttcttgtggaatggacatggaagctgcgagaagaaggaagactcttggaaattgttgatccagaactgaaaaagtacccagaggagcaaatgcttcgtttcatcaaggtggcactgctgtgcacacaagccacgtcccaacagaggccatccatgaagcaggttgtcaatatgctatctaacaaagcagaaattgacctgcaaaatgtagttgcaccaggtgtactgaaagaacctcggcagcgtactggcggctttgggagtttgacagcaggcacgtcctcaaagccaaagcaccaaaggcaatccagctgaatcatacagtacaattgtacaaagaccaacatgaacagctgtcagtttagcacaaccgacgcatcaccaaggtgacgtgatagactgtcagcttgcaagcttgtttgacgtcttcactcttcaaaggtgtcacaaactctagtgatatggaaggcctgatccattttcatcctgttttagagttacgtagtatgcgaaggccgctgtgaattgctgatgtacaggaattgtagctcatcttttttttgttcttttgcaaaagaggaattgtagtttgatttgacgattgattttaccttctggcggccacgttacaaaggacagttattttaggcatcaagttctctatatattagacacatttagtagcagtttatactattcaacgtttttttacaatatactattcaacattgagttgcaactgtacatggttgtttctggcaaccgtactagtaatacaatgaatgtaaaacttaattaaagttgtcggagaaggaatatatataccactagcatataactatgtaatataatttgcaacaaagaggatcacacatgagtgatgagtcgtattgagagtctatactactctactcagtctaccttatctaacaagccatttgcatacttgttggttctaatgccataagccaatctgcttggttcagctatatctaaggagcttttctaagaatggctatgtggataatctaaatatcgtggagattacatgcataaaagataaaagagtccaaagggtttaggtgaagaaagtgacggtctcctactatcgtaacaactcgaccaattttgtgttcacgttgattttagatggtgactaaagtgattctcatagaagcagactaaaaagctggacgttcggcagtctacaacaacttatggtagccaaaagctgaaacaaacaactccgatatctaccgccacatcactgtccaccgatctgtcgaccattgtcagcatttatctttcacaactttttaatgcactatatataccatcggcctacactatatcaacgccacgtccgttttcctttttacagactccatacacaatgaaacacgggttttaattcaaatatcataagtaaaatgagaaaaaataaataatatatagctagttaaaaataatactacataaattaaacaaagtgcattaaatttaaaaacaataaaagaataaagttattattcagttcggcgaccacgattctattcaaaaactggtttttattgtaccatatggtgttcttgcactggccatataagagcaaccaatgtggtgcaatagaaatttgttgtttaaaaaaggcaaaagttttatagttagtgctacacttcgaattcatatctaaaagaaggataaaattatacgaacgtgggtgaatatgaatgaaagaaggaaaggtgaatgtgggtgaaagaatggaaatatccccatctaattatatggtgaatctagttttttttcttgaatttctttagttttttaattcaaatgctttaaattgagtaggcaaatagaatgctaatacatgtataacactaaccaacaggtaagcatatacaatgtaagcaatacacaacccaacagagcgctggtacaaaatataagaagctaagaatctgttctagatataaaccaaacagtaggcactattagagatataaaccaaacagtaggcatacacaaataaaactgctatagatatgagaatgcaatgttccgaaatctctaaccttgactttcgtcgcaagagcaagtgctagaagttcaaatccttggactgaaaacgcaaagaggcatgagacagtggtggtatatattgggggtgggggatgactggcacatttggcatgcgcagatgtcaacgtgatttggaaggtgcgctcgacattgtcaaatcggcatcgatctcaaattgccaaatggcgtcgatctctaattgcaaattcacgggtaacagcgtaaaacgagaaagtcggtgtttccaaatgggagaacagagccgtgggcgcgtgcggattctcggcacggccagacgactcggtgccaagggaggggggaccgggggagcgtgggtagcggtgtataggacgggagcaccatccgagaacaggaccgtggggcttgggaggcgcggattctcggcgctgaggcggggggagcggggtagcggcacataggctttgggaacgtggttggggagcggctccgaggcgttgcgcgtggagcaccagtgcgcgtggacgcaagaccagattgtcagtgtgtggttagagacgagggctcattaggctggggcattcgtgcgagtcaccgtcgac

SEQ ID NO: 84345 - DNA, 5734 bp, Zea Mays
ggaagcaacaaaccttcgtaccatcagtgaactaacaaagaatccgctatggctatcggataagccttatcttctccaacaaacaacaaataaatcccgccataacatgcatgacgatcgtgctcgccaaagtgatccgtgtcttctacccgctcgccgacatgctccgccaggacgacgcctaccgactcgacggccgcatccaccaggacgacaccgatggcggcgctctcaccgtcgagaacgacgagggcgtggaggtcttcgagggcgaagccgaggccgagcgcgtctccttccacccgctcgtcggtcgcatcctccaggacgaacggcgacgcgctcgccgtcgagggcgacgagggcgtggacttctttgaaggcaggcaagcggcggcaattgctgtcgcgggcgaccatgcagcgcaactggagaaggccgatctagccgccgcgatgatgctcctcctcctcgacgctacctcgctccgctactcgcccgccgcgctggtagccgcgcacgagaggttgtgggcctgcagggtctccatcgccgtacgcacgagaggtttgctaatattgtgagagcgaaagaaattatccaactttagacatcagcaaagccatgttcatatatttttcatttcaatgttatgtgtgcaattacatttattcatctactcattcttacatgcatatttatgtagtaaaactggaatagtgttcatatcaacttagcttaggaacatacatgaattatttgtactacaaaccgaactataggttgtatatactttcgtgcctataccattagtgagggaagtagcgtgcacggtcgtactaccatcttcgtgcattgttttggggtttcaactctgtcatgttctcttattaactaatctgttgttcttttgtttcaagtgcccacacgcagagatttcacaagcgtttttatgcggtttcagatgttgatgagtgtcattaatatgaccagcgtttttaggcgttgctgaaagaaaaaaaataaggcagcaatgttgggtcattaatatgcagattcttgcatatagaatcatattatattgaatgtctctcctacttagagtaaaactaattgcttcttgcatatagactcatattataatagatttcaaatcatcatgtgaatagtatgcaagatctttgctatctactgtagactgtagtatgtgacaatgtaggcatggtcctgttccttgtttctgtacagtttctaccatgttcttgcctccatttatggaacgaaacttgcctgagtatggccacaagccatataaaattttactctcgtgagtacttaatacttatgaaaataaattcaaagggtgaatctcatgatactttgaacaattatattgtgaaaataaattcaatgatgtacctaatgatatttatttggtaatgaactgacggaaacaatttgacaagattatatataacatactaatatacatcagtacataccagattaccagctaataatcaattgatctaagacaatctagacaatgtaggtgtgaactaagattgatttatagagtcactcattatatatgattgtgtgttattgttcctgtgcgccgtcgtatcgcacgggcacagtactagtaatcatgtatggatcgcttggggggtttattccgcgtgcgtgtagtttaggtgcggatcgtttctacgatggtcgtcacgcgctgattgtgagtccatcattattggttttctgttaaaaccgaattccgggtacgcccaagcgtatttgtcagatgtaggctccgagaccctcgagcaattcatgtggaataaaccgatccaacgcgtctgatcaagggtcacggctaattcgactcaaaccggcactatgcatgggtctaaaaaatgatcaatgaataggcgcgtcgccacagaagcgagcaaaaaaagcaacagcgacgcggggcagtggagcggttaaaaatccgccgggcatcggccgcctcctaccccctctagtccaccctgtccccggacaggcagcgtcggagcgccggcgttgccaacgccaacgcggaggcgagacgatcgggaaggaggggagcagaggaaggatacagtccggagcttcagctgtctgctgtctgcggtctgcgggagcgatcacgtctacggtctacagtcgacagttgcgacctccaactggagctggcttcacatagacttctggaggaggcaacgggattgcgatttggaacatggggagttcggtcggctgcttggtaggcggctccaagtcgaggcaagatcagaattgtcaggtcgtcgcgggttcgtctcacagttcaggtcatgtcttatcaagagctggaaataatgtacaggtattctccctaaacgagttgaagactgccacacaaaactttcacatgttgaattgcattggccgtgggggtttcggagcagtgtataagggaaacctcaaagatggcactcaaattgcaattaaaaagcttgcagttgagtcaaaacaaagaattagtgaattcttgacagaaattaatgtcatatcaaatgttaggcacccaaaccttgtcaggctgattggttgctgcgctgaagggaaaaacagactattggtgtatgagtatgcggagaataatagtttggcgaatgctttgcttggaccaaagaataaatgtatcccattggactggcagaaaagagctgctatatgtattggaactgcttctggccttgcttttcttcatgagaaagcacaaccatgcattgtccaccgtgatatcaaggctagcaacattttacttgataagaaactgctgcccaaaattggagattttggattggccaagatttttcctgataccgttactcacattagcacgcgtgttgcaggaacaatgggttatttggcaccagagtatgcattgttgggacaattaaccaagaaagcagacatatatagttttggtgtgcttcttctcgaagtgataagtggtgaaaacagcagcaagccgacttgggggcctaatatgcatgttcttgtggaatggacatggaagctgcgagaagaaggaagactcttggaaattgttgatccagaactgaaaaagtacccagaggagcaaatgcttcgtttcatcaaggtggcactgctgtgcacacaagccacgtcccaacagaggccatccatgaagcaggttgtcaatatgctatctaacaaagcagaaattgacctgcaaaatgtagttgcaccaggtgtactgaaagaacctcggcagcgtactggcggctttgggagtttgacagcaggcacgtcctcaaagccaaagcaccaaaggcaatccagctgaatcatacagtacaattgtacaaagaccaacatgaacagctgtcagtttagcacaaccgacgcatcaccaaggtgacgtgatagactgtcagcttgcaagcttgtttgacgtcttcactcttcaaaggtgtcacaaactctagtgatatggaaggcctgatccattttcatcctgttttagagttacgtagtatgcgaaggccgctgtgaattgctgatgtacaggaattgtagctcatcttttttttgttcttttgcaaaagaggaattgtagtttgatttgacgattgattttaccttctggcggccacgttacaaaggacagttattttaggcatcaagttctctatatattagacacatttagtagcagtttatactattcaacgtttttttacaatatactattcaacattgagttgcaactgtacatggttgtttctggcaaccgtactagtaatacaatgaatgtaaaacttaattaaagttgtcggagaaggaatatatataccactagcatataactatgtaatataatttgcaacaaagaggatcacacatgagtgatgagtcgtattgagagtctatactactctactcagtctaccttatctaacaagccatttgcatacttgttggttctaatgccataagccaatctgcttggttcagctatatctaaggagcttttctaagaatggctatgtggataatctaaatatcgtggagattacatgcataaaagataaaagagtccaaagggtttaggtgaagaaagtgacggtctcctactatcgtaacaactcgaccaattttgtgttcacgttgattttagatggtgactaaagtgattctcatagaagcagactaaaaagctggacgttcggcagtctacaacaacttatggtagccaaaagctgaaacaaacaactccgatatctaccgccacatcactgtccaccgatctgtcgaccattgtcagcatttatctttcacaactttttaatgcactatatataccatcggcctacactatatcaacgccacgtccgttttcctttttacagactccatacacaatgaaacacgggttttaattcaaatatcataagtaaaatgagaaaaaataaataatatatagctagttaaaaataatactacataaattaaacaaagtgcattaaatttaaaaacaataaaagaataaagttattattcagttcggcgaccacgattctattcaaaaactggtttttattgtaccatatggtgttcttgcactggccatataagagcaaccaatgtggtgcaatagaaatttgttgtttaaaaaaggcaaaagttttatagttagtgctacacttcgaattcatatctaaaagaaggataaaattatacgaacgtgggtgaatatgaatgaaagaaggaaaggtgaatgtgggtgaaagaatggaaatatccccatctaattatatggtgaatctagttttttttcttgaatttctttagttttttaattcaaatgctttaaattgagtaggcaaatagaatgctaatacatgtataacactaaccaacaggtaagcatatacaatgtaagcaatacacaacccaacagagcgctggtacaaaatataagaagctaagaatctgttctagatataaaccaaacagtaggcactattagagatataaaccaaacagtaggcatacacaaataaaactgctatagatatgagaatgcaatgttccgaaatctctaaccttgactttcgtcgcaagagcaagtgctagaagttcaaatccttggactgaaaacgcaaagaggcatgagacagtggtggtatatattgggggtgggggatgactggcacatttggcatgcgcagatgtcaacgtgatttggaaggtgcgctcgacattgtcaaatcggcatcgatctcaaattgccaaatggcgtcgatctctaattgcaaattcacgggtaacagcgtaaaacgagaaagtcggtgtttccaaatgggagaacagagccgtgggcgcgtgcggattctcggcacggccagacgactcggtgccaagggaggggggaccgggggagcgtgggtagcggtgtataggacgggagcaccatccgagaacaggaccgtggggcttgggaggcgcggattctcggcgctgaggcggggggagcggggtagcggcacataggctttgggaacgtggttggggagcggctccgaggcgttgcgcgtggagcaccagtgcgcgtggacgcaagaccagattgtcagtgtgtggttagagacgagggctcattaggctggggcattcgtgcgagtcaccgtcgac

SEQ ID NO: 84346 - DNA, 1872 bp, Zea Mays
gctattttgaaagttttccaaattctccgaaggaaccttgtcaaacattgaaagaaatgagatacaatggcagaggagtgaacggctgaggcaatctatactggaaaaagttcaggcaaagcaatttgaggcactggcctcagttgaggacaagatactcagaaaaataagggacaaagaggcggaagtggagaccataaacaaaaggaactctgaactagaggaccagattaagcatttgggagtggaagttggtgcttggcagcatagggccaagtacaatgaaagcatgatcaatgcactcaagtacaacttggaacaggtttgtgctcaccagagcaaggatttcaaggaaggctgcggcgatagcgaggtagatgacacggcgtcctgtcgcgatggtggtgctatcaattttcaactgactccgaaggagaacagacaaccgaaggatttgacggcttgcagggtctgcaaatcaagtgaggcatccatgctcttgctgccttgtcggcatctttgtctatgcaaggagtgcgagagcaagctgagcttctgccccctgtgccagtcctccaagatacttggcatggagatatattatgcgtagaatagaatttatgtatcacatgagtatcgtacgagatactgctatgttaatacgattaatctattgccaaactttagaacctatgtaccagtaccactatgacttgccactggatcaaaagacactgccgttgatggtagatttaccgcagcaaatttctgtgagaagcccatcgttgatttgtgctcctggttaacttcttggcggagtttgtcttgtgcgactgattgttaccgtccgtctgtatttccatcacctgaacttctgaggccgtgtttcgaactcagaaaatttacccggctcctgtgctttcactgctacattgacttggcaatttggtaaatatttatgtgtatatataaatagagtgtcaaactgttttttttagataatgggaaaaaggttcccggcctacatcaaagatgacggccgtccaaaaaacagtagtactgccagaaaataaaagaagccacaagcggcaaaaagacccaagcacagttgggattgaataactagccactagttattctatttctaaagctccaaccgtgcttggcgaagatttgcatcattgagacttccagggtcctgcaggcaactttgatccttacgatgtcctcttcacgcctttggagaagcccccagaaccgacaccaataagtccctcgaaagagtacctgcaagtaagttataataggcttcttatcaaaaaccacatcatttcgacttagccacaacgcccagcagattgctatggcaccaacataaatctttgcctttgtttctttatcgaacttctgcaaccaggaggatcccatatcctgtatgctagttggttctctaataccaaaggtaaagaaaatcgttcaccaaagaaatctagcatagtgacaatcgaagaaaagatgttggatggtctcgtcatgagaacaaaacatacacttttttgattctacccagtttcttttgattaggttgtcttttgtcaagatcaccccccgtgttaggaaccagcagaatatcttaatttttagtggtactttaagtttccagatgagagactcttgacggtgtattcccctctcaatcaaggctgcatacatcgagtgagaggagaacttcccgttttggtgaaggctccaactgaaagtgtcttttgattggtttaatgaaaggcccactaccctgttaactagcgaataccaccgtcccaagttatctccatgcaatcccctgcgaaaggatacatttagcgggacagt

SEQ ID NO: 84347 - DNA, 1921 bp, Zea Mays
gttgcttttacttaaaaaccacagcatcgagttgaataattgaaggggaggagatgaagaaaaagagggtatgggcaataatgtggaaaccaggaaagttgggaagcttggttgcgtgtgcttcaagtgaacggctgaggcaatctatactggaaaaagttcaggcaaagcaatttgaggcactggcctcagttgaggacaagatactcagaaaaataagggacaaagaggcggaagtggagaccataaacaaaaggaactctgaactagaggaccagattaagcatttgggagtggaagttggtgcttggcagcatagggccaagtacaatgaaagcatgatcaatgcactcaagtacaacttggaacaggtttgtgctcaccagagcaaggatttcaaggaaggctgcggcgatagcgaggtagatgacacggcgtcctgtcgcgatggtggtgctatcaattttcaactgactccgaaggagaacagacaaccgaaggatttgacggcttgcagggtctgcaaatcaagtgaggcatccatgctcttgctgccttgtcggcatctttgtctatgcaaggagtgcgagagcaagctgagcttctgccccctgtgccagtcctccaagatacttggcatggagatatattatgcgtagaatagaatttatgtatcacatgagtatcgtacgagatactgctatgttaatacgattaatctattgccaaactttagaacctatgtaccagtaccactatgacttgccactggatcaaaagacactgccgttgatggtagatttaccgcagcaaatttctgtgagaagcccatcgttgatttgtgctcctggttaacttcttggcggagtttgtcttgtgcgactgattgttaccgtccgtctgtatttccatcacctgaacttctgaggccgtgtttcgaactcagaaaatttacccggctcctgtgctttcactgctacattgacttggcaatttggtaaatatttatgtgtatatataaatagagtgtcaaactgttttttttagataatgggaaaaaggttcccggcctacatcaaagatgacggccgtccaaaaaacagtagtactgccagaaaataaaagaagccacaagcggcaaaaagacccaagcacagttgggattgaataactagccactagttattctatttctaaagctccaaccgtgcttggcgaagatttgcatcattgagacttccagggtcctgcaggcaactttgatccttacgatgtcctcttcacgcctttggagaagcccccagaaccgacaccaataagtccctcgaaagagtacctgcaagtaagttataataggcttcttatcaaaaaccacatcatttcgacttagccacaacgcccagcagattgctatggcaccaacataaatctttgcctttgtttctttatcgaacttctgcaaccaggaggatcccatatcctgtatgctagttggttctctaataccaaaggtaaagaaaatcgttcaccaaagaaatctagcatagtgacaatcgaagaaaagatgttggatggtctcgtcatgagaacaaaacatacacttttttgattctacccagtttcttttgattaggttgtcttttgtcaagatcaccccccgtgttaggaaccagcagaatatcttaatttttagtggtactttaagtttccagatgagagactcttgacggtgtattcccctctcaatcaaggctgcatacatcgagtgagaggagaacttcccgttttggtgaaggctccaactgaaagtgtcttttgattggtttaatgaaaggcccactaccctgttaactagcgaataccaccgtcccaagttatctccatgcaatcccctgcgaaaggatacatttagcgggacagt

SEQ ID NO: 84348 - DNA, 1848 bp, Zea Mays
aactgttgatgcattaaggtgtccgtgtgcaactgtgtgctgtgtgctttgtagtgaacggctgaggcaatctatactggaaaaagttcaggcaaagcaatttgaggcactggcctcagttgaggacaagatactcagaaaaataagggacaaagaggcggaagtggagaccataaacaaaaggaactctgaactagaggaccagattaagcatttgggagtggaagttggtgcttggcagcatagggccaagtacaatgaaagcatgatcaatgcactcaagtacaacttggaacaggtttgtgctcaccagagcaaggatttcaaggaaggctgcggcgatagcgaggtagatgacacggcgtcctgtcgcgatggtggtgctatcaattttcaactgactccgaaggagaacagacaaccgaaggatttgacggcttgcagggtctgcaaatcaagtgaggcatccatgctcttgctgccttgtcggcatctttgtctatgcaaggagtgcgagagcaagctgagcttctgccccctgtgccagtcctccaagatacttggcatggagatatattatgcgtagaatagaatttatgtatcacatgagtatcgtacgagatactgctatgttaatacgattaatctattgccaaactttagaacctatgtaccagtaccactatgacttgccactggatcaaaagacactgccgttgatggtagatttaccgcagcaaatttctgtgagaagcccatcgttgatttgtgctcctggttaacttcttggcggagtttgtcttgtgcgactgattgttaccgtccgtctgtatttccatcacctgaacttctgaggccgtgtttcgaactcagaaaatttacccggctcctgtgctttcactgctacattgacttggcaatttggtaaatatttatgtgtatatataaatagagtgtcaaactgttttttttagataatgggaaaaaggttcccggcctacatcaaagatgacggccgtccaaaaaacagtagtactgccagaaaataaaagaagccacaagcggcaaaaagacccaagcacagttgggattgaataactagccactagttattctatttctaaagctccaaccgtgcttggcgaagatttgcatcattgagacttccagggtcctgcaggcaactttgatccttacgatgtcctcttcacgcctttggagaagcccccagaaccgacaccaataagtccctcgaaagagtacctgcaagtaagttataataggcttcttatcaaaaaccacatcatttcgacttagccacaacgcccagcagattgctatggcaccaacataaatctttgcctttgtttctttatcgaacttctgcaaccaggaggatcccatatcctgtatgctagttggttctctaataccaaaggtaaagaaaatcgttcaccaaagaaatctagcatagtgacaatcgaagaaaagatgttggatggtctcgtcatgagaacaaaacatacacttttttgattctacccagtttcttttgattaggttgtcttttgtcaagatcaccccccgtgttaggaaccagcagaatatcttaatttttagtggtactttaagtttccagatgagagactcttgacggtgtattcccctctcaatcaaggctgcatacatcgagtgagaggagaacttcccgttttggtgaaggctccaactgaaagtgtcttttgattggtttaatgaaaggcccactaccctgttaactagcgaataccaccgtcccaagttatctccatgcaatcccctgcgaaaggatacatttagcgggacagt

SEQ ID NO: 84349 - DNA, 2364 bp, Zea Mays
ttatcgttttgccatttgccaacccaactcccgattcccgaaggcccatttcgtcgtctctcgctccctcggtccttccttcacccatctcacccgcgacccgcccctttcccctaagccatctccttcctcctcacctcgccatggcgttcttctctcatcaccatctccagcagccacacgcgcagcagccagtgctcccttccttcagatcccagcgcccctcaccttcttcaacccgccgcctgccttcccggagcaacccgcgcaggcacctctggtggatgcggtgggcttgacggcagctgcggggcttgggtggaggcagccgagggagcaggaactgcttggggaaaactcccagatgtcgtccattgattttctgcagacgggctcggcagtgtcgacggggttggcgctgtctctggaggaccggcgccacgtcggcggcggggctgggaactcctctggcgattcaccgctgctcctgctgcccatgctggacgatgacatctcacgcgaggtccagcggcttgacgctgatatggaccgctttattaaagctcagagtgaacggctgaggcaatctatactggaaaaagttcaggcaaagcaatttgaggcactggcctcagttgaggacaagatactcagaaaaataagggacaaagaggcggaagtggagaccataaacaaaaggaactctgaactagaggaccagattaagcatttgggagtggaagttggtgcttggcagcatagggccaagtacaatgaaagcatgatcaatgcactcaagtacaacttggaacaggtttgtgctcaccagagcaaggatttcaaggaaggctgcggcgatagcgaggtagatgacacggcgtcctgtcgcgatggtggtgctatcaattttcaactgactccgaaggagaacagacaaccgaaggatttgacggcttgcagggtctgcaaatcaagtgaggcatccatgctcttgctgccttgtcggcatctttgtctatgcaaggagtgcgagagcaagctgagcttctgccccctgtgccagtcctccaagatacttggcatggagatatattatgcgtagaatagaatttatgtatcacatgagtatcgtacgagatactgctatgttaatacgattaatctattgccaaactttagaacctatgtaccagtaccactatgacttgccactggatcaaaagacactgccgttgatggtagatttaccgcagcaaatttctgtgagaagcccatcgttgatttgtgctcctggttaacttcttggcggagtttgtcttgtgcgactgattgttaccgtccgtctgtatttccatcacctgaacttctgaggccgtgtttcgaactcagaaaatttacccggctcctgtgctttcactgctacattgacttggcaatttggtaaatatttatgtgtatatataaatagagtgtcaaactgttttttttagataatgggaaaaaggttcccggcctacatcaaagatgacggccgtccaaaaaacagtagtactgccagaaaataaaagaagccacaagcggcaaaaagacccaagcacagttgggattgaataactagccactagttattctatttctaaagctccaaccgtgcttggcgaagatttgcatcattgagacttccagggtcctgcaggcaactttgatccttacgatgtcctcttcacgcctttggagaagcccccagaaccgacaccaataagtccctcgaaagagtacctgcaagtaagttataataggcttcttatcaaaaaccacatcatttcgacttagccacaacgcccagcagattgctatggcaccaacataaatctttgcctttgtttctttatcgaacttctgcaaccaggaggatcccatatcctgtatgctagttggttctctaataccaaaggtaaagaaaatcgttcaccaaagaaatctagcatagtgacaatcgaagaaaagatgttggatggtctcgtcatgagaacaaaacatacacttttttgattctacccagtttcttttgattaggttgtcttttgtcaagatcaccccccgtgttaggaaccagcagaatatcttaatttttagtggtactttaagtttccagatgagagactcttgacggtgtattcccctctcaatcaaggctgcatacatcgagtgagaggagaacttcccgttttggtgaaggctccaactgaaagtgtcttttgattggtttaatgaaaggcccactaccctgttaactagcgaataccaccgtcccaagttatctccatgcaatcccctgcgaaaggatacatttagcgggacagt

SEQ ID NO: 84350 - DNA, 2416 bp, Zea Mays
ttatcgttttgccatttgccaacccaactcccgattcccgaaggcccatttcgtcgtctctcgctccctcggtccttccttcacccatctcacccgcgacccgcccctttcccctaagccatctccttcctcctcacctcgccatggcgttcttctctcatcaccatctccagcagccacacgcgcagcagccagtgctcccttccttcaggaacgcgctaccggtgcctgtggatggccagatcccagcgcccctcaccttcttcaacccgccgcctgccttcccggagcaacccgcgcaggcacctctggtggatgcggtgggcttgacggcagctgcggggcttgggtggaggcagccgagggagcaggaactgcttggggaaaactcccagatgtcgtccattgattttctgcagacgggctcggcagtgtcgacggggttggcgctgtctctggaggaccggcgccacgtcggcggcggggctgggaactcctctggcgattcaccgctgctcctgctgcccatgctggacgatgacatctcacgcgaggtccagcggcttgacgctgatatggaccgctttattaaagctcaggtcacccactcatctttattgagtgaacggctgaggcaatctatactggaaaaagttcaggcaaagcaatttgaggcactggcctcagttgaggacaagatactcagaaaaataagggacaaagaggcggaagtggagaccataaacaaaaggaactctgaactagaggaccagattaagcatttgggagtggaagttggtgcttggcagcatagggccaagtacaatgaaagcatgatcaatgcactcaagtacaacttggaacaggtttgtgctcaccagagcaaggatttcaaggaaggctgcggcgatagcgaggtagatgacacggcgtcctgtcgcgatggtggtgctatcaattttcaactgactccgaaggagaacagacaaccgaaggatttgacggcttgcagggtctgcaaatcaagtgaggcatccatgctcttgctgccttgtcggcatctttgtctatgcaaggagtgcgagagcaagctgagcttctgccccctgtgccagtcctccaagatacttggcatggagatatattatgcgtagaatagaatttatgtatcacatgagtatcgtacgagatactgctatgttaatacgattaatctattgccaaactttagaacctatgtaccagtaccactatgacttgccactggatcaaaagacactgccgttgatggtagatttaccgcagcaaatttctgtgagaagcccatcgttgatttgtgctcctggttaacttcttggcggagtttgtcttgtgcgactgattgttaccgtccgtctgtatttccatcacctgaacttctgaggccgtgtttcgaactcagaaaatttacccggctcctgtgctttcactgctacattgacttggcaatttggtaaatatttatgtgtatatataaatagagtgtcaaactgttttttttagataatgggaaaaaggttcccggcctacatcaaagatgacggccgtccaaaaaacagtagtactgccagaaaataaaagaagccacaagcggcaaaaagacccaagcacagttgggattgaataactagccactagttattctatttctaaagctccaaccgtgcttggcgaagatttgcatcattgagacttccagggtcctgcaggcaactttgatccttacgatgtcctcttcacgcctttggagaagcccccagaaccgacaccaataagtccctcgaaagagtacctgcaagtaagttataataggcttcttatcaaaaaccacatcatttcgacttagccacaacgcccagcagattgctatggcaccaacataaatctttgcctttgtttctttatcgaacttctgcaaccaggaggatcccatatcctgtatgctagttggttctctaataccaaaggtaaagaaaatcgttcaccaaagaaatctagcatagtgacaatcgaagaaaagatgttggatggtctcgtcatgagaacaaaacatacacttttttgattctacccagtttcttttgattaggttgtcttttgtcaagatcaccccccgtgttaggaaccagcagaatatcttaatttttagtggtactttaagtttccagatgagagactcttgacggtgtattcccctctcaatcaaggctgcatacatcgagtgagaggagaacttcccgttttggtgaaggctccaactgaaagtgtcttttgattggtttaatgaaaggcccactaccctgttaactagcgaataccaccgtcccaagttatctccatgcaatcccctgcgaaaggatacatttagcgggacagt

SEQ ID NO: 84351 - DNA, 2634 bp, Zea Mays
agtatctcatttttcatgtattttgacgaaagtacaggggtgttagcaaaaaccagtaaaccacacatgtacagttactggcgcataagcaaagacaagtatttacatggcccagtatgtcagtcacagatacaatgcatagctgtgtattccttaattttttgagcaaatgtgtattgcttatcgttttgccatttgccaacccaactcccgattcccgaaggcccatttcgtcgtctctcgctccctcggtccttccttcacccatctcacccgcgacccgcccctttcccctaagccatctccttcctcctcacctcgccatggcgttcttctctcatcaccatctccagcagccacacgcgcagcagccagtgctcccttccttcaggaacgcgctaccggtgcctgtggatggccagatcccagcgcccctcaccttcttcaacccgccgcctgccttcccggagcaacccgcgcaggcacctctggtggatgcggtgggcttgacggcagctgcggggcttgggtggaggcagccgagggagcaggaactgcttggggaaaactcccagatgtcgtccattgattttctgcagacgggctcggcagtgtcgacggggttggcgctgtctctggaggaccggcgccacgtcggcggcggggctgggaactcctctggcgattcaccgctgctcctgctgcccatgctggacgatgacatctcacgcgaggtccagcggcttgacgctgatatggaccgctttattaaagctcagatctggacttctcgaggttgaggttgagatgggctacatatgtacttgtacattggctgagtgaacggctgaggcaatctatactggaaaaagttcaggcaaagcaatttgaggcactggcctcagttgaggacaagatactcagaaaaataagggacaaagaggcggaagtggagaccataaacaaaaggaactctgaactagaggaccagattaagcatttgggagtggaagttggtgcttggcagcatagggccaagtacaatgaaagcatgatcaatgcactcaagtacaacttggaacaggtttgtgctcaccagagcaaggatttcaaggaaggctgcggcgatagcgaggtagatgacacggcgtcctgtcgcgatggtggtgctatcaattttcaactgactccgaaggagaacagacaaccgaaggatttgacggcttgcagggtctgcaaatcaagtgaggcatccatgctcttgctgccttgtcggcatctttgtctatgcaaggagtgcgagagcaagctgagcttctgccccctgtgccagtcctccaagatacttggcatggagatatattatgcgtagaatagaatttatgtatcacatgagtatcgtacgagatactgctatgttaatacgattaatctattgccaaactttagaacctatgtaccagtaccactatgacttgccactggatcaaaagacactgccgttgatggtagatttaccgcagcaaatttctgtgagaagcccatcgttgatttgtgctcctggttaacttcttggcggagtttgtcttgtgcgactgattgttaccgtccgtctgtatttccatcacctgaacttctgaggccgtgtttcgaactcagaaaatttacccggctcctgtgctttcactgctacattgacttggcaatttggtaaatatttatgtgtatatataaatagagtgtcaaactgttttttttagataatgggaaaaaggttcccggcctacatcaaagatgacggccgtccaaaaaacagtagtactgccagaaaataaaagaagccacaagcggcaaaaagacccaagcacagttgggattgaataactagccactagttattctatttctaaagctccaaccgtgcttggcgaagatttgcatcattgagacttccagggtcctgcaggcaactttgatccttacgatgtcctcttcacgcctttggagaagcccccagaaccgacaccaataagtccctcgaaagagtacctgcaagtaagttataataggcttcttatcaaaaaccacatcatttcgacttagccacaacgcccagcagattgctatggcaccaacataaatctttgcctttgtttctttatcgaacttctgcaaccaggaggatcccatatcctgtatgctagttggttctctaataccaaaggtaaagaaaatcgttcaccaaagaaatctagcatagtgacaatcgaagaaaagatgttggatggtctcgtcatgagaacaaaacatacacttttttgattctacccagtttcttttgattaggttgtcttttgtcaagatcaccccccgtgttaggaaccagcagaatatcttaatttttagtggtactttaagtttccagatgagagactcttgacggtgtattcccctctcaatcaaggctgcatacatcgagtgagaggagaacttcccgttttggtgaaggctccaactgaaagtgtcttttgattggtttaatgaaaggcccactaccctgttaactagcgaataccaccgtcccaagttatctccatgcaatcccctgcgaaaggatacatttagcgggacagt

SEQ ID NO: 84352 - DNA, 763 bp, Zea Mays
aataggtttagatacacacggacacaccaggttcgagggttcgagcggtcgagcctggtgacctgatccctgtgctggtcaacgtcaaccgagtccgaaccgcatcgatcggacggtctcacgacgacgaaggtgttgtgaaagacaaacggactatatggcgactgagcataatctcagacttcttctgggccattgtgagctttatcagaatcttctttgacacactgttctcattggacaaaactgacaacttcaagaaagggtatggtgctggtaagaagtgggatggtggacctggtggtggtgggcggggcccatatggcggtggaggaggtggaggattcggcggcggaggtggaggtggttcacggggtcctcgcactctatctgacatccaatccaatgaccacagttctctccctgcttgtggatcctgctgtggctaataagcgtgcaaccgttccgcctgatgactacgtataacaaatgaatacacatgcttctgtatgttctgaagaacatcgtagctattgatatgtattttactgtcagacgattgtatcataatcgatatgtcgtttattaacagcctatttacctgtagcttgactctggcatgattcgcatggtacattcatggttcatctttcgtgtaccgctgcctgattgcataataactagatcagttacaaagtttaataaattgtctggtgtgctgttctgttaatgtcttgtatagcagtaattggtgaatacaaac

SEQ ID NO: 84353 - DNA, 425 bp, Zea Mays
cacgtggttgcccacgcctgcacacgcccacgtcgtgctcacaagtgcggcaaccgctcgcctggcagctgcacaaaagccttcgatccctttcgtttatacctcgctacactgcatcttgccgcgtccacgtaggaaccatcacgcgctcgcctcgtcggagcagccacaggagcatcgtcgcgtccgcgcttcatcctcgccgtcgtcgagtcgtcactttggagctccaccagactccacgaggtcgccttgccgagtcgccgacgtccatggcgcggagttctctgtcgctgtccacgttccatcttcaacggcgagcctctgtgtctccgtgtctaggttctctggaggagatggttgccgggataacttggtcgtccaccttgccaccgggttggactgttgagtgggaccctgcctcg

SEQ ID NO: 84354 - DNA, 770 bp, Zea Mays
cacgtggttgcccacgcctgcacacgcccacgtcgtgctcacaagtgcggcaaccgctcgcctggcagctgcacaaaagccttcgatccctttcgtttatacctcgctacactgcatcttgccgcgtccacgtaggaaccatcacgcgctcgcctcgtcggagcagccacaggagcatcgtcgcgtccgcgcttcatcctcgccgtcgtcgagtcgtcactttggagctccaccagactccacgaggtcgccttgccgagtcgccgacgtccatggcgcggagttctctgtcgctgtccacgttccatcttcaacggcgagcctctgtgtctccgtgtctagatcgcgatttgttcctgcgcttcgaggaatcgatgatcaagcttcggcgatcaagtgatctagctcttcgagttccatgaggctgaagaacctgagcatctgtttggtgaaggcaagtgtcctctgacccattatgtcctatttactttataattcactgtcccgcatactatgaacaacctaaggattgactagctttctatttacctggtccttgattaccttttgggctactatggttagcttcatgctagcgctttactttaatcaatgaacatgatgagatacaatgatgatactatgattttattctggatatgatgatatacttgtggcatttaggggactcgggctgtttcccgagtacctctccgtaaggacctgtttgttgagagaccacccgggataacagtgcaaccatgagggtg

SEQ ID NO: 84355 - DNA, 1752 bp, Zea Mays
gtcctcctcaacgtgggtgcgttcctagtcactcgatgaggtccctgtcatgggtgcaggaggaaggagatgcttttgcatttttgtggcgacgtggcacaaggggagaggaggcgacaggtgacaggcgacaaagatcctagagggatgactgccctggagaggcgacagtcctagaggggtggcgtccagggaaggagcaaaagcgagattagactcatgataccatgttagatgagctcgcacagaaggagctgcagaaaataaacatgtataaagctccaagggataagcttgcctgcattctgaactgctgtaaagttataaataatttacttctaaatgcttccattgtgtccaatgaaaccccccctggagctgacgaattccttccagtccttatctacgtcaccataaagctccactcaaatctgttgtacatacaaagatatagacggcaaacaagattggtgtcagaggctcaatacttttttacaaacatattgtctgctgagtctttcatatggaacattgatggggaatcattatcgatgaatgaattggattttcaaaggagaatggattcagcaagggaacgcatgttggggttatcagctgactcagaataccaggataatcaagccaatcctgatgtccaagatcgtacgtcacaaagtcttggagctaacagaaattctgatgccagtttatctttgaaagaccacgtccaaggttcagggcaggatatgagaagggacagtgatgtgactgtgagtggtaaacaagctgagcaggtgcaatctatttctgaattagagaagaaaggaactgcggagctcctcaatgaggatgacttgaacaaaaaattccaggagtacccgtttctgtttgcccgtgctggtgatctgactattgctgatgtagagagcctattgaattcgtacaagcatctagtacttcggtatgtagcacttgcacaaggtatgggtgtcagtcctgaaaccactcttactcagaacgggcagacatctgatcttgtagtatctgaggagccagaaattttgaatagcgtggtaaaggacaacgagaacagtgcaataattaacaaaaatgttgatgatgttataagcttaaaccatcattcagaagcagttgacacagaagcatctgaacaaatgaaccagagaactgctgttgattccagtgatgatctggaggcattgggtcggcctgagaatgcatgacctgctggttaagccaagatgaaatggccatacatggcagaagtactctgaagtttgttcttatacctatagacgacaatgatcacaaaacagagtgcacatttccctgagtgatatgcagcagctcctcgaaccacaattttgtatgctggaggcttgagcgtcaacatagtggaaattaatctactctgccgaagctgttcttagatccaaatgttcattgcattgaagttcctggactcttggctctgttgtaggtccaatttgtggtgaacacaccctttcatgtttttatgtaactataatttccgtaagtgaagattagttcatataaaaaattatattcagagcaaagagtgaaaatgccatgagcgtatggtgccatagaaaaacctgttgcttcaggtttcggcagtcgctggccttcgagagagaatttatcacctgtacaaacgtgaattgtaagccagtttttttactttatccaagccaaactcttttttactac

SEQ ID NO: 84356 - DNA, 1556 bp, Zea Mays
agactactggccagccactccatttacgtattactcttccattctcgcacagaaggagctgcagaaaataaacatgtataaagctccaagggataagcttgcctgcattctgaactgctgtaaagttataaataatttacttctaaatgcttccattgtgtccaatgaaaccccccctggagctgacgaattccttccagtccttatctacgtcaccataaagctccactcaaatctgttgtacatacaaagatatagacggcaaacaagattggtgtcagaggctcaatacttttttacaaacatattgtctgctgagtctttcatatggaacattgatggggaatcattatcgatgaatgaattggattttcaaaggagaatggattcagcaagggaacgcatgttggggttatcagctgactcagaataccaggataatcaagccaatcctgatgtccaagatcgtacgtcacaaagtcttggagctaacagaaattctgatgccagtttatctttgaaagaccacgtccaaggttcagggcaggatatgagaagggacagtgatgtgactgtgagtggtaaacaagctgagcaggtgcaatctatttctgaattagagaagaaaggaactgcggagctcctcaatgaggatgacttgaacaaaaaattccaggagtacccgtttctgtttgcccgtgctggtgatctgactattgctgatgtagagagcctattgaattcgtacaagcatctagtacttcggtatgtagcacttgcacaaggtatgggtgtcagtcctgaaaccactcttactcagaacgggcagacatctgatcttgtagtatctgaggagccagaaattttgaatagcgtggtaaaggacaacgagaacagtgcaataattaacaaaaatgttgatgatgttataagcttaaaccatcattcagaagcagttgacacagaagcatctgaacaaatgaaccagagaactgctgttgattccagtgatgatctggaggcattgggtcggcctgagaatgcatgacctgctggttaagccaagatgaaatggccatacatggcagaagtactctgaagtttgttcttatacctatagacgacaatgatcacaaaacagagtgcacatttccctgagtgatatgcagcagctcctcgaaccacaattttgtatgctggaggcttgagcgtcaacatagtggaaattaatctactctgccgaagctgttcttagatccaaatgttcattgcattgaagttcctggactcttggctctgttgtaggtccaatttgtggtgaacacaccctttcatgtttttatgtaactataatttccgtaagtgaagattagttcatataaaaaattatattcagagcaaagagtgaaaatgccatgagcgtatggtgccatagaaaaacctgttgcttcaggtttcggcagtcgctggccttcgagagagaatttatcacctgtacaaacgtgaattgtaagccagtttttttactttatccaagccaaactcttttttactac

SEQ ID NO: 84357 - DNA, 2031 bp, Zea Mays
agaaaatcgccgcgtggtcggtccatccgggtcgacttgacttccctctgcaacctcggaacccagccaatccgctgatctcaactgccgggcactccgatccggcaacgatggaggggagcgccgactccttcgggtccttgacggcgccgcttgcctggcacgacttcctcgagcgcatgcgccagccttccgccgccgagttcgtcaagtccattaaaagagctcctgatccagagaaggatagtactgctatccaggagttcctggaaaacatggaaggggctttcagagcccacaccccttgggctggcagttcagaggaagaactagagagtgctggtgagggacttgagaaatatgttatgacaaagctgtttaatcgggtattcgcatcagtcccagaagatgtgaagagtgatgaagaactttttgagaaaatgtctttgctacagcaatttgtaaggcctgaaaacttggatataaaaccagagtaccagaatgaaacatcctggctgctcgcacagaaggagctgcagaaaataaacatgtataaagctccaagggataagcttgcctgcattctgaactgctgtaaagttataaataatttacttctaaatgcttccattgtgtccaatgaaaccccccctggagctgacgaattccttccagtccttatctacgtcaccataaagctccactcaaatctgttgtacatacaaagatatagacggcaaacaagattggtgtcagaggctcaatacttttttacaaacatattgtctgctgagtctttcatatggaacattgatggggaatcattatcgatgaatgaattggattttcaaaggagaatggattcagcaagggaacgcatgttggggttatcagctgactcagaataccaggataatcaagccaatcctgatgtccaagatcgtacgtcacaaagtcttggagctaacagaaattctgatgccagtttatctttgaaagaccacgtccaaggttcagggcaggatatgagaagggacagtgatgtgactgtgagtggtaaacaagctgagcaggtgcaatctatttctgaattagagaagaaaggaactgcggagctcctcaatgaggatgacttgaacaaaaaattccaggagtacccgtttctgtttgcccgtgctggtgatctgactattgctgatgtagagagcctattgaattcgtacaagcatctagtacttcggtatgtagcacttgcacaaggtatgggtgtcagtcctgaaaccactcttactcagaacgggcagacatctgatcttgtagtatctgaggagccagaaattttgaatagcgtggtaaaggacaacgagaacagtgcaataattaacaaaaatgttgatgatgttataagcttaaaccatcattcagaagcagttgacacagaagcatctgaacaaatgaaccagagaactgctgttgattccagtgatgatctggaggcattgggtcggcctgagaatgcatgacctgctggttaagccaagatgaaatggccatacatggcagaagtactctgaagtttgttcttatacctatagacgacaatgatcacaaaacagagtgcacatttccctgagtgatatgcagcagctcctcgaaccacaattttgtatgctggaggcttgagcgtcaacatagtggaaattaatctactctgccgaagctgttcttagatccaaatgttcattgcattgaagttcctggactcttggctctgttgtaggtccaatttgtggtgaacacaccctttcatgtttttatgtaactataatttccgtaagtgaagattagttcatataaaaaattatattcagagcaaagagtgaaaatgccatgagcgtatggtgccatagaaaaacctgttgcttcaggtttcggcagtcgctggccttcgagagagaatttatcacctgtacaaacgtgaattgtaagccagtttttttactttatccaagccaaactcttttttactac

SEQ ID NO: 84358 - DNA, 2061 bp, Zea Mays
agaaaatcgccgcgtggtcggtccatccgggtcgacttgacttccctctgcaacctcggaacccagccaatccgctgatctcaactgccgggcactccgatccggcaacgatggaggggagcgccgactccttcgggtccttgacggcgccgcttgcctggcacgacttcctcgagcgcatgcgccagccttccgccgccgagttcgtcaagtccattaaaagctttattgtgacattctcaaacagagctcctgatccagagaaggatagtactgctatccaggagttcctggaaaacatggaaggggctttcagagcccacaccccttgggctggcagttcagaggaagaactagagagtgctggtgagggacttgagaaatatgttatgacaaagctgtttaatcgggtattcgcatcagtcccagaagatgtgaagagtgatgaagaactttttgagaaaatgtctttgctacagcaatttgtaaggcctgaaaacttggatataaaaccagagtaccagaatgaaacatcctggctgaaggagctgcagaaaataaacatgtataaagctccaagggataagcttgcctgcattctgaactgctgtaaagttataaataatttacttctaaatgcttccattgtgtccaatgaaaccccccctggagctgacgaattccttccagtccttatctacgtcaccataaaggctaatcctccgcagctccactcaaatctgttgtacatacaaagatatagacggcaaacaagattggtgtcagaggctcaatacttttttacaaacatattgtctgctgagtctttcatatggaacattgatggggaatcattatcgatgaatgaattggattttcaaaggagaatggattcagcaagggaacgcatgttggggttatcagctgactcagaataccaggataatcaagccaatcctgatgtccaagatcgtacgtcacaaagtcttggagctaacagaaattctgatgccagtttatctttgaaagaccacgtccaaggttcagggcaggatatgagaagggacagtgatgtgactgtgagtggtaaacaagctgagcaggtgcaatctatttctgaattagagaagaaaggaactgcggagctcctcaatgaggatgacttgaacaaaaaattccaggagtacccgtttctgtttgcccgtgctggtgatctgactattgctgatgtagagagcctattgaattcgtacaagcatctagtacttcggtatgtagcacttgcacaaggtatgggtgtcagtcctgaaaccactcttactcagaacgggcagacatctgatcttgtagtatctgaggagccagaaattttgaatagcgtggtaaaggacaacgagaacagtgcaataattaacaaaaatgttgatgatgttataagcttaaaccatcattcagaagcagttgacacagaagcatctgaacaaatgaaccagagaactgctgttgattccagtgatgatctggaggcattgggtcggcctgagaatgcatgacctgctggttaagccaagatgaaatggccatacatggcagaagtactctgaagtttgttcttatacctatagacgacaatgatcacaaaacagagtgcacatttccctgagtgatatgcagcagctcctcgaaccacaattttgtatgctggaggcttgagcgtcaacatagtggaaattaatctactctgccgaagctgttcttagatccaaatgttcattgcattgaagttcctggactcttggctctgttgtaggtccaatttgtggtgaacacaccctttcatgtttttatgtaactataatttccgtaagtgaagattagttcatataaaaaattatattcagagcaaagagtgaaaatgccatgagcgtatggtgccatagaaaaacctgttgcttcaggtttcggcagtcgctggccttcgagagagaatttatcacctgtacaaacgtgaattgtaagccagtttttttactttatccaagccaaactcttttttactac

SEQ ID NO: 84359 - DNA, 2046 bp, Zea Mays
agaaaatcgccgcgtggtcggtccatccgggtcgacttgacttccctctgcaacctcggaacccagccaatccgctgatctcaactgccgggcactccgatccggcaacgatggaggggagcgccgactccttcgggtccttgacggcgccgcttgcctggcacgacttcctcgagcgcatgcgccagccttccgccgccgagttcgtcaagtccattaaaagagctcctgatccagagaaggatagtactgctatccaggagttcctggaaaacatggaaggggctttcagagcccacaccccttgggctggcagttcagaggaagaactagagagtgctggtgagggacttgagaaatatgttatgacaaagctgtttaatcgggtattcgcatcagtcccagaagatgtgaagagtgatgaagaactttttgagaaaatgtctttgctacagcaatttgtaaggcctgaaaacttggatataaaaccagagtaccagaatgaaacatcctggctgctcgcacagaaggagctgcagaaaataaacatgtataaagctccaagggataagcttgcctgcattctgaactgctgtaaagttataaataatttacttctaaatgcttccattgtgtccaatgaaaccccccctggagctgacgaattccttccagtccttatctacgtcaccataaaggctaatcctccgcagctccactcaaatctgttgtacatacaaagatatagacggcaaacaagattggtgtcagaggctcaatacttttttacaaacatattgtctgctgagtctttcatatggaacattgatggggaatcattatcgatgaatgaattggattttcaaaggagaatggattcagcaagggaacgcatgttggggttatcagctgactcagaataccaggataatcaagccaatcctgatgtccaagatcgtacgtcacaaagtcttggagctaacagaaattctgatgccagtttatctttgaaagaccacgtccaaggttcagggcaggatatgagaagggacagtgatgtgactgtgagtggtaaacaagctgagcaggtgcaatctatttctgaattagagaagaaaggaactgcggagctcctcaatgaggatgacttgaacaaaaaattccaggagtacccgtttctgtttgcccgtgctggtgatctgactattgctgatgtagagagcctattgaattcgtacaagcatctagtacttcggtatgtagcacttgcacaaggtatgggtgtcagtcctgaaaccactcttactcagaacgggcagacatctgatcttgtagtatctgaggagccagaaattttgaatagcgtggtaaaggacaacgagaacagtgcaataattaacaaaaatgttgatgatgttataagcttaaaccatcattcagaagcagttgacacagaagcatctgaacaaatgaaccagagaactgctgttgattccagtgatgatctggaggcattgggtcggcctgagaatgcatgacctgctggttaagccaagatgaaatggccatacatggcagaagtactctgaagtttgttcttatacctatagacgacaatgatcacaaaacagagtgcacatttccctgagtgatatgcagcagctcctcgaaccacaattttgtatgctggaggcttgagcgtcaacatagtggaaattaatctactctgccgaagctgttcttagatccaaatgttcattgcattgaagttcctggactcttggctctgttgtaggtccaatttgtggtgaacacaccctttcatgtttttatgtaactataatttccgtaagtgaagattagttcatataaaaaattatattcagagcaaagagtgaaaatgccatgagcgtatggtgccatagaaaaacctgttgcttcaggtttcggcagtcgctggccttcgagagagaatttatcacctgtacaaacgtgaattgtaagccagtttttttactttatccaagccaaactcttttttactac

SEQ ID NO: 84360 - DNA, 2107 bp, Zea Mays
cacatccacagactacaagcataccctcagcaattccgactccgacaattccagaaaatcgccgcgtggtcggtccatccgggtcgacttgacttccctctgcaacctcggaacccagccaatccgctgatctcaactgccgggcactccgatccggcaacgatggaggggagcgccgactccttcgggtccttgacggcgccgcttgcctggcacgacttcctcgagcgcatgcgccagccttccgccgccgagttcgtcaagtccattaaaagctttattgtgacattctcaaacagagctcctgatccagagaaggatagtactgctatccaggagttcctggaaaacatggaaggggctttcagagcccacaccccttgggctggcagttcagaggaagaactagagagtgctggtgagggacttgagaaatatgttatgacaaagctgtttaatcgggtattcgcatcagtcccagaagatgtgaagagtgatgaagaactttttgagaaaatgtctttgctacagcaatttgtaaggcctgaaaacttggatataaaaccagagtaccagaatgaaacatcctggctgctcgcacagaaggagctgcagaaaataaacatgtataaagctccaagggataagcttgcctgcattctgaactgctgtaaagttataaataatttacttctaaatgcttccattgtgtccaatgaaaccccccctggagctgacgaattccttccagtccttatctacgtcaccataaagctccactcaaatctgttgtacatacaaagatatagacggcaaacaagattggtgtcagaggctcaatacttttttacaaacatattgtctgctgagtctttcatatggaacattgatggggaatcattatcgatgaatgaattggattttcaaaggagaatggattcagcaagggaacgcatgttggggttatcagctgactcagaataccaggataatcaagccaatcctgatgtccaagatcgtacgtcacaaagtcttggagctaacagaaattctgatgccagtttatctttgaaagaccacgtccaaggttcagggcaggatatgagaagggacagtgatgtgactgtgagtggtaaacaagctgagcaggtgcaatctatttctgaattagagaagaaaggaactgcggagctcctcaatgaggatgacttgaacaaaaaattccaggagtacccgtttctgtttgcccgtgctggtgatctgactattgctgatgtagagagcctattgaattcgtacaagcatctagtacttcggtatgtagcacttgcacaaggtatgggtgtcagtcctgaaaccactcttactcagaacgggcagacatctgatcttgtagtatctgaggagccagaaattttgaatagcgtggtaaaggacaacgagaacagtgcaataattaacaaaaatgttgatgatgttataagcttaaaccatcattcagaagcagttgacacagaagcatctgaacaaatgaaccagagaactgctgttgattccagtgatgatctggaggcattgggtcggcctgagaatgcatgacctgctggttaagccaagatgaaatggccatacatggcagaagtactctgaagtttgttcttatacctatagacgacaatgatcacaaaacagagtgcacatttccctgagtgatatgcagcagctcctcgaaccacaattttgtatgctggaggcttgagcgtcaacatagtggaaattaatctactctgccgaagctgttcttagatccaaatgttcattgcattgaagttcctggactcttggctctgttgtaggtccaatttgtggtgaacacaccctttcatgtttttatgtaactataatttccgtaagtgaagattagttcatataaaaaattatattcagagcaaagagtgaaaatgccatgagcgtatggtgccatagaaaaacctgttgcttcaggtttcggcagtcgctggccttcgagagagaatttatcacctgtacaaacgtgaattgtaagccagtttttttactttatccaagccaaactcttttttactac

SEQ ID NO: 84361 - DNA, 1136 bp, Zea Mays
cgtccttcgtccagccccagcccaagctccagccgccgcttggctcctgccgtcctgcgtcctggtccagcgcttcctctccagctccagcgccgcagcgcgctcgcccgtgcctcatctccagctctccagcgccgcagcgcgctcacggcccaccagcgccagccgccaggccgccaccgcggcaccgccaggcgcccaggcgcgctcgcccgccgaccgccgttgtccttgtccagccgccggagtccggagcaccgagcacgggagcagccgaggcgagcaaccgagcaccgccattgagcaacagtgaccgtgagccaagccgggaactctgggggtcagtagcccgatggctttcgctgagagattgatccgcaaacgattaagaagagtactgttattctgaacaaaaagaagtaaatcgttttctttactctaccataagttctattttaatatcgccactctattgattaaaaatgactatttttcatatttcaacgaagttgaattttattgaatttttatttttattttgctttgctttgttgggaatgcgtttacgctgcaaacgagataactccaaacacccaccattaacatctctagcggcggcattagcggcttctcgaccgcctatcgcctcatgctcgtttagcgcatactgccgcttttttgaaccctgcggttggaatacccagcactaaaatcctaggcccgcaactggctgcggggcggacagtcgattagagtcttcaactagtcattaaaggcctttttagaagtggagtattttctctgttttttagataatactgtagtatttgagaagggtaaaattgagaaaaaaacacgactaactgtaaaagtgaggacaccagtaaaacctagaacaccagcttaaaaaacctttttttctaatacagtttttggtagactcttcaaaagatatgttttcgaaactgcagttttgactatattgcactactttcacagttttaaaaacttaactccaaaaattttcaatacttgggcctagctgatgctcttagggaggtaggatagagtctgttctttattgtgctgtaatctgtagtttttgttttagttgttagtgtgtgcagtgtgtgtgt

SEQ ID NO: 84362 - DNA, 917 bp, Zea Mays
caaccattcaagtgtgcttgtgatgaacaatttctacgacatccttatgaagttcttttgtttgaaattggccagttcgacaaataataaaggaaagagtatggacatagagggaactgatgctggagaaactgacaaggctctttcttccaaaacggttaagcagaaggattcggtggaaagtgtaataaagcagataagtggcattgctatttccgagtcacatgcaacgccgtccacaaatactacaaacaattcacaaccggaatcatctgctccagacatagataagaaaattcgagcattgaaaaagaagatacgcttagctgaagcacaagtacaaggtgaccctgaaaaattgagacttgaggcactggaaaagatgaaaaagattgatggatggcttaaggagctgaagcttttggaggacaagagagcgcctgctgcttagacaaaatcaacttcggttctgatgtagagccaccacgaccacaccatggtgccgatccagattcgaaggtgcaactgaatcaccataggcttctccgtcacccgtggtggttattggaagagcagtccagtagatgtgggtttgcgcagaacgatggaagtttttcaccgcacatttctggcgccaagtttcaagatctgtaccgcaagaaagaccgctgctaattatggggatctctgacactgggtcagaatttacttttgctctcacggcccgaattcatctccggctttaccaccattgttcaattagctgttatatcacggttgaaactgactggaagtgccggaattcttatgtctctggctccctgcctctcttcatcacatgtactacctccgttcttaataatatttatcgctggctagttcatttttaaactaaaacacacgagcatgagttattt

SEQ ID NO: 84363 - DNA, 1023 bp, Zea Mays
cctcctaacagtatgcttggttttgcatgtattgcgcttgctatttgctgccaaccattcaagtgtgcttgtgatgaacaatttctacgacatccttatgaagttcttttgtttgaaattggccagttcgacaaataataaaggaaagagtatggacatagagggaactgatgctggagaaactgacaaggctctttcttccaaaacggttaagcagaaggattcggtggaaagtgtaataaagcagataagtggcattgctatttccgagtcacatgcaacgccgtccacaaatactacaaacaattcacaaccggaatcatctgctccagacatagataagaaaattcgagcattgaaaaagaaggtttacccttgccctctcttgtgtctgcacattttctatgaacaaaaagatgaatatacgcttagctgaagcacaagtacaaggtgaccctgaaaaattgagacttgaggcactggaaaagatgaaaaagattgatggatggcttaaggagctgaagcttttggaggacaagagagcgcctgctgcttagacaaaatcaacttcggttctgatgtagagccaccacgaccacaccatggtgccgatccagattcgaaggtgcaactgaatcaccataggcttctccgtcacccgtggtggttattggaagagcagtccagtagatgtgggtttgcgcagaacgatggaagtttttcaccgcacatttctggcgccaagtttcaagatctgtaccgcaagaaagaccgctgctaattatggggatctctgacactgggtcagaatttacttttgctctcacggcccgaattcatctccggctttaccaccattgttcaattagctgttatatcacggttgaaactgactggaagtgccggaattcttatgtctctggctccctgcctctcttcatcacatgtactacctccgttcttaataatatttatcgctggctagttcatttttaaactaaaacacacgagcatgagttattt

SEQ ID NO: 84364 - DNA, 1363 bp, Zea Mays
aaaaaaccctgcgcaactgcacaggtctggttgcccgatcacggcgtcaactcaagccttcactgttcactctgacatctcgactctaaaccttcgcccgccgtcgccgcagccttcgccctcccctccatccccgcatccgaatcacgcacgcgacccttgacatggccacttacagcgacggcggcggcgaccagcggcgccttctcaccatccccaaggaaggcgagcgcatcatcgcgcccacgcgccgtcccgacggcacgctccgcaaggccatccgcatccgcgccggctatgtgccccaggaggaggtcgccatctaccagtccaagggcgccctaatgaggaagtcaggacccgacgtgccgccggggtacgatccggcgcaagtggccgatgccaaacccaagacgaaggcggccaagaggaacgagcgacggaaagagaaacggcagcaggccagttcgacaaataataaaggaaagagtatggacatagagggaactgatgctggagaaactgacaaggctctttcttccaaaacggttaagcagaaggattcggtggaaagtgtaataaagcagataagtggcattgctatttccgagtcacatgcaacgccgtccacaaatactacaaacaattcacaaccggaatcatctgctccagacatagataagaaaattcgagcattgaaaaagaaggtttacccttgccctctcttgtgtctgcacattttctatgaacaaaaagatgaatatacgcttagctgaagcacaagtacaaggtgaccctgaaaaattgagacttgaggcactggaaaagatgaaaaagattgatggatggcttaaggagctgaagcttttggaggacaagagagcgcctgctgcttagacaaaatcaacttcggttctgatgtagagccaccacgaccacaccatggtgccgatccagattcgaaggtgcaactgaatcaccataggcttctccgtcacccgtggtggttattggaagagcagtccagtagatgtgggtttgcgcagaacgatggaagtttttcaccgcacatttctggcgccaagtttcaagatctgtaccgcaagaaagaccgctgctaattatggggatctctgacactgggtcagaatttacttttgctctcacggcccgaattcatctccggctttaccaccattgttcaattagctgttatatcacggttgaaactgactggaagtgccggaattcttatgtctctggctccctgcctctcttcatcacatgtactacctccgttcttaataatatttatcgctggctagttcatttttaaactaaaacacacgagcatgagttattt

SEQ ID NO: 84365 - DNA, 1483 bp, Zea Mays
ctgatttgcacctcataggctgggaaaaaaaaccctgcgcaactgcacaggtctggttgcccgatcacggcgtcaactcaagccttcactgttcactctgacatctcgactctaaaccttcgcccgccgtcgccgcagccttcgccctcccctccatccccgcatccgaatcacgcacgcgacccttgacatggccacttacagcgacggcggcggcgaccagcggcgccttctcaccatccccaaggaaggcgagcgcatcatcgcgcccacgcgccgtcccgacggcacgctccgcaaggccatccgcatccgcgccggctatgtgccccaggaggaggtcgccatctaccagtccaagggcgccctaatgaggaagtcaggacccgacgtgccgccggggtacgatccggcgcaagtggccgatgccaaacccaagacgaaggcggccaagaggaacgagcgacggaaagagaaacggcagcagatcagttttagtgagccaatcgatgttatgaactcggtttaaccgcacatgaccaaaatcaactgttgctgaggatatcaaaatggcaatcaagctgccaaagtgtgtcagtttgaattggttacatgattagttgattatttaatgaggccagttcgacaaataataaaggaaagagtatggacatagagggaactgatgctggagaaactgacaaggctctttcttccaaaacggttaagcagaaggattcggtggaaagtgtaataaagcagataagtggcattgctatttccgagtcacatgcaacgccgtccacaaatactacaaacaattcacaaccggaatcatctgctccagacatagataagaaaattcgagcattgaaaaagaagatacgcttagctgaagcacaagtacaaggtgaccctgaaaaattgagacttgaggcactggaaaagatgaaaaagattgatggatggcttaaggagctgaagcttttggaggacaagagagcgcctgctgcttagacaaaatcaacttcggttctgatgtagagccaccacgaccacaccatggtgccgatccagattcgaaggtgcaactgaatcaccataggcttctccgtcacccgtggtggttattggaagagcagtccagtagatgtgggtttgcgcagaacgatggaagtttttcaccgcacatttctggcgccaagtttcaagatctgtaccgcaagaaagaccgctgctaattatggggatctctgacactgggtcagaatttacttttgctctcacggcccgaattcatctccggctttaccaccattgttcaattagctgttatatcacggttgaaactgactggaagtgccggaattcttatgtctctggctccctgcctctcttcatcacatgtactacctccgttcttaataatatttatcgctggctagttcatttttaaactaaaacacacgagcatgagttattt

SEQ ID NO: 84366 - DNA, 650 bp, Zea Mays
cagaacttgagtcttcactcttcagagaagcgcttgcatgcactagtgaccgatcgagagaaattagacctgtgtgatccccctccgagctccgaagtcagcgcagtggcaaagcaacacatcgaatctctttttatacttttgacgatgaaggcgtccaacatgcatgccaaaaactgagagaagaagaagaagggaaaagaaaaacaagaagagcttctagcagcaagctacactcctagctatctgactgaatgcgctctcattcaacttcctttctctctcctcgctctcggagccaacccgaccaaggtacgtaatcgccacgagcgcggcggcggaggaataaaagaagcagaatcagaagctctcacgtacgccggcagtcgtctcgtcgcgccaagcaccgccgtcagtcgtacgcacctcgcaatctcgttcacctcgtacctccagcgcgcgcatccgccgccacctctgctgctccaacgcaccgcgcgcgtgcgtcacatatatatgcacgcacgcaacgtcgtcgttcctgccgatcgatctcgctcgcgtcacctgttagttgtgcaaggggttggagccggtgggcactttcctcttgctgtcgtccgtcccgagcgtgctgccgtcggcgggtg

SEQ ID NO: 84367 - DNA, 3687 bp, Zea Mays
cgacctttctccctcgaaaggtgaagggctgaaggcgagaaagaagcttcaaaacgaatcatccatcatcttgccaacccagcaaccctgccaagccatcgcattccagctctgcctttgcaagatcgccgccactcgcagccagcaagcaaccattccaccacatacttttttcctccggtttcgtccggcggcgagcgagcgaggtagcgcttgtccatgccgcggccgtgagggtgatcgaacgaggactacttcggcctagcgcggggagccatgtcggcgtcggcgtcggcgggtaagctggcggcggcgctgcaccggaggacgcgcagggtcacgtccgcgctggcgtgcgcggccctggagtgggtcctcatcgcgctgctcctcgtcaacggcctgctggcctacgccgtcgccaggttcgcggactacttcggcctcagcccgccgtgcctcctctgctcccgcgtcgaccgcctcttccaggccgaaggcggtggcggcggcgacgctagcggcgccggcgcgcggtggctgcgggacgccctctgcgacgcccacgccgcggagatctccgcgctggggtactgcctccgccaccgccggctcgctgaggccggagagatgtgcgtgggctgccgcccgtcgtcgtggaaggagaggacaagcgacgcaggtgcgtgcgcctgctgcgaagctgctgctgtactgcgcgcttctcctgtgcgcgagctggaagatactacaagggatgcgcgtgtctcggagaaagaggtagaagatggcgaccagggctacgttctgctggctcaagatgatcacgaggaggagccggatgaggtcgaaaaccgacaacaagaaccgcagagcgaggtggatggccgacaacatctggaagacgaggtgatggctgccgttcaggacgaatccttggaattcatggatcaggtcgaagacatcacgatcgaggacgaccggttggtgtcggtggtggcgcttgacgagatgaccatcgccgatgattcgggtctccatcgggatgtagaagaggtggacggaacgaatcatgtagtagaagatgagcaggatccgagggatgtggatgtcggagcggttctggaggagaagaggatgttggattcctcggttgcaacgccggtcgatttgaccgaggactctgtcgtgcccaccagccccgtaccttgtcctgagacttcaacagacccatctcatcctgatcatagctccgtttcccaagacgatggagatgttcttgaagatacttccacggccgaggaagaacacatctttgtgcctcaagcttcagtatcggaagccgtttccgaggatgacaacagaacagctgctgaggtggacacgaactgcgaagtgtcaatcgggagcgatatatgcgaacgggaacaagatgagcatgtcgttccatttcaagatttggcagcatttgaggagctggttgctccattggcaactggagatgatctaccattgccatcggaggtcctagagccacctgaccaaggtgaagttgaacaggaggacgtgaccacaagcacgggattagacctccaaccaaatgaacagaacgagatcgaagaagacagagcacctgagacgccgacgaacagcgtcgccacacaacgctccgacagaatgttcttgctcgagaggaaacggtcgctgtcgctgtctctggatgggagcgtagcgagcgagatggaaggcagcgagccgtccaccgtggaccagctgaaatcagcgctgcaggccgagcggaaggcgctcggcgcgctgtacgccgagctggaggaggagcggaacgccgcggccatcgcgaccaaccagacgatggccatgatcaaccggctgcaggaagagaaggcggcgatgcagatggaggcgctgcagtaccagcggatgatggaggagcagtcggagtacgaccaggaggcgctgcagctgctgaacgagctggtcagcaagcgggcgagggagaagcaggagctggagagggagctcgagctgtacaggcagaaggtgcagcactacgaggacaaggagaggaggaggacggcgagcttcaaggccaatggggtaagccccagtggcagtggcacttccgtgtcgtccagcggcgaggacagcgacgggcactccgacgactactgcgagctcggcgactctcctgacggcggcaacgtccagagctcatcggatgctgcccttagctccatgagggaccaggacgacggcacgaagcacctagcggctctggacgattccttgacgtacttcgaggtggagagactctccatcctggaggaactcaagacgttggaggagaggctcttcacactggaagacgacgatatcaacaccagcaaagaagttactggccattcctcgagtgacatggatttaccacacgatggccttcagtcgccggagtacattctcaccggtgacaggccaagattcggaggaagggcctctatcagcagagggaagagccttctgcctctgttcgatgcagtcggcgacgaggcctgtgaccgaatgccgccatctgcaggagcaggagaggcagaccaggccgacgatgcagcaacgaagccggcatccgtgcttgtcaaagagcaggagaggctggcgatcatagaggaggtcgaccatgtctacgaaaggttgcaggcgctggaggcggacaaggaattcctgaggcactgcatcaagtccctgaagaaaggagacaagggcatggaccttctccaggagatcttgcagcaccttcgcgatctccgcagtgtggagcttcacgtcaagaatgccggtggtgccatggctgcaaattcagcctagcaagttcatctatacgcggtaacgatgacactactagcttggtatggattcagtcgattggattgtaggactccaaagcactgcattggtgatggtccctgcaaggtactgccggagttatagggaggctctgctcattttgcctgtgggccggaagcaagccctcccttttgtgctggtccagcactgccaactttttctgtcgtggtggtcgcctggtctggtcggtcggtcgtaggaatcattagcccttccaaagctgcacaaagctgaatcacggtgacagcttctgcagcatgcacggggcaaaagaaaaaagatagccccagtggagatgtggatgtttttttttcttgtctgatttaatcttttgattaactttggatttgtttgtgcgctgaggtagggagtcctcgtgtattttttttttggtgaggatgtagcttgaacggttggtatgtgcagtttgtgctttctcaatatccaggtttataatgaaaggaaaggcggtctcacgaagaaatccctgtggtaaaaaaaaacttctaacttatttagactttgtttggttacttaggatctacatgtgttaaggtggattaggatgtaacttatatcccaatccacctcaacaaatatagattagagtcaatactaaagtactcaaactagatcttagatgtctatacatctctctccatttatatgtgatggagtggtttgatgtgaatctaaattccacaccaaatcagttcaacacacatgagaagatacatagacgtccaaatttctaatatataaagc

SEQ ID NO: 84368 - DNA, 3956 bp, Zea Mays
tgatgaatgatgacagtggacatgcatgttgattttgagtcctgtccatccagagcgacaccaatccgccggactgcgcggtcgtgctcaccactcacagatgcagcgcaccgcggtctcgtcacctcggcccaccggccgcatcgaacaggaaaatcaatcgtatgctaggcccgttctccggctcccccccttgcattccgacctgaaaaatcaagccttttcttttcttttctttttttttctttcgttcatggggtccaatggcccgacctttctccctcgaaaggtgaagggctgaaggcgagaaagaagcttcaaaacgaatcatccatcatcttgccaacccagcaaccctgccaagccatcgcattccagctctgcctttgcaagatcgccgccactcgcagccagcaagcaaccattccaccacatacttttttcctccggtttcgtccggcggcgagcgagcgaggtagcgcttgtccatgccgcggccgtgagggtgatcgaacgaggactacttcggcctagcgcggggagccatgtcggcgtcggcgtcggcgggtaagctggcggcggcgctgcaccggaggacgcgcagggtcacgtccgcgctggcgtgcgcggccctggagtgggtcctcatcgcgctgctcctcgtcaacggcctgctggcctacgccgtcgccaggttcgcggactacttcggcctcagcccgccgtgcctcctctgctcccgcgtcgaccgcctcttccaggccgaaggcggtggcggcggcgacgctagcggcgccggcgcgcggtggctgcgggacgccctctgcgacgcccacgccgcggagatctccgcgctggggtactgcctccgccaccgccggctcgctgaggccggagagatgtgcgtgggctgccgcccgtcgtcgtggaaggagaggacaagcgacgcaggtgcgtgcgcctgctgcgaagctgctgctgtactgcgcgcttctcctgtgcgcgagctggaagatactacaagggatgcgcgtgtctcggagaaagaggtagaagatggcgaccagggctacgttctgctggctcaagatgatcacgaggaggagccggatgaggtcgaaaaccgacaacaagaaccgcagagcgaggtggatggccgacaacatctggaagacgaggtgatggctgccgttcaggacgaatccttggaattcatggatcaggtcgaagacatcacgatcgaggacgaccggttggtgtcggtggtggcgcttgacgagatgaccatcgccgatgattcgggtctccatcgggatgtagaagaggtggacggaacgaatcatgtagtagaagatgagcaggatccgagggatgtggatgtcggagcggttctggaggagaagaggatgttggattcctcggttgcaacgccggtcgatttgaccgaggactctgtcgtgcccaccagccccgtaccttgtcctgagacttcaacagacccatctcatcctgatcatagctccgtttcccaagacgatggagatgttcttgaagatacttccacggccgaggaagaacacatctttgtgcctcaagtatcggaagccgtttccgaggatgacaacagaacagctgctgaggtggacacgaactgcgaagtgtcaatcgggagcgatatatgcgaacgggaacaagatgagcatgtcgttccatttcaagatttggcagcatttgaggagctggttgctccattggcaactggagatgatctaccattgccatcggaggtcctagagccacctgaccaagaagcaggtgaagttgaacaggaggacgtgaccacaagcacgggattagacctccaaccaaatgaacagaacgagatcgaagaagacagagcacctgagacgccgacgaacagcgtcgccacacaacgctccgacagaatgttcttgctcgagaggaaacggtcgctgtcgctgtctctggatgggagcgtagcgagcgagatggaaggcagcgagccgtccaccgtggaccagctgaaatcagcgctgcaggccgagcggaaggcgctcggcgcgctgtacgccgagctggaggaggagcggaacgccgcggccatcgcgaccaaccagacgatggccatgatcaaccggctgcaggaagagaaggcggcgatgcagatggaggcgctgcagtaccagcggatgatggaggagcagtcggagtacgaccaggaggcgctgcagctgctgaacgagctggtcagcaagcgggcgagggagaagcaggagctggagagggagctcgagctgtacaggcagaaggtgcagcactacgaggacaaggagaggaggaggacggcgagcttcaaggccaatggggtaagccccagtggcagtggcacttccgtgtcgtccagcggcgaggacagcgacgggcactccgacgactactgcgagctcggcgactctcctgacggcggcaacgtccagagctcatcggatgctgcccttagctccatgagggaccaggacgacggcacgaagcacctagcggctctggacgattccttgacgtacttcgaggtggagagactctccatcctggaggaactcaagacgttggaggagaggctcttcacactggaagacgacgatatcaacaccagcaaagaagttactggccattcctcgagtgacatggatttaccacacgatggccttcagtcgccggagtacattctcaccggtgacaggccaagattcggaggaagggcctctatcagcagagggaagagccttctgcctctgttcgatgcagtcggcgacgaggcctgtgaccgaatgccgccatctgcaggagcaggagaggcagaccaggccgacgatgcagcaacgaagccggcatccgtgcttgtcaaagagcaggagaggctggcgatcatagaggaggtcgaccatgtctacgaaaggttgcaggcgctggaggcggacaaggaattcctgaggcactgcatcaagtccctgaagaaaggagacaagggcatggaccttctccaggagatcttgcagcaccttcgcgatctccgcagtgtggagcttcacgtcaagaatgccggtggtgccatggctgcaaattcagcctagcaagttcatctatacgcggtaacgatgacactactagcttggtatggattcagtcgattggattgtaggactccaaagcactgcattggtgatggtccctgcaaggtactgccggagttatagggaggctctgctcattttgcctgtgggccggaagcaagccctcccttttgtgctggtccagcactgccaactttttctgtcgtggtggtcgcctggtctggtcggtcggtcgtaggaatcattagcccttccaaagctgcacaaagctgaatcacggtgacagcttctgcagcatgcacggggcaaaagaaaaaagatagccccagtggagatgtggatgtttttttttcttgtctgatttaatcttttgattaactttggatttgtttgtgcgctgaggtagggagtcctcgtgtattttttttttggtgaggatgtagcttgaacggttggtatgtgcagtttgtgctttctcaatatccaggtttataatgaaaggaaaggcggtctcacgaagaaatccctgtggtaaaaaaaaacttctaacttatttagactttgtttggttacttaggatctacatgtgttaaggtggattaggatgtaacttatatcccaatccacctcaacaaatatagattagagtcaatactaaagtactcaaactagatcttagatgtctatacatctctctccatttatatgtgatggagtggtttgatgtgaatctaaattccacaccaaatcagttcaacacacatgagaagatacatagacgtccaaatttctaatatataaagc

SEQ ID NO: 84369 - DNA, 3919 bp, Zea Mays
attcggatatgcgttcgtatttacgtagtactgtatatactagtacatgttttacctcttgatgaatgatgacagtggacatgcatgttgattttgagtcctgtccatccagagcgacaccaatccgccggactgcgcggtcgtgctcaccactcacagatgcagcgcaccgcggtctcgtcacctcggcccaccggccgcatcgaacaggaaaatcaatcgtatgctaggcccgttctccggctcccccccttgcattccgacctgaaaaatcaagccttttcttttcttttctttttttttctttcgttcatggggtccaatggcccgacctttctccctcgaaaggtgaagggctgaaggcgagaaagaagcttcaaaacgaatcatccatcatcttgccaacccagcaaccctgccaagccatcgcattccagctctgcctttgcaagatcgccgccactcgcagccagcaagcaaccattccaccacatacttttttcctccggtttcgtccggcggcgagcgagcgaggtagcgcttgtccatgccgcggccgtgagggtgatcgaacgaggactacttcggcctagcgcggggagccatgtcggcgtcggcgtcggcgggtaagctggcggcggcgctgcaccggaggacgcgcagggtcacgtccgcgctggcgtgcgcggccctggagtgggtcctcatcgcgctgctcctcgtcaacggcctgctggcctacgccgtcgccaggttcgcggactacttcggcctcagcccgccgtgcctcctctgctcccgcgtcgaccgcctcttccaggccgaaggcggtggcggcggcgacgctagcggcgccggcgcgcggtggctgcgggacgccctctgcgacgcccacgccgcggagatctccgcgctggggtactgcctccgccaccgccggctcgctgaggccggagagatgtgcgtgggctgccgcccgtcgtcgtggaaggagaggacaagcgacgcaggtgcgtgcgcctgctgcgaagctgctgctgtactgcgcgcttctcctgtgcgcgagctggaagatactacaagggatgcgcgtgtctcggagaaagaggtagaagatggcgaccagggctacgttctgctggctcaagatgatcacgaggaggagccggatgaggtcgaaaaccgacaacaagaaccgcagagcgaggtggatggccgacaacatctggaagacgaggtgatggctgccgttcaggacgaatccttggaattcatggatcaggtcgaagacggaacgaatcatgtagtagaagatgagcaggatccgagggatgtggatgtcggagcggttctggaggagaagaggatgttggattcctcggttgcaacgccggtcgatttgaccgaggactctgtcgtgcccaccagccccgtaccttgtcctgagacttcaacagacccatctcatcctgatcatagctccgtttcccaagacgatggagatgttcttgaagatacttccacggccgaggaagaacacatctttgtgcctcaagtatcggaagccgtttccgaggatgacaacagaacagctgctgaggtggacacgaactgcgaagtgtcaatcgggagcgatatatgcgaacgggaacaagatgagcatgtcgttccatttcaagatttggcagcatttgaggagctggttgctccattggcaactggagatgatctaccattgccatcggaggtcctagagccacctgaccaagtagaagcaggtgaagttgaacaggaggacgtgaccacaagcacgggattagacctccaaccaaatgaacagaacgagatcgaagaagacagagcacctgagacgccgacgaacagcgtcgccacacaacgctccgacagaatgttcttgctcgagaggaaacggtcgctgtcgctgtctctggatgggagcgtagcgagcgagatggaaggcagcgagccgtccaccgtggaccagctgaaatcagcgctgcaggccgagcggaaggcgctcggcgcgctgtacgccgagctggaggaggagcggaacgccgcggccatcgcgaccaaccagacgatggccatgatcaaccggctgcaggaagagaaggcggcgatgcagatggaggcgctgcagtaccagcggatgatggaggagcagtcggagtacgaccaggaggcgctgcagctgctgaacgagctggtcagcaagcgggcgagggagaagcaggagctggagagggagctcgagctgtacaggcagaaggtgcagcactacgaggacaaggagaggaggaggacggcgagcttcaaggccaatggggtaagccccagtggcagtggcacttccgtgtcgtccagcggcgaggacagcgacgggcactccgacgactactgcgagctcggcgactctcctgacggcggcaacgtccagagctcatcggatgctgcccttagctccatgagggaccaggacgacggcacgaagcacctagcggctctggacgattccttgacgtacttcgaggtggagagactctccatcctggaggaactcaagacgttggaggagaggctcttcacactggaagacgacgatatcaacaccagcaaagaagttactggccattcctcgagtgacatggatttaccacacgatggccttcagtcgccggagtacattctcaccggtgacaggccaagattcggaggaagggcctctatcagcagagggaagagccttctgcctctgttcgatgcagtcggcgacgaggcctgtgaccgaatgccgccatctgcaggagcaggagaggcagaccaggccgacgatgcagcaacgaagccggcatccgtgcttgtcaaagagcaggagaggctggcgatcatagaggaggtcgaccatgtctacgaaaggttgcaggcgctggaggcggacaaggaattcctgaggcactgcatcaagtccctgaagaaaggagacaagggcatggaccttctccaggagatcttgcagcaccttcgcgatctccgcagtgtggagcttcacgtcaagaatgccggtggtgccatggctgcaaattcagcctagcaagttcatctatacgcggtaacgatgacactactagcttggtatggattcagtcgattggattgtaggactccaaagcactgcattggtgatggtccctgcaaggtactgccggagttatagggaggctctgctcattttgcctgtgggccggaagcaagccctcccttttgtgctggtccagcactgccaactttttctgtcgtggtggtcgcctggtctggtcggtcggtcgtaggaatcattagcccttccaaagctgcacaaagctgaatcacggtgacagcttctgcagcatgcacggggcaaaagaaaaaagatagccccagtggagatgtggatgtttttttttcttgtctgatttaatcttttgattaactttggatttgtttgtgcgctgaggtagggagtcctcgtgtattttttttttggtgaggatgtagcttgaacggttggtatgtgcagtttgtgctttctcaatatccaggtttataatgaaaggaaaggcggtctcacgaagaaatccctgtggtaaaaaaaaacttctaacttatttagactttgtttggttacttaggatctacatgtgttaaggtggattaggatgtaacttatatcccaatccacctcaacaaatatagattagagtcaatactaaagtactcaaactagatcttagatgtctatacatctctctccatttatatgtgatggagtggtttgatgtgaatctaaattccacaccaaatcagttcaacacacatgagaagatacatagacgtccaaatttctaatatataaagc

SEQ ID NO: 84370 - DNA, 4013 bp, Zea Mays
gtcaattcggatatgcgttcgtatttacgtagtactgtatatactagtacatgttttacctcttgatgaatgatgacagtggacatgcatgttgattttgagtcctgtccatccagagcgacaccaatccgccggactgcgcggtcgtgctcaccactcacagatgcagcgcaccgcggtctcgtcacctcggcccaccggccgcatcgaacaggaaaatcaatcgtatgctaggcccgttctccggctcccccccttgcattccgacctgaaaaatcaagccttttcttttcttttctttttttttctttcgttcatggggtccaatggcccgacctttctccctcgaaaggtgaagggctgaaggcgagaaagaagcttcaaaacgaatcatccatcatcttgccaacccagcaaccctgccaagccatcgcattccagctctgcctttgcaagatcgccgccactcgcagccagcaagcaaccattccaccacatacttttttcctccggtttcgtccggcggcgagcgagcgaggtagcgcttgtccatgccgcggccgtgagggtgatcgaacgaggactacttcggcctagcgcggggagccatgtcggcgtcggcgtcggcgggtaagctggcggcggcgctgcaccggaggacgcgcagggtcacgtccgcgctggcgtgcgcggccctggagtgggtcctcatcgcgctgctcctcgtcaacggcctgctggcctacgccgtcgccaggttcgcggactacttcggcctcagcccgccgtgcctcctctgctcccgcgtcgaccgcctcttccaggccgaaggcggtggcggcggcgacgctagcggcgccggcgcgcggtggctgcgggacgccctctgcgacgcccacgccgcggagatctccgcgctggggtactgcctccgccaccgccggctcgctgaggccggagagatgtgcgtgggctgccgcccgtcgtcgtggaaggagaggacaagcgacgcaggtgcgtgcgcctgctgcgaagctgctgctgtactgcgcgcttctcctgtgcgcgagctggaagatactacaagggatgcgcgtgtctcggagaaagaggtagaagatggcgaccagggctacgttctgctggctcaagatgatcacgaggaggagccggatgaggtcgaaaaccgacaacaagaaccgcagagcgaggtggatggccgacaacatctggaagacgaggtgatggctgccgttcaggacgaatccttggaattcatggatcaggtcgaagacatcacgatcgaggacgaccggttggtgtcggtggtggcgcttgacgagatgaccatcgccgatgattcgggtctccatcgggatgtagaagaggtggacggaacgaatcatgtagtagaagatgagcaggatccgagggatgtggatgtcggagcggttctggaggagaagaggatgttggattcctcggttgcaacgccggtcgatttgaccgaggactctgtcgtgcccaccagccccgtaccttgtcctgagacttcaacagacccatctcatcctgatcatagctccgtttcccaagacgatggagatgttcttgaagatacttccacggccgaggaagaacacatctttgtgcctcaagtatcggaagccgtttccgaggatgacaacagaacagctgctgaggtggacacgaactgcgaagtgtcaatcgggagcgatatatgcgaacgggaacaagatgagcatgtcgttccatttcaagatttggcagcatttgaggagctggttgctccattggcaactggagatgatctaccattgccatcggaggtcctagagccacctgaccaaggtgaagttgaacaggaggacgtgaccacaagcacgggattagacctccaaccaaatgaacagaacgagatcgaagaagacagagcacctgagacgccgacgaacagcgtcgccacacaacgctccgacagaatgttcttgctcgagaggaaacggtcgctgtcgctgtctctggatgggagcgtagcgagcgagatggaaggcagcgagccgtccaccgtggaccagctgaaatcagcgctgcaggccgagcggaaggcgctcggcgcgctgtacgccgagctggaggaggagcggaacgccgcggccatcgcgaccaaccagacgatggccatgatcaaccggctgcaggaagagaaggcggcgatgcagatggaggcgctgcagtaccagcggatgatggaggagcagtcggagtacgaccaggaggcgctgcagctgctgaacgagctggtcagcaagcgggcgagggagaagcaggagctggagagggagctcgagctgtacaggcagaaggtgcagcactacgaggacaaggagaggaggaggacggcgagcttcaaggccaatggggtaagccccagtggcagtggcacttccgtgtcgtccagcggcgaggacagcgacgggcactccgacgactactgcgagctcggcgactctcctgacggcggcaacgtccagagctcatcggatgctgcccttagctccatgagggaccaggacgacggcacgaagcacctagcggctctggacgattccttgacgtacttcgaggtggagagactctccatcctggaggaactcaagacgttggaggagaggctcttcacactggaagacgacgatatcaacaccagcaaagaagttactggccattcctcgagtgacatggatttaccacacgatggccttcagtcgccggagtacattctcaccggtgacaggccaagattcggaggaagggcctctatcagcagagggaagagccttctgcctctgttcgatgcagtcggcgacgaggcctgtgaccgaatgccgccatctgcaggagcaggagaggcagaccaggccgacgatgcagcaacgaagccggcatccgtgcttgtcaaagagcaggagaggctggcgatcatagaggaggtcgaccatgtctacgaaaggttgcaggcgctggaggcggacaaggaattcctgaggcactgcatcaagtccctgaagaaaggagacaagggcatggaccttctccaggagatcttgcagcaccttcgcgatctccgcagtgtggagcttcacgtcaagaatgccggtggtgccatggctgcaaattcagcctagcaagttcatctatacgcggtaacgatgacactactagcttggtatggattcagtcgattggattgtaggactccaaagcactgcattggtgatggtccctgcaaggtactgccggagttatagggaggctctgctcattttgcctgtgggccggaagcaagccctcccttttgtgctggtccagcactgccaactttttctgtcgtggtggtcgcctggtctggtcggtcggtcgtaggaatcattagcccttccaaagctgcacaaagctgaatcacggtgacagcttctgcagcatgcacggggcaaaagaaaaaagatagccccagtggagatgtggatgtttttttttcttgtctgatttaatcttttgattaactttggatttgtttgtgcgctgaggtagggagtcctcgtgtattttttttttggtgaggatgtagcttgaacggttggtatgtgcagtttgtgctttctcaatatccaggtttataatgaaaggaaaggcggtctcacgaagaaatccctgtggtaaaaaaaaacttctaacttatttagactttgtttggttacttaggatctacatgtgttaaggtggattaggatgtaacttatatcccaatccacctcaacaaatatagattagagtcaatactaaagtactcaaactagatcttagatgtctatacatctctctccatttatatgtgatggagtggtttgatgtgaatctaaattccacaccaaatcagttcaacacacatgagaagatacatagacgtccaaatttctaatatataaagc

SEQ ID NO: 84371 - DNA, 4053 bp, Zea Mays
gcaactcttttcctgtcgatgctgacctgtcaattcggatatgcgttcgtatttacgtagtactgtatatactagtacatgttttacctcttgatgaatgatgacagtggacatgcatgttgattttgagtcctgtccatccagagcgacaccaatccgccggactgcgcggtcgtgctcaccactcacagatgcagcgcaccgcggtctcgtcacctcggcccaccggccgcatcgaacaggaaaatcaatcgtatgctaggcccgttctccggctcccccccttgcattccgacctgaaaaatcaagccttttcttttcttttctttttttttctttcgttcatggggtccaatggcccgacctttctccctcgaaaggtgaagggctgaaggcgagaaagaagcttcaaaacgaatcatccatcatcttgccaacccagcaaccctgccaagccatcgcattccagctctgcctttgcaagatcgccgccactcgcagccagcaagcaaccattccaccacatacttttttcctccggtttcgtccggcggcgagcgagcgaggtagcgcttgtccatgccgcggccgtgagggtgatcgaacgaggactacttcggcctagcgcggggagccatgtcggcgtcggcgtcggcgggtaagctggcggcggcgctgcaccggaggacgcgcagggtcacgtccgcgctggcgtgcgcggccctggagtgggtcctcatcgcgctgctcctcgtcaacggcctgctggcctacgccgtcgccaggttcgcggactacttcggcctcagcccgccgtgcctcctctgctcccgcgtcgaccgcctcttccaggccgaaggcggtggcggcggcgacgctagcggcgccggcgcgcggtggctgcgggacgccctctgcgacgcccacgccgcggagatctccgcgctggggtactgcctccgccaccgccggctcgctgaggccggagagatgtgcgtgggctgccgcccgtcgtcgtggaaggagaggacaagcgacgcaggtgcgtgcgcctgctgcgaagctgctgctgtactgcgcgcttctcctgtgcgcgagctggaagatactacaagggatgcgcgtgtctcggagaaagaggtagaagatggcgaccagggctacgttctgctggctcaagatgatcacgaggaggagccggatgaggtcgaaaaccgacaacaagaaccgcagagcgaggtggatggccgacaacatctggaagacgaggtgatggctgccgttcaggacgaatccttggaattcatggatcaggtcgaagacatcacgatcgaggacgaccggttggtgtcggtggtggcgcttgacgagatgaccatcgccgatgattcgggtctccatcgggatgtagaagaggtggacggaacgaatcatgtagtagaagatgagcaggatccgagggatgtggatgtcggagcggttctggaggagaagaggatgttggattcctcggttgcaacgccggtcgatttgaccgaggactctgtcgtgcccaccagccccgtaccttgtcctgagacttcaacagacccatctcatcctgatcatagctccgtttcccaagacgatggagatgttcttgaagatacttccacggccgaggaagaacacatctttgtgcctcaagcttcagtatcggaagccgtttccgaggatgacaacagaacagctgctgaggtggacacgaactgcgaagtgtcaatcgggagcgatatatgcgaacgggaacaagatgagcatgtcgttccatttcaagatttggcagcatttgaggagctggttgctccattggcaactggagatgatctaccattgccatcggaggtcctagagccacctgaccaagaagcaggtgaagttgaacaggaggacgtgaccacaagcacgggattagacctccaaccaaatgaacagaacgagatcgaagaagacagagcacctgagacgccgacgaacagcgtcgccacacaacgctccgacagaatgttcttgctcgagaggaaacggtcgctgtcgctgtctctggatgggagcgtagcgagcgagatggaaggcagcgagccgtccaccgtggaccagctgaaatcagcgctgcaggccgagcggaaggcgctcggcgcgctgtacgccgagctggaggaggagcggaacgccgcggccatcgcgaccaaccagacgatggccatgatcaaccggctgcaggaagagaaggcggcgatgcagatggaggcgctgcagtaccagcggatgatggaggagcagtcggagtacgaccaggaggcgctgcagctgctgaacgagctggtcagcaagcgggcgagggagaagcaggagctggagagggagctcgagctgtacaggcagaaggtgcagcactacgaggacaaggagaggaggaggacggcgagcttcaaggccaatggggtaagccccagtggcagtggcacttccgtgtcgtccagcggcgaggacagcgacgggcactccgacgactactgcgagctcggcgactctcctgacggcggcaacgtccagagctcatcggatgctgcccttagctccatgagggaccaggacgacggcacgaagcacctagcggctctggacgattccttgacgtacttcgaggtggagagactctccatcctggaggaactcaagacgttggaggagaggctcttcacactggaagacgacgatatcaacaccagcaaagaagttactggccattcctcgagtgacatggatttaccacacgatggccttcagtcgccggagtacattctcaccggtgacaggccaagattcggaggaagggcctctatcagcagagggaagagccttctgcctctgttcgatgcagtcggcgacgaggcctgtgaccgaatgccgccatctgcaggagcaggagaggcagaccaggccgacgatgcagcaacgaagccggcatccgtgcttgtcaaagagcaggagaggctggcgatcatagaggaggtcgaccatgtctacgaaaggttgcaggcgctggaggcggacaaggaattcctgaggcactgcatcaagtccctgaagaaaggagacaagggcatggaccttctccaggagatcttgcagcaccttcgcgatctccgcagtgtggagcttcacgtcaagaatgccggtggtgccatggctgcaaattcagcctagcaagttcatctatacgcggtaacgatgacactactagcttggtatggattcagtcgattggattgtaggactccaaagcactgcattggtgatggtccctgcaaggtactgccggagttatagggaggctctgctcattttgcctgtgggccggaagcaagccctcccttttgtgctggtccagcactgccaactttttctgtcgtggtggtcgcctggtctggtcggtcggtcgtaggaatcattagcccttccaaagctgcacaaagctgaatcacggtgacagcttctgcagcatgcacggggcaaaagaaaaaagatagccccagtggagatgtggatgtttttttttcttgtctgatttaatcttttgattaactttggatttgtttgtgcgctgaggtagggagtcctcgtgtattttttttttggtgaggatgtagcttgaacggttggtatgtgcagtttgtgctttctcaatatccaggtttataatgaaaggaaaggcggtctcacgaagaaatccctgtggtaaaaaaaaacttctaacttatttagactttgtttggttacttaggatctacatgtgttaaggtggattaggatgtaacttatatcccaatccacctcaacaaatatagattagagtcaatactaaagtactcaaactagatcttagatgtctatacatctctctccatttatatgtgatggagtggtttgatgtgaatctaaattccacaccaaatcagttcaacacacatgagaagatacatagacgtccaaatttctaatatataaagc

SEQ ID NO: 84372 - DNA, 2552 bp, Zea Mays
gttaggcatgccttccccgatggctcgcatcttccaccgccatctcctcctcgccgtcgtcaccttagccgtggccgcttctctccttcgcccagctgccgcagtgcgcccatttgttttggttctctccggtgaggacttcctcaaggatccggccgcgcacccgtcccttccctctgccgactccgacgacgacgatgggtgggacgacttcgccgacgattcaccggccgccgacccgctactctctccgtcctcctgggcccccctcctcgacccaaccatctctctcccctctggcgatgagacggactcgccggccgacgcgctcttcgtcgcgggcacccgcgcgatgctatccgcagcgtctgatggagacgacgcggcgttcaccacggctgccgcgcagatcgaggcctcggcagaggcggggcacccgggcgcgcagtctgcgctcgcgttccttaccggcgccgggatgacgcgtccggcatcccggtcgctcgcgttcctgctgcacaagttcgccgccgacgcaggagatctccagtcaaagatggccctcgcgtactcctacttccgccaggagatgtatgaagaagctgttatactatacgctgaacttgcagaagctgccctaacaagctccttgatatcaaaggagccaccagtgattgaaccaatccgtcttcacagtgggactgaagaaaataaagaggccttgaggaagtcccgaggtgaggacgatgaagatttccaaatcacagagtatcaggcacagcgaggcaacgctgccaacatgtacaaattagggcttctgtattactatggactacgtgggctccgccgtgattatggaaaagcatttcattggttttctaaggctgttgagaaaggcgagacacgggcattggagcttctgggtgagatctatgctagaggtgctggagtggaaaggaactatactgaagcgtacaagtggttggcacttgctgccaagcagcaacattactcagcttacaatggattgggttatctatatgttaaaggctatggggtggagaagaaaaacttgacaaaagcaagggaacttttcgaacttgcagccgagaataaggaagccggtggacattataaccttggtgtgttgtatcttaagggaattggtgtgaagagggatgtaattagagcatgtaatttcttgcttcatgcagttaatgctgggcaaccaaaagctatttatcaggtggcgaagctgttccagaaaggcattggtcttaagaggaatctccatatggcaacaatgctgtacaagtctattgctgagaggggaccctggagttcactgtccagatgggctctggagtcttatttgaaaggcgatgtagggaaagcattgctcttgtattccagaatggcagatcttggatatgaggttgcacagagcaatgctgcctggattctggataggtatagtgatcaaagtatttgcatgggagaatctagtttttgcacagatatggaaagacatcttcgtgcacatgctttgtggtggcatgcatccgagcagggtaatgagcatgctgctttgttgattggcgatgcctactactatggccggggcgtcgcaagggactatgaacgtgcagcagaggcatatatgcatgctcggtcacagtctaatgctcaagctatttttaaccttgggtacatgcatgagcatggtcatggactcccccttgatttgcacttggcaaaaagatattatgatcaagccgttgaggtggattcagctgctaagctccctgtcatgcttgcattaacaagtttatggctaaggacgaactatgcagacagttttttggttggttttatcgattcacttccagaaatgtatcctgttgttaaggaatgggtggaagatgttctcatggatgaagggaatgcaacaattttgactctctttgcttgccttgtaactgtcctctacttgcgagaacgccaaaggcgtcaagtagcagcagcagccaaccccctaacaacatgatgatgtggccatgtaaatgtcggttttcatgacatgggcaggccttttgcttgagggaactcgagatgtaaaatgatggctcattgacatgactcgcgcactaaattgagtagagggacatgaaagccgctggagactcagacaatgtttgctgcctggcgaatattcacctctccaagacttagggagctatgcttgtaaaggacaacaattcttggaaactggctgctcagaaatacagtttagaaatctcacagatgttgaaaagcatgctccccccttgttgcgcatatgcatggccatggaatttcgacaagcacacacggagaacatttctggaagaggcaactttacaattggtagtttagcgatcggctttcggagttgaaccgatgatgtgacaccgcttcgctccgtggtccacgccagtagctctcaaagctggctaaaaaaaaccccaacctgaatgaaaacggtaattggccgggggcggcgaggctgggtg

SEQ ID NO: 84373 - DNA, 1749 bp, Zea Mays
tttttttttcgaacacacatgagagttgtgtaccattttacacattttgtaaagaagacaaatggaaacaaagaagtgtgtgtgtgtgtggttgtggtggaactaaaccatatactaattacaccaggtctgacaacagaggcttaaaatacaattaaacatgattcacgtaatatatctactctaaatgctcatgaacctaggaaattaccatccttgttgttgttgcaggcaagggaacttttcgaacttgcagccgagaataaggaagccggtggacattataaccttgttaatgctgggcaaccaaaagctatttatcaggtggcgaagctgttccagaaaggcattggtcttaagaggaatctccatatggcaacaatgctgtacaagtctattgctgagaggggaccctggagttcactgtccagatgggctctggagtcttatttgaaaggcgatgtagggaaagcattgctcttgtattccagaatggcagatcttggatatgaggttgcacagagcaatgctgcctggattctggataggtatagtgatcaaagtatttgcatgggagaatctagtttttgcacagatatggaaagacatcttcgtgcacatgctttgtggtggcatgcatccgagcagggtaatgagcatgctgctttgttgattggcgatgcctactactatggccggggcgtcgcaagggactatgaacgtgcagcagaggcatatatgcatgctcggtcacagtctaatgctcaagctatttttaaccttgggtacatgcatgagcatggtcatggactcccccttgatttgcacttggcaaaaagatattatgatcaagccgttgaggtggattcagctgctaagctccctgtcatgcttgcattaacaagtttatggctaaggacgaactatgcagacagttttttggttggttttatcgattcacttccagaaatgtatcctgttgttaaggaatgggtggaagatgttctcatggatgaagggaatgcaacaattttgactctctttgcttgccttgtaactgtcctctacttgcgagaacgccaaaggcgtcaagtagcagcagcagccaaccccctaacaacatgatgatgtggccatgtaaatgtcggttttcatgacatgggcaggccttttgcttgagggaactcgagatgtaaaatgatggctcattgacatgactcgcgcactaaattgagtagagggacatgaaagccgctggagactcagacaatgtttgctgcctggcgaatattcacctctccaagacttagggagctatgcttgtaaaggacaacaattcttggaaactggctgctcagaaatacagtttagaaatctcacagatgttgaaaagcatgctccccccttgttgcgcatatgcatggccatggaatttcgacaagcacacacggagaacatttctggaagaggcaactttacaattggtagtttagcgatcgggtaactttccatcagcatttacacgcactgtatagttttctctggatgtgttagttgaaaaggggcggtgcatgttgtgagcagcaattttgcaatagtatccatcagagtttgaagtataaacacattttttgaatagcctgaaaatagatcttacagcagagggtgttgaatgacgacggcagccgcgcgcgcggagcagccattgccgggcggcagaagtgtgcatagcgtggttctctgtagcag

SEQ ID NO: 84374 - DNA, 2526 bp, Zea Mays
ttaggcatgccttccccgatggctcgcatcttccaccgccatctcctcctcgccgtcgtcaccttagccgtggccgcttctctccttcgcccagctgccgcagtgcgcccatttgttttggttctctccggtgaggacttcctcaaggatccggccgcgcacccgtcccttccctctgccgactccgacgacgacgatgggtgggacgacttcgccgacgattcaccggccgccgacccgctactctctccgtcctcctgggcccccctcctcgacccaaccatctctctcccctctggcgatgagacggactcgccggccgacgcgctcttcgtcgcgggcacccgcgcgatgctatccgcagcgtctgatggagacgacgcggcgttcaccacggctgccgcgcagatcgaggcctcggcagaggcggggcacccgggcgcgcagtctgcgctcgcgttccttaccggcgccgggatgacgcgtccggcatcccggtcgctcgcgttcctgctgcacaagttcgccgccgacgcaggagatctccagtcaaagatggccctcgcgtactcctacttccgccaggaggagccaccagtgattgaaccaatccgtcttcacagtgggactgaagaaaataaagaggccttgaggaagtcccgaggtgaggacgatgaagatttccaaatcacagagtatcaggcacagcgaggcaacgctgccaacatgtacaaattagggcttctgtattactatggactacgtgggctccgccgtgattatggaaaagcatttcattggttttctaaggctgttgagaaaggcgagacacgggcattggagcttctgggtgagatctatgctagaggtgctggagtggaaaggaactatactgaagcgtacaagtggttggcacttgctgccaagcagcaacattactcagcttacaatggattgggttatctatatgttaaaggctatggggtggagaagaaaaacttgacaaaagcaagggaacttttcgaacttgcagccgagaataaggaagccggtggacattataaccttgttaatgctgggcaaccaaaagctatttatcaggtggcgaagctgttccagaaaggcattggtcttaagaggaatctccatatggcaacaatgctgtacaagtctattgctgagaggggaccctggagttcactgtccagatgggctctggagtcttatttgaaaggcgatgtagggaaagcattgctcttgtattccagaatggcagatcttggatatgaggttgcacagagcaatgctgcctggattctggataggtatagtgatcaaagtatttgcatgggagaatctagtttttgcacagatatggaaagacatcttcgtgcacatgctttgtggtggcatgcatccgagcagggtaatgagcatgctgctttgttgattggcgatgcctactactatggccggggcgtcgcaagggactatgaacgtgcagcagaggcatatatgcatgctcggtcacagtctaatgctcaagctatttttaaccttgggtacatgcatgagcatggtcatggactcccccttgatttgcacttggcaaaaagatattatgatcaagccgttgaggtggattcagctgctaagctccctgtcatgcttgcattaacaagtttatggctaaggacgaactatgcagacagttttttggttggttttatcgattcacttccagaaatgtatcctgttgttaaggaatgggtggaagatgttctcatggatgaagggaatgcaacaattttgactctctttgcttgccttgtaactgtcctctacttgcgagaacgccaaaggcgtcaagtagcagcagcagccaaccccctaacaacatgatgatgtggccatgtaaatgtcggttttcatgacatgggcaggccttttgcttgagggaactcgagatgtaaaatgatggctcattgacatgactcgcgcactaaattgagtagagggacatgaaagccgctggagactcagacaatgtttgctgcctggcgaatattcacctctccaagacttagggagctatgcttgtaaaggacaacaattcttggaaactggctgctcagaaatacagtttagaaatctcacagatgttgaaaagcatgctccccccttgttgcgcatatgcatggccatggaatttcgacaagcacacacggagaacatttctggaagaggcaactttacaattggtagtttagcgatcgggtaactttccatcagcatttacacgcactgtatagttttctctggatgtgttagttgaaaaggggcggtgcatgttgtgagcagcaattttgcaatagtatccatcagagtttgaagtataaacacattttttgaatagcctgaaaatagatcttacagcagagggtgttgaatgacgacggcagccgcgcgcgcggagcagccattgccgggcggcagaagtgtgcatagcgtggttctctgtagcag

SEQ ID NO: 84375 - DNA, 2537 bp, Zea Mays
ttaggcatgccttccccgatggctcgcatcttccaccgccatctcctcctcgccgtcgtcaccttagccgtggccgcttctctccttcgcccagctgccgcagtgcgcccatttgttttggttctctccggtgaggacttcctcaaggatccggccgcgcacccgtcccttccctctgccgactccgacgacgacgatgggtgggacgacttcgccgacgattcaccggccgccgacccgctactctctccgtcctcctgggcccccctcctcgacccaaccatctctctcccctctggcgatgagacggactcgccggccgacgcgctcttcgtcgcgggcacccgcgcgatgctatccgcagcgtctgatggagacgacgcggcgttcaccacggctgccgcgcagatcgaggcctcggcagaggcggggcacccgggcgcgcagtctgcgctcgcgttccttaccggcgccgggatgacgcgtccggcatcccggtcgctcgcgttcctgctgcacaagttcgccgccgacgcaggagatctccagtcaaagatggccctcgcgtactcctacttccgccaggagatgtatgaagaagctgttatactatacgctgaacttgcagaagctgccctaacaagctccttgatatcaaaggagccaccagtgattgaaccaatccgtcttcacagtgggactgaagaaaataaagaggccttgaggaagtcccgaggtgaggacgatgaagatttccaaatcacagagtatcaggcacagcgaggcaacgctgccaacatgtacaaattagggcttctgtattactatggactacgtgggctccgccgtgattatggaaaagcatttcattggttttctaaggctgttgagaaaggcgagacacgggcattggagcttctgggtgagatctatgctagaggtgctggagtggaaaggaactatactgaagcgtacaagtggttggcacttgctgccaagcagcaacattactcagcttacaatggattgggttatctatatgttaaaggctatggggtggagaagaaaaacttgacaaaattaatgctgggcaaccaaaagctatttatcaggtggcgaagctgttccagaaaggcattggtcttaagaggaatctccatatggcaacaatgctgtacaagtctattgctgagaggggaccctggagttcactgtccagatgggctctggagtcttatttgaaaggcgatgtagggaaagcattgctcttgtattccagaatggcagatcttggatatgaggttgcacagagcaatgctgcctggattctggataggtatagtgatcaaagtatttgcatgggagaatctagtttttgcacagatatggaaagacatcttcgtgcacatgctttgtggtggcatgcatccgagcagggtaatgagcatgctgctttgttgattggcgatgcctactactatggccggggcgtcgcaagggactatgaacgtgcagcagaggcatatatgcatgctcggtcacagtctaatgctcaagctatttttaaccttgggtacatgcatgagcatggtcatggactcccccttgatttgcacttggcaaaaagatattatgatcaagccgttgaggtggattcagctgctaagctccctgtcatgcttgcattaacaagtttatggctaaggacgaactatgcagacagttttttggttggttttatcgattcacttccagaaatgtatcctgttgttaaggaatgggtggaagatgttctcatggatgaagggaatgcaacaattttgactctctttgcttgccttgtaactgtcctctacttgcgagaacgccaaaggcgtcaagtagcagcagcagccaaccccctaacaacatgatgatgtggccatgtaaatgtcggttttcatgacatgggcaggccttttgcttgagggaactcgagatgtaaaatgatggctcattgacatgactcgcgcactaaattgagtagagggacatgaaagccgctggagactcagacaatgtttgctgcctggcgaatattcacctctccaagacttagggagctatgcttgtaaaggacaacaattcttggaaactggctgctcagaaatacagtttagaaatctcacagatgttgaaaagcatgctccccccttgttgcgcatatgcatggccatggaatttcgacaagcacacacggagaacatttctggaagaggcaactttacaattggtagtttagcgatcgggtaactttccatcagcatttacacgcactgtatagttttctctggatgtgttagttgaaaaggggcggtgcatgttgtgagcagcaattttgcaatagtatccatcagagtttgaagtataaacacattttttgaatagcctgaaaatagatcttacagcagagggtgttgaatgacgacggcagccgcgcgcgcggagcagccattgccgggcggcagaagtgtgcatagcgtggttctctgtagcag

SEQ ID NO: 84376 - DNA, 2600 bp, Zea Mays
ttaggcatgccttccccgatggctcgcatcttccaccgccatctcctcctcgccgtcgtcaccttagccgtggccgcttctctccttcgcccagctgccgcagtgcgcccatttgttttggttctctccggtgaggacttcctcaaggatccggccgcgcacccgtcccttccctctgccgactccgacgacgacgatgggtgggacgacttcgccgacgattcaccggccgccgacccgctactctctccgtcctcctgggcccccctcctcgacccaaccatctctctcccctctggcgatgagacggactcgccggccgacgcgctcttcgtcgcgggcacccgcgcgatgctatccgcagcgtctgatggagacgacgcggcgttcaccacggctgccgcgcagatcgaggcctcggcagaggcggggcacccgggcgcgcagtctgcgctcgcgttccttaccggcgccgggatgacgcgtccggcatcccggtcgctcgcgttcctgctgcacaagttcgccgccgacgcaggagatctccagtcaaagatggccctcgcgtactcctacttccgccaggagatgtatgaagaagctgttatactatacgctgaacttgcagaagctgccctaacaagctccttgatatcaaaggagccaccagtgattgaaccaatccgtcttcacagtgggactgaagaaaataaagaggccttgaggaagtcccgaggtgaggacgatgaagatttccaaatcacagagtatcaggcacagcgaggcaacgctgccaacatgtacaaattagggcttctgtattactatggactacgtgggctccgccgtgattatggaaaagcatttcattggttttctaaggctgttgagaaaggcgagacacgggcattggagcttctgggtgagatctatgctagaggtgctggagtggaaaggaactatactgaagcgtacaagtggttggcacttgctgccaagcagcaacattactcagcttacaatggattgggttatctatatgttaaaggctatggggtggagaagaaaaacttgacaaaagcaagggaacttttcgaacttgcagccgagaataaggaagccggtggacattataaccttggtttaatgctgggcaaccaaaagctatttatcaggtggcgaagctgttccagaaaggcattggtcttaagaggaatctccatatggcaacaatgctgtacaagtctattgctgagaggggaccctggagttcactgtccagatgggctctggagtcttatttgaaaggcgatgtagggaaagcattgctcttgtattccagaatggcagatcttggatatgaggttgcacagagcaatgctgcctggattctggataggtatagtgatcaaagtatttgcatgggagaatctagtttttgcacagatatggaaagacatcttcgtgcacatgctttgtggtggcatgcatccgagcagggtaatgagcatgctgctttgttgattggcgatgcctactactatggccggggcgtcgcaagggactatgaacgtgcagcagaggcatatatgcatgctcggtcacagtctaatgctcaagctatttttaaccttgggtacatgcatgagcatggtcatggactcccccttgatttgcacttggcaaaaagatattatgatcaagccgttgaggtggattcagctgctaagctccctgtcatgcttgcattaacaagtttatggctaaggacgaactatgcagacagttttttggttggttttatcgattcacttccagaaatgtatcctgttgttaaggaatgggtggaagatgttctcatggatgaagggaatgcaacaattttgactctctttgcttgccttgtaactgtcctctacttgcgagaacgccaaaggcgtcaagtagcagcagcagccaaccccctaacaacatgatgatgtggccatgtaaatgtcggttttcatgacatgggcaggccttttgcttgagggaactcgagatgtaaaatgatggctcattgacatgactcgcgcactaaattgagtagagggacatgaaagccgctggagactcagacaatgtttgctgcctggcgaatattcacctctccaagacttagggagctatgcttgtaaaggacaacaattcttggaaactggctgctcagaaatacagtttagaaatctcacagatgttgaaaagcatgctccccccttgttgcgcatatgcatggccatggaatttcgacaagcacacacggagaacatttctggaagaggcaactttacaattggtagtttagcgatcgggtaactttccatcagcatttacacgcactgtatagttttctctggatgtgttagttgaaaaggggcggtgcatgttgtgagcagcaattttgcaatagtatccatcagagtttgaagtataaacacattttttgaatagcctgaaaatagatcttacagcagagggtgttgaatgacgacggcagccgcgcgcgcggagcagccattgccgggcggcagaagtgtgcatagcgtggttctctgtagcag

SEQ ID NO: 84377 - DNA, 2560 bp, Zea Mays
gttaggcatgccttccccgatggctcgcatcttccaccgccatctcctcctcgccgtcgtcaccttagccgtggccgcttctctccttcgcccagctgccgcagtgcgcccatttgttttggttctctccggtgaggacttcctcaaggatccggccgcgcacccgtcccttccctctgccgactccgacgacgacgatgggtgggacgacttcgccgacgattcaccggccgccgacccgctactctctccgtcctcctgggcccccctcctcgacccaaccatctctctcccctctggcgatgagacggactcgccggccgacgcgctcttcgtcgcgggcacccgcgcgatgctatccgcagcgtctgatggagacgacgcggcgttcaccacggctgccgcgcagatcgaggcctcggcagaggcggggcacccgggcgcgcagtctgcgctcgcgttccttaccggcgccgggatgacgcgtccggcatcccggtcgctcgcgttcctgctgcacaagttcgccgccgacgcaggagatctccagtcaaagatggccctcgcgtactcctacttccgccaggagaagctgccctaacaagctccttgatatcaaaggagccaccagtgattgaaccaatccgtcttcacagtgggactgaagaaaataaagaggccttgaggaagtcccgaggtgaggacgatgaagatttccaaatcacagagtatcaggcacagcgaggcaacgctgccaacatgtacaaattagggcttctgtattactatggactacgtgggctccgccgtgattatggaaaagcatttcattggttttctaaggctgttgagaaaggcgagacacgggcattggagcttctgggtgagatctatgctagaggtgctggagtggaaaggaactatactgaagcgtacaagtggttggcacttgctgccaagcagcaacattactcagcttacaatggattgggttatctatatgttaaaggctatggggtggagaagaaaaacttgacaaaagcaagggaacttttcgaacttgcagccgagaataaggaagccggtggacattataaccttggttaatgctgggcaaccaaaagctatttatcaggtggcgaagctgttccagaaaggcattggtcttaagaggaatctccatatggcaacaatgctgtacaagtctattgctgagaggggaccctggagttcactgtccagatgggctctggagtcttatttgaaaggcgatgtagggaaagcattgctcttgtattccagaatggcagatcttggatatgaggttgcacagagcaatgctgcctggattctggataggtatagtgatcaaagtatttgcatgggagaatctagtttttgcacagatatggaaagacatcttcgtgcacatgctttgtggtggcatgcatccgagcagggtaatgagcatgctgctttgttgattggcgatgcctactactatggccggggcgtcgcaagggactatgaacgtgcagcagaggcatatatgcatgctcggtcacagtctaatgctcaagctatttttaaccttgggtacatgcatgagcatggtcatggactcccccttgatttgcacttggcaaaaagatattatgatcaagccgttgaggtggattcagctgctaagctccctgtcatgcttgcattaacaagtttatggctaaggacgaactatgcagacagttttttggttggttttatcgattcacttccagaaatgtatcctgttgttaaggaatgggtggaagatgttctcatggatgaagggaatgcaacaattttgactctctttgcttgccttgtaactgtcctctacttgcgagaacgccaaaggcgtcaagtagcagcagcagccaaccccctaacaacatgatgatgtggccatgtaaatgtcggttttcatgacatgggcaggccttttgcttgagggaactcgagatgtaaaatgatggctcattgacatgactcgcgcactaaattgagtagagggacatgaaagccgctggagactcagacaatgtttgctgcctggcgaatattcacctctccaagacttagggagctatgcttgtaaaggacaacaattcttggaaactggctgctcagaaatacagtttagaaatctcacagatgttgaaaagcatgctccccccttgttgcgcatatgcatggccatggaatttcgacaagcacacacggagaacatttctggaagaggcaactttacaattggtagtttagcgatcgggtaactttccatcagcatttacacgcactgtatagttttctctggatgtgttagttgaaaaggggcggtgcatgttgtgagcagcaattttgcaatagtatccatcagagtttgaagtataaacacattttttgaatagcctgaaaatagatcttacagcagagggtgttgaatgacgacggcagccgcgcgcgcggagcagccattgccgggcggcagaagtgtgcatagcgtggttctctgtagcag

SEQ ID NO: 84378 - DNA, 2599 bp, Zea Mays
gttaggcatgccttccccgatggctcgcatcttccaccgccatctcctcctcgccgtcgtcaccttagccgtggccgcttctctccttcgcccagctgccgcagtgcgcccatttgttttggttctctccggtgaggacttcctcaaggatccggccgcgcacccgtcccttccctctgccgactccgacgacgacgatgggtgggacgacttcgccgacgattcaccggccgccgacccgctactctctccgtcctcctgggcccccctcctcgacccaaccatctctctcccctctggcgatgagacggactcgccggccgacgcgctcttcgtcgcgggcacccgcgcgatgctatccgcagcgtctgatggagacgacgcggcgttcaccacggctgccgcgcagatcgaggcctcggcagaggcggggcacccgggcgcgcagtctgcgctcgcgttccttaccggcgccgggatgacgcgtccggcatcccggtcgctcgcgttcctgctgcacaagttcgccgccgacgcaggagatctccagtcaaagatggccctcgcgtactcctacttccgccaggagatgtatgaagaagctgttatactatacgctgaacttgcagaagctgccctaacaagctccttgatatcaaaggagccaccagtgattgaaccaatccgtcttcacagtgggactgaagaaaataaagaggccttgaggaagtcccgaggtgaggacgatgaagatttccaaatcacagagtatcaggcacagcgaggcaacgctgccaacatgtacaaattagggcttctgtattactatggactacgtgggctccgccgtgattatggaaaagcatttcattggttttctaaggctgttgagaaaggcgagacacgggcattggagcttctgggtgagatctatgctagaggtgctggagtggaaaggaactatactgaagcgtacaagtggttggcacttgctgccaagcagcaacattactcagcttacaatggattgggttatctatatgttaaaggctatggggtggagaagaaaaacttgacaaaagcaagggaacttttcgaacttgcagccgagaataaggaagccggtggacattataaccttgttaatgctgggcaaccaaaagctatttatcaggtggcgaagctgttccagaaaggcattggtcttaagaggaatctccatatggcaacaatgctgtacaagtctattgctgagaggggaccctggagttcactgtccagatgggctctggagtcttatttgaaaggcgatgtagggaaagcattgctcttgtattccagaatggcagatcttggatatgaggttgcacagagcaatgctgcctggattctggataggtatagtgatcaaagtatttgcatgggagaatctagtttttgcacagatatggaaagacatcttcgtgcacatgctttgtggtggcatgcatccgagcagggtaatgagcatgctgctttgttgattggcgatgcctactactatggccggggcgtcgcaagggactatgaacgtgcagcagaggcatatatgcatgctcggtcacagtctaatgctcaagctatttttaaccttgggtacatgcatgagcatggtcatggactcccccttgatttgcacttggcaaaaagatattatgatcaagccgttgaggtggattcagctgctaagctccctgtcatgcttgcattaacaagtttatggctaaggacgaactatgcagacagttttttggttggttttatcgattcacttccagaaatgtatcctgttgttaaggaatgggtggaagatgttctcatggatgaagggaatgcaacaattttgactctctttgcttgccttgtaactgtcctctacttgcgagaacgccaaaggcgtcaagtagcagcagcagccaaccccctaacaacatgatgatgtggccatgtaaatgtcggttttcatgacatgggcaggccttttgcttgagggaactcgagatgtaaaatgatggctcattgacatgactcgcgcactaaattgagtagagggacatgaaagccgctggagactcagacaatgtttgctgcctggcgaatattcacctctccaagacttagggagctatgcttgtaaaggacaacaattcttggaaactggctgctcagaaatacagtttagaaatctcacagatgttgaaaagcatgctccccccttgttgcgcatatgcatggccatggaatttcgacaagcacacacggagaacatttctggaagaggcaactttacaattggtagtttagcgatcgggtaactttccatcagcatttacacgcactgtatagttttctctggatgtgttagttgaaaaggggcggtgcatgttgtgagcagcaattttgcaatagtatccatcagagtttgaagtataaacacattttttgaatagcctgaaaatagatcttacagcagagggtgttgaatgacgacggcagccgcgcgcgcggagcagccattgccgggcggcagaagtgtgcatagcgtggttctctgtagcag

SEQ ID NO: 84379 - DNA, 2581 bp, Zea Mays
gttaggcatgccttccccgatggctcgcatcttccaccgccatctcctcctcgccgtcgtcaccttagccgtggccgcttctctccttcgcccagctgccgcagtgcgcccatttgttttggttctctccggtgaggacttcctcaaggatccggccgcgcacccgtcccttccctctgccgactccgacgacgacgatgggtgggacgacttcgccgacgattcaccggccgccgacccgctactctctccgtcctcctgggcccccctcctcgacccaaccatctctctcccctctggcgatgagacggactcgccggccgacgcgctcttcgtcgcgggcacccgcgcgatgctatccgcagcgtctgatggagacgacgcggcgttcaccacggctgccgcgcagatcgaggcctcggcagaggcggggcacccgggcgcgcagtctgcgctcgcgttccttaccggcgccgggatgacgcgtccggcatcccggtcgctcgcgttcctgctgcacaagttcgccgccgacgcaggagatctccagtcaaagatggccctcgcgtactcctacttccgccaggagatgtatgaagaagctgttatactatacgctgaacttgcagaagctgccctaacaagctccttgatatcaaaggagccaccagtgattgaaccaatccgtcttcacagtgggactgaagaaaataaagaggccttgaggaagtcccgaggtgaggacgatgaagatttccaaatcacagagtatcaggcacagcgaggcaacgctgccaacatgtacaaattagggcttctgtattactatggactacgtgggctccgccgtgattatggaaaagcatttcattggttttctaaggctgttgagaaaggcgagacacgggcattggagcttctgggtgagatctatgctagaggtgctggagtggaaaggaactatactgaagcgtacaagtggttggcacttgctgccaagcagcaacattactcagcttacaatggattgggttatctatatgttaaaggctatggggtggagaagaaaaacttgacaaaagcaagggaacttttcgaacttgcagccgagaataaggaagccgttaatgctgggcaaccaaaagctatttatcaggtggcgaagctgttccagaaaggcattggtcttaagaggaatctccatatggcaacaatgctgtacaagtctattgctgagaggggaccctggagttcactgtccagatgggctctggagtcttatttgaaaggcgatgtagggaaagcattgctcttgtattccagaatggcagatcttggatatgaggttgcacagagcaatgctgcctggattctggataggtatagtgatcaaagtatttgcatgggagaatctagtttttgcacagatatggaaagacatcttcgtgcacatgctttgtggtggcatgcatccgagcagggtaatgagcatgctgctttgttgattggcgatgcctactactatggccggggcgtcgcaagggactatgaacgtgcagcagaggcatatatgcatgctcggtcacagtctaatgctcaagctatttttaaccttgggtacatgcatgagcatggtcatggactcccccttgatttgcacttggcaaaaagatattatgatcaagccgttgaggtggattcagctgctaagctccctgtcatgcttgcattaacaagtttatggctaaggacgaactatgcagacagttttttggttggttttatcgattcacttccagaaatgtatcctgttgttaaggaatgggtggaagatgttctcatggatgaagggaatgcaacaattttgactctctttgcttgccttgtaactgtcctctacttgcgagaacgccaaaggcgtcaagtagcagcagcagccaaccccctaacaacatgatgatgtggccatgtaaatgtcggttttcatgacatgggcaggccttttgcttgagggaactcgagatgtaaaatgatggctcattgacatgactcgcgcactaaattgagtagagggacatgaaagccgctggagactcagacaatgtttgctgcctggcgaatattcacctctccaagacttagggagctatgcttgtaaaggacaacaattcttggaaactggctgctcagaaatacagtttagaaatctcacagatgttgaaaagcatgctccccccttgttgcgcatatgcatggccatggaatttcgacaagcacacacggagaacatttctggaagaggcaactttacaattggtagtttagcgatcgggtaactttccatcagcatttacacgcactgtatagttttctctggatgtgttagttgaaaaggggcggtgcatgttgtgagcagcaattttgcaatagtatccatcagagtttgaagtataaacacattttttgaatagcctgaaaatagatcttacagcagagggtgttgaatgacgacggcagccgcgcgcgcggagcagccattgccgggcggcagaagtgtgcatagcgtggttctctgtagcag

SEQ ID NO: 84380 - DNA, 1561 bp, Zea Mays
aagccaacacggtcacacgactgcataattgtgctcgctcgccgggccccgggacgtgacacatcgcacggccgaagcagcttgccggctgccgcgtttcgcctcccgcctgccgtgccgcccgtgaccgcgagaaggccggcagctttgcatgaggaggaggaggatgggggcactgcacgtcgtcggcgagcccaggatcagcttccgccagcagcctgcagcagtcgtcgcgaagaacggcggccacggcgccgtcgtcgaggagatccacggcctgatccgcgtctacaaggacggacacgtggagcggctcccggcgatcccagccgtgccctgcacgtggggcggcacggccccggacgcgccgggcggcgtcgtcgcgagggacgtggtggtggaccccgcgacgggggtgtgggcgcggctgtacgcgccgacgtcggcgggggacggagccaggcgccccgtcgtggtgtacttccacggcggcgggttctgcgtcgggtccgcggcctggagctgctaccacgagttcctcgcccagctcgcggcgcgcgcgggctgcgccgtgatgtccgtggactaccggctggcgcccgagcaccgcctgccggccgcgttcgacgacgggctggccgcggtgcggtggctgcggcaccaggccgcagcgtcagcgtcagcgtcagcgtgctgcaacgacgacctgtcgtggtggcgggcccgctgcggctttgaccgcgtgttcctcatgggcgacagcgcgggcgccagcatcgccttgcacgtggccgcgaggctcgggcagggccagcttggcgcgctgccccccttgaccgtcaggggcgccgtcctgatccagccattcctgggcggcgaggggcgtaccgcgtccgagaagaacgtggcgcagccgccacggtcggcgctgacgctggccacctccgactgctactggcggctggcgctgccggccggagccagccgcgagcacccctggtgcaacccgctgtcgggccgcgccgcgccgcgcctggagaccactccgctgcccccgctcctggtgtgcgtctcggagacggacatcctgcgggaccgcaacctggagctgtgcagggcgttgcgcgaggcgggcaagcgcgtggagcaggccgtgtacggcggcgtcgggcacgcgttccaggtgctccacaactgccacctgtcccagccgcggacgcaggagatgctcgcgcacatcaaggccttcgtcagcgccaggtagcaggcgccgcagcagcagccgcctcctccattcgtcgttggtccctaacaaacagacactcgccatgttaattaatccactacctaatcctaatccaatcgaagagtagatgccgtgtaagcaaccagaaccagccttgtgcagtactgtatcagtagtgtgtgacttggagcagaaagcgtccaatgcccagcccgggttgttgttgtagcggtgtcggaaagcaaaagcttatcactacactaccccggtcgtctggccgcttcatatacatcacacggaatgtccagggcgggc

SEQ ID NO: 84381 - DNA, 635 bp, Zea Mays
ccacgcttctctaatagcctcgctgcagctacccactggatattggatcggatcgatccggttcgggaacataggaacaatatgtattctaaattcaagtgaaagtattacaagaaattgtggaagggtggtgctacatgtttcaagcaacacctttcaagaaaccatggagggggagaggtagcacgtatgagacgagtggtggctcctaccatgagggtgttcgtgccatgtttgggagaacatcttttaggaaggagaagatgctacacaaaaccaatatcacaacacacttgaggagcgtaggaccacgttcacggatgatgaagtgactcgtcaaacaatgaggtcggtgtactaatgggaggagcccgagtactactaaatattggtgaactcatggagtgcacttctatatggatcgagcagaattgggcgaaatacaagacacaattgatgcttgagcaaagtattatgttgttctcatatgaggagtataatacgacacgattggtcgaatgcatacccgtgagaatgatcttatcagaggatgcattgtatctgattttatttgttaactatgaaacaatggcatgtatgtatttggattgctaaatattgctattgaacttgtg

SEQ ID NO: 84382 - DNA, 972 bp, Zea Mays
atatttattaatcaacttgacaggtgttcgacaatcaccctaagctcctctcgtttcttccttagccttttcatttatgatgactaccgtttccaatcgatcgattgcgcagctaatggggggatagattctagtttaagtactattcactaaccatgagatgaatggacgaggatgctacaggggaaaggcggaaaaggagggggctcaattatggtgctggtgctcacgggaaggagtctacagtagatttggatgcagaaccgaaatggaggtgtggaaactgttttgacttttcgtcaggagctgctggcttgatatagcgaaaggaaaacgtggccgagctggatgcgtgcaccgcgtgccagtgtggtcagaacccgtccgtgtcgtatccgacgcttatcctggtcagacacagacatggcatcggaccgcgccgtggctgacgttatccatccatctaccaccctcccctgctgccgcctggttcgttcgtcttgcaggtagacgaggcgtcttcattcatccaccggatgccctcgccgaggcggcggcggcggcttccattccatgatctacttctactccggcgacctgaacgagtcctccgggcaggtatcgtagtaggttggttaccgcgcgcgcgtggcaagaatagaaacgacttcgtcccgcgcccgctcggctaggtaagcgccggaagtgactgggcggcgcgatttggaaaatttttttggtgcaggtctgctgcaaactacaatgtttacagctctttacaaaaaaacgcggatacatctcacctgtaggtctattagataatgttttagttgtgttattactgttgtggatgcgatttatccttttttttattttttttatgagtaactgcaaacattctggtttgcaggagatctgcaccaaattttttcccttgatttttattacagcgcagtagcgcacatgttcccc

SEQ ID NO: 84383 - DNA, 6684 bp, Zea Mays
cacacatccgctccgctccgcccaccaaagcaaaagcaacccagcccgagcctcccccaatttcccttctcttccccggcgacgtccccactccccacgccaaccgccctggcccagatcgacgctgctcctccagtgccccacgccacctcccccgctcccgcgtaccgtcgcctgcgctgaaccctcttcattccgtgccgcggggtatccgccccactgtaccagtgtacctctagtgtttaatgctggtggtgtggcgcacgcgcgcgcaagagggtgtgtgtaaatagtctaggggcagagcatgagggcgggttcgaagaggcgggccaccggggctcaaaaccctagcctcgagtccgacgaggaggaggcgcggcaggtcaagggggagcttgctgacgacctcaacggataccctgcggaggaggatgaggacgaggtggtcgtggaggacgatgaggtggccatcccctccgacgacgacgaggacggtggcggcggggacaccgtcttcgtccccaacacgctggaggaggccctcgtgccgcgggttggcatggtgttcgactccgtggacgaggccttcgcgctatacaaggcctacgcctaccgcacggggttccatgccgtgcgccgcacttgccacaactacgaaggtagagtctgtcgacttggagcataatcatccttgtactccagatatggtgaggttcttaaaggcgtacagagagatgcctgagccaacaaagaagaaggccaagattacggatgagatggatgagatggtggagaaatcgctgagcgagattgctgagacaaggaagtttccgacacgacccaagaggggtgctaacgttgggtctgctgttggtagccagaggttgagtaggctcgagagttttatgcagcgtttcggggaggatgacctcaactcacttaagaagttcattgacaagatgcaacacagaaaaccaaacttcatccacagctgggatcttgatccggaaagtcatgtgaagaatttcttctggactgattctagggcccaggcgcaataccgctactttggtgacgtcattacatttgatgttatgtatttacagcattcacgtgccagccgcccattagccacactccttggggtgaacaaccatggccaccttgtgcttcttggctgtggtctcctgtccggtgacagcaaggagaactatgtttggttgttgaagaggtggttgagctgtatgaatggcaaatcgccagaagcgatcacgaccggctattcagatgtcatcacagaggccgtggctgaggtgtttccaaatgcaagacaccgcttttgcttttggcatatcttgaagaagctacttgaaaatgtgggacgcacacatgagaaagaggcaatttcctcaaggttcaaggaggttgtatatgatagtgtcactctcaccgactttgaaaaagagtggggagcaatggttgaccagtatagtctcaaagacaacaagtggttctctgctttgtacagctgtcggaagcaatgggcacctgggtatgtcaatcattcattctgggctggcacctctgctatcaggaaggctgaaaaaactgatccatactttgatagtgttgtgagtaaaaccacccttccagttttccttgagcaatatgagactaccctgaaagagaagttggaaagggaagcatatgatgatttgcgctcatactattctagactcactttgctgtcgggattgccatttgaggagcaacttgtggagctctatacagtaactatgtttcaaacgttccaggacgagattaagcaattgatgcatgttatttgtaaagaggtagacagaagtgggaactcaattacttacatggtcagtgagttaatacagggaaagaaggttgactatacagttgtttatgacaattctgacaaggatgtttggtgcatttgtcgctcctttccctcgaggggtattctttgcagtcatgctctggctgttctgaagcaagagaatgtactgatgcttccgcctaagtacatcctgaaccgctggaggaaggattttagaatactcaattcatctgcaaatgttaattgtatggaatcagataggaatttgggtttttatgatgatctctattttcgtgcacatgagtattttgaagatgtcattgacattggagcaagagaacctgagctgaaggagtttgtgttgtcagccatgaaggaagcaaaggacagactgattaggcctgatcacagccagcaaagtgatcaacggtttgatgtaaatatgactgtgattggtcaggtgtctgcagatacaggagttgatatgaacatggcatcacatacctcagcttcgattcacggggatagaagggttgatgcggatatagcaccaaatgcgccagccttagtccatggtgataccatgacatctaatacaactgccctgattcatagggacagaagagttgagataaaaatgccgatgactcaccttattcatggagagggaagacttgacatgaacataacatcccctcacctgatacagagcgatgccagagtggatatgaatatggtatcgacttctcagaatgggatgcacactttcgatttggtggatataaacctggagagtggctctatgccgatggccgcaacagattttatgcaaatgcacccacacccagcagtttaccatcccaaacagcttgttatgagagatcaggtgatagatgcaaataagagaccaaatatggaatctgacacttattttatgggaggcagtatgcatgtggggtagtttgtctacttctgtgatcctttatgttcggaattcagagaggcatccttcctttacatcgacatgtaatcatgcatgttcttagagctggcagtacaactaaacagctaggccttagtattgcagatcaaacttgactgttggtagttctgttgtaaccttttacctttttagcagttgtagcaagctggatgcccattatcttgtgcatagtgaataacctatcttaccatctagttagaactttggaaatgagatggctttagatgcaagattctgctgacatttctggtttcttttgttgactgataatatacatttgctgcatgcctatcttgcaacctattccttatggttagtgcatggtgtcatttgcatttgtcatttttcatttactgaagtctgagctcatcatctgtgcatgggaaatggatgactattttcatttattgaagggcaggcctggtgcagtgagctgtctcgttgggtcaccgaatcttgggttcgaactttgaagcagcctctcgccctctcttgcatttgtggggggacggtttggcttggtttattcctttctcagaccccactcatgtggtagcctctagcactaggtctacctttttttatataattatgcaacatgatattgttctggcagtctgttaaaatttgtctggcttctccatctctttcttggtaatgcacttttttgagataattggtgagatcaggaaagggaaattttggctgtagctgtgttacaacaagatgtaccttgctaattttattgtttagagatggtgatttttacagctctctgttgcacgtaaaggcgctagatcatcagtggacatgtcctgctattgcttgttgctgattgctttctttttttaatgagctttgacatgttaggcaatatttgccctgtttatattgacatgccacttttgatccatttgcagttaatcatggctgcagttttcaatgtttggttaaaactattgtcctggactcctttggtttaaacatgttgaatgtattgtgatgtccttgatctctcgctggttccttctgggattttccgaagtcccattgaaactttcttggcaatttgtgtttttttaccgttgatgttgcagcgagataaaaatggatgatcatcgttatgatatgctctttattagtgccacgtaaatcaccaaaaatattttaatgttcctgtaaaaatatggaaataggaccatagaagtggcatgttgcaagattattttaaatcctcggtgaataagtgtcaaccaagagaatctgcaacaaaaatgttgtaattttaaccagtgatacctttatgaatatttacctaggccattgggaaagtcatttatatatttgattatctgactcacaaatgctctttcatcggttatattatgtttacacagtacatcagagatcagtaaattatgaagcgataactgatgttgtatcagggtgattgtgtgccttcgtatcattatatgtgggctattctggcttgtgaaataattttgtaactatttctctgcaacttgttgtgtgggttcaaaaatcacagctacttgaacttgtagagcgtgattatattgcacgtgttgatttaacagctaaggtcacggtgttcataaagcagaacagcatactcagaaaattcctgcatcttataggggatgacctcccctgacccctgggcctggcagcgcactgccatcagcgcaagcacgatggcagcaggtgaggcggagggatgagcagccttgccatactggagaagaagtcgacgctgttccccgatggcggtggtatgggcggtgttctcttccaactctgagctccaggtttcagtgaactcagggccgcagggtttggtttggtgtcaaagatcggcctggaggcgaccaacacaagtggttccctgattctgcattgtggaatccttcgcccagacaagagagattggatcctcccgtccagacaacctgatagaacgacagtgtataagaacagggctcttaggacgccttttgtcaagatgggtcataactctaccctgtgaattgagatagatgatcatgtggtgcaagatattgagtccctcatctttgacgacacacataacaaatggtaagcgtctccgtggatggagcctgaagtatattcaaattcaaggcatgccacaaagcatctcgcgtgtgggatgctccggcgtgtggaaaggagaaaagccaaataaatgggtacatgtccagcaggcgtgagttcttaaatactcagattccttgtccataggcaaatgcatagttcatacgaatcagggcttcacatacatatccatttttgtgttggtagcaatataatgtttgatctcaagcttaccacaaccaagctcaattttatatgtgtgcacaccaattggattgatgaaacaaaatgtagatgacacaatacttctttagcattttatatattgagattggattatcgagggtcttgttggatgaatcctgttaaaatttgaaatgccttaagcatatgttcctgttttttatacactaggtatatttgatatatgtcgaatagagtgaatgtctcatgtgtcccttatcgaactgacctttttgtcaacagtttgaaggtgttcctaggaagggttattgctattgctgtctaaatagttgtgtctaaagatgtctttttaattttccccagatcttacaggttaattctcttcgtcattccttctatagatttctgtacagaagcaaatcacgtgctagatgcttttccttttaccaatggcttgctccaacaaaatcctgacatcacaagaagtgcaggaatttgggttacagaaaagcaattagatctctaacaattatcacataatccatctatggaatgtttggccatggtcgcagagcaggtttatattgcagggcgcgcaaagtgtgaaccatgaaatgataaaatgtgtctagttgatccatgctaacgtgacatactgacacgctaggatcccctaacataaaactttacggtattggtaaggtcaaacatttattttgtcctgctgaaatgtgttattgttatcgtcaaacatttatttttgcgttttaggtatatgcctgttctaaggatgctattatatttcgtgatatttatcattattcggtcaaaaaatttggtccgtgtaattatctactttacattagcattactaaggctgcctccagcagcgaacgctaaagcgttctgttcgccaaatctaacgaatggagacgttctggaccagtccagcaaagacctgtaaagcattcgctaaaatagcggagggtcctggcacacgttattgttggcggtttactgtgcgtcctctatccattcactttcagctcagtcgaggcacaacagaagacatgggtcgccgccggattgtggaggcacggtggtggcgggcgtggcagtgatgacttggtctacctcgagttgccacgagcagatggcggaggattggaggttaggttgtttggtcgagcgccatggcatgtgtggcgatgacaagttctgctgcttgtatagcgaggacggaaacctccagcgatgctgctacggacatgagcaagaactgagcgacacctgtgctcgctcacgagcttgaagataacaactcccgagcgacgtattcaacatgttcgacgaaatgtgtgaaaagaaatatagtgaacagaaaattattttttaaatactatacgttcacaaattgtagtagtgaaatattaaaattatgtattgttttattatgggcgtgaccacgaattta

SEQ ID NO: 84384 - DNA, 2262 bp, Zea Mays
ctccggcgcccgcgcgagctcttcttcctttccgacgccagcgcggtatcctcgtcgtcgccagtgcgcgagcgtctcctcctcctccttgcggcctcccgcgcctccgccccccccccccccccccccccccacccacacacacacatccgggagaagagtagtggatgcggagcgtctcctgtaagcggtctcccaaacgccacgcttgtactcactttgtttctaataaaaaattgctgtggtggaggccatagattccaagtggtggtttagagaagtcccaaacataccctttgtttggggagaagaatcgagagggagatagctaaactagggttaagggaattaggggccgagaggagcgcaatgagcatcgtgcccaaggagacgatcgaggtcatcgctcagagcgtcggcatccccagcctcggtgccgatgtcgccgtcgcgctcgcccctgacgtcgaataccgcctccgcgagatcatgcaggaatccattaaatgtatgcggcatgcaaagcggactgttctgacggcggatgatgttgacagtgccctgggcctcaggaatgttgagcccgtatatggatttgcctctggtgatccattacgttttaagagagctgttggacataaggatctcttctatcttgatgatcgggaggtagacttcaaagagattattgactgtcctctgcctaaagccccactggacacatcagttgtagcccattggctagcgattgagggggtacagcctgcaataccggagaatcctgctattgacgcaattgtaccaccaactgaaaataaaaggtctgagcatgggaaagatgatggacttccagctgatgtcaagcttcctgttaagcatgtattatctagagaactacagatgtactttgataaaatagctgaacttactatgagtagatctgatacgtccctttttaaagaagctttagtgagcttggcaaaagattctggtcttcatcctttagttccttacttttcctacttcattgcagacgaggttacccggagtttgggtgatcttcctgttttacttgctctaatgagagtagtccaaagtcttctccgtaatccacatattcatattgaaccttatttgcaccagctgatgccatcaatgatcacttgcattgttgcgaaaaggctagggcataggctctcagataaccactgggaacttagggacttctctgccaatttggttgccttggtatgtcagagatgatggtttcaggtttggtcatgtctatcacaaccttcaaaatcggttaactaaaacattgatccatgcatttcttgatcctgccaaatcactgacacaacattatggtgctgtccaagggatatctgcactggggcccagcgcgattagactccttcttttgcccaaccttgtgacatatatgcaacttctggagccggaactgcagcttgagaagcagaaaaacgagatgaaaaggaaggaagcttggcgtgtttatggtgccttgctgtgtgctgcaggcaaatgcttgtatgatcggttgaaactatttcctggtttgctttctccgtcgatgcggcctcttttacagagcaacaaaagggtcttaaccaacaacccaaataagcgaaaatctagcacagatctctctgcaactcagccacctctgaagaagatggcaacggacgcaacagccaactccatggcctcagcttccatgggaggaaacatgcaaggtgccatggatggctttcccaaccagttaggcaaccctggcatgatgcaggcctcgtcctctgggcagacggtggagagcatcccatcagctgcggtccggagggatcagggcagtgatctcgcgcagagagtttctgcagtgcttaggcaagcctggaaggaggaccaggacaccggtcatctcttggggtctctgtacgaggtcttcggggaagccatcttctcctttgtccaaccaccagagatatccttgtttgtgtagagagagagagagagaggaaatgcatagactctaggttttattattctacgctgttgtacaactagggatgttttgaagagttcacgaaacccggtttgacattgtcaaagtaatgtgactgaagttgtagtttactcagttgctgtgctgtgctgctatccaatgcatgctatttatgatggcgttggcattcagatggcatagtttgcttttgtaagcgcttgccattttccaactctatg

SEQ ID NO: 84385 - DNA, 2239 bp, Zea Mays
ctccggcgcccgcgcgagctcttcttcctttccgacgccagcgcggtatcctcgtcgtcgccagtgcgcgagcgtctcctcctcctccttgcggcctcccgcgcctccgccccccccccccccccccccccccacccacacacacacatccgggagaagagtagtggatgcggagcgtctcctgtaagcggtctcccaaacgccacgcttgtactcactttgtttctaataaaaaattgctgtggtggaggccatagattccaagtggtggtttagagaagtcccaaacataccctttgtttggggagaagaatcgagagggagatagctaaactagggttaagggaattaggggccgagaggagcgcaatgagcatcgtgcccaaggagacgatcgaggtcatcgctcagagcgtcggcatccccagcctcggtgccgatgtcgccgtcgcgctcgcccctgacgtcgaataccgcctccgcgagatcatgcaggaatccattaaatgtatgcggcatgcaaagcggactgttctgacggcggatgatgttgacagtgccctgggcctcaggaatgttgagcccgtatatggatttgcctctggtgatccattacgttttaagagagctgttggacataaggatctcttctatcttgatgatcgggaggtagacttcaaagagattattgactgtcctctgcctaaagccccactggacacatcagttgtagcccattggctagcgattgagggggtacagcctgcaataccggagaatcctgctattgacgcaattgtaccaccaactgaaaataaaaggtctgagcatgggaaagatgatggacttccagctgatgtcaagcttcctgttaagcatgtattatctagagaactacagatgtactttgataaaatagctgaacttactatgagtagatctgatacgtccctttttaaagaagctttagtgagcttggcaaaagattctggtcttcatcctttagttccttacttttcctacttcattgcagacgaggttacccggagtttgggtgatcttcctgttttacttgctctaatgagagtagtccaaagtcttctccgtaatccacatattcatattgaaccttatttgcaccagctgatgccatcaatgatcacttgcattgttgcgaaaaggctagggcataggctctcagataaccactgggaacttagggacttctctgccaatttggttgccttggtatgtcagaggtttggtcatgtctatcacaaccttcaaaatcggttaactaaaacattgatccatgcatttcttgatcctgccaaatcactgacacaacattatggtgctgtccaagggatatctgcactggggcccagcgcgattagactccttcttttgcccaaccttgtgacatatatgcaacttctggagccggaactgcagcttgagaagcagaaaaacgagatgaaaaggaaggaagcttggcgtgtttatggtgccttgctggcaaatgcttgtatgatcggttgaaactatttcctggtttgctttctccgtcgatgcggcctcttttacagagcaacaaaagggtcttaaccaacaacccaaataagcgaaaatctagcacagatctctctgcaactcagccacctctgaagaagatggcaacggacgcaacagccaactccatggcctcagcttccatgggaggaaacatgcaaggtgccatggatggctttcccaaccagttaggcaaccctggcatgatgcaggcctcgtcctctgggcagacggtggagagcatcccatcagctgcggtccggagggatcagggcagtgatctcgcgcagagagtttctgcagtgcttaggcaagcctggaaggaggaccaggacaccggtcatctcttggggtctctgtacgaggtcttcggggaagccatcttctcctttgtccaaccaccagagatatccttgtttgtgtagagagagagagagagaggaaatgcatagactctaggttttattattctacgctgttgtacaactagggatgttttgaagagttcacgaaacccggtttgacattgtcaaagtaatgtgactgaagttgtagtttactcagttgctgtgctgtgctgctatccaatgcatgctatttatgatggcgttggcattcagatggcatagtttgcttttgtaagcgcttgccattttccaactctatg

SEQ ID NO: 84386 - DNA, 2268 bp, Zea Mays
tgccttgtcgcgcttgcagcttgctcgtctccggcgcccgcgcgagctcttcttcctttccgacgccagcgcggtatcctcgtcgtcgccagtgcgcgagcgtctcctcctcctccttgcggcctcccgcgcctccgccccccccccccccccccccccccacccacacacacacatccgggagaagagtagtggatgcggagcgtctcctgtaagcggtctcccaaacgccacgcttgtactcactttgtttctaataaaaaattgctgtggtggaggccatagattccaagtggtggtttagagaagtcccaaacataccctttgtttggggagaagaatcgagagggagatagctaaactagggttaagggaattaggggccgagaggagcgcaatgagcatcgtgcccaaggagacgatcgaggtcatcgctcagagcgtcggcatccccagcctcggtgccgatgtcgccgtcgcgctcgcccctgacgtcgaataccgcctccgcgagatcatgcaggaatccattaaatgtatgcggcatgcaaagcggactgttctgacggcggatgatgttgacagtgccctgggcctcaggaatgttgagcccgtatatggatttgcctctggtgatccattacgttttaagagagctgttggacataaggatctcttctatcttgatgatcgggaggtagacttcaaagagattattgactgtcctctgcctaaagccccactggacacatcagttgtagcccattggctagcgattgagggggtacagcctgcaataccggagaatcctgctattgacgcaattgtaccaccaactgaaaataaaaggtctgagcatgggaaagatgatggacttccagctgatgtcaagcttcctgttaagcatgtattatctagagaactacagatgtactttgataaaatagctgaacttactatgagtagatctgatacgtccctttttaaagaagctttagtgagcttggcaaaagattctggtcttcatcctttagttccttacttttcctacttcattgcagacgaggttacccggagtttgggtgatcttcctgttttacttgctctaatgagagtagtccaaagtcttctccgtaatccacatattcatattgaaccttatttgcaccagctgatgccatcaatgatcacttgcattgttgcgaaaaggctagggcataggctctcagataaccactgggaacttagggacttctctgccaatttggttgccttggtgtttggtcatgtctatcacaaccttcaaaatcggttaactaaaacattgatccatgcatttcttgatcctgccaaatcactgacacaacattatggtgctgtccaagggatatctgcactggggcccagcgcgattagactccttcttttgcccaaccttgtgacatatatgcaacttctggagccggaactgcagcttgagaagcagaaaaacgagatgaaaaggaaggaagcttggcgtgtttatggtgccttgctgtgtgctgcaggcaaatgcttgtatgatcggttgaaactatttcctggtttgctttctccgtcgatgcggcctcttttacagagcaacaaaagggtcttaaccaacaacccaaataagcgaaaatctagcacagatctctctgcaactcagccacctctgaagaagatggcaacggacgcaacagccaactccatggcctcagcttccatgggaggaaacatgcaaggtgccatggatggctttcccaaccagttaggcaaccctggcatgatgcaggcctcgtcctctgggcagacggtggagagcatcccatcagctgcggtccggagggatcagggcagtgatctcgcgcagagagtttctgcagtgcttaggcaagcctggaaggaggaccaggacaccggtcatctcttggggtctctgtacgaggtcttcggggaagccatcttctcctttgtccaaccaccagagatatccttgtttgtgtagagagagagagagagaggaaatgcatagactctaggttttattattctacgctgttgtacaactagggatgttttgaagagttcacgaaacccggtttgacattgtcaaagtaatgtgactgaagttgtagtttactcagttgctgtgctgtgctgctatccaatgcatgctatttatgatggcgttggcattcagatggcatagtttgcttttgtaagcgcttgccattttccaactctatg

SEQ ID NO: 84387 - DNA, 6883 bp, Zea Mays
atggcgtggcggagagcaagtgtggcatggcggacgggacacccccgccgcgccggtccgccgacgtcaacgcccaaatcccgtagagaggaggtgtccctgctcttccgggtacggcgtgagcgcagttctcgcatgcgaactattcgtggtaggagagcggtaggtttttcccttttttggcagcacgcgctcgtgacgctgcgcgcttcgaccgtgcggtgttttttccttttttggcaacacgccgtcgcgagtcgcgacacttccgcgcttcgacgtgacacacatcaagacgagattggcgaagcatccctagaaatgctcccatgcctccattcgtgagtcccttttaataaacggtattgggattgggtagttatacaagagaaggtgaggttagaataagcctgcaagaagccaagtgtttgggatggcttgtgctttttttgactgagaagccaactaataagctgttccaaacagagccaatgttcctagcgtcctggacacttattacgtgtttggttggatgtataaggagggatggaagggggcggccatagtttctagtgtttggatgagagtcacgtgggggcgaggtaaacaccggagtaattttgatggtggcgtgatcccaacaaatcgaggggacggtgtcgccaccgcctaatcctactttgatctcaaaccaaacatataattagttcttataacaagatcaacaacatatctatacaagttatgtacaatagtatccataatttttggagcactatatagattaccaagaaccttctcctttacaaatagctcgcactagatctttaaattagtggaaccttctcttcacaaaagatgatgtatgcattctatttgcaataagccctaatatagacatatgcacaatgggacaccatagttctgatcttatttttgtagatattccaatagtgctttgtcttcaaccattccacaaagaacctgtcctaaaacccaccaaatatgtaatatctcacatcatattcctccaaagaaccttatgattctacctctgttttcaagtcgtccaactaatcgcgattagtcgggctagtcggttagtagagctcgattagcacaaccgactcgatcggagcacctaatcgccttggtcgtccgactagtcgacgattagggtcgattagttgctcgattagacgattctgcgtgactagggtttagtatccagattttttgattttgtgggcttttttggcgggcggcccggctacacggagatggaacgccagcgtcgtgccgtcgtctctactctctactaaaccgacggttagctctactttcctggcatctcaatctctttcctttccttctcttctctattttcctaccggctcctagacttctcattctagaatccatacttcaccagtacaccggctgaccgacgatcatctgtgcgcgctgcgcggttccagttccaagttccagacttcaccgacctagatttctcatctagacacgcacgcgcggttccagacacgcgcggttccagaaatccaggatatttcaccggcatgagatcatcttttggagaagtagtttcgaatgatatgtatgcttatttgaaaaggaacacaaggcttgtgctttctgttgaaagtgaggaaggaggacagaaagatggtgatgctactgaacctgaacaaaaggtacatgaaccaagttcagagacaaaacacaagcaagcgaagaagaaagcaactcaagccaccattagctcttttgttgtttcagctcatcccacccaaaagtccggcaagtcagtggctgccatgttttgcaagacgccagaagaagttgttgctgacaggcataaaaataaaaccactcagtcaactcttgaagcttgcacaaagaaaggaaaggaagccaagcaaattgttaacgaccatgtcgcagattttctatatgagaacaaaataccattgcacgtcgtcaattcaaggagctgggaggttatgttggagtcaattgggcaatttggtcctggatacagtggtccatcgtaccatgatgttagggtaccttggcttgatagggttgtcgatagggcaacaacattgaggtcgaagcatgaacaagcttggaaggaatatggctgcactgtttttgaatccagggaaattcttctccattagggagaaagacaagaagcaagctggaattctgagatctatgttcaatgatgtgatgtggaaaatgatcagtgatgaggaagaacaaactaaaataagtaatcaagcagatgactacgagaggtccgaaggggaagcattctcaaaacctagagcgataagagacagagagaaaaaaatcctagtaagtgttaaaccttccttctaattggttctgtctgttaatgtgctttctagtttctactgatctaagggtctgtttggttgggttgtggctgtggctgtgaaaaaagttcttgtgggctgtgagctatggaaaaagctactgtgagctgttaaaaagctagaaactgtttggtgaaaaccactaaaagccgttaaaagttcttcgatatatgttttcacagttctatccgaaagccactaaaagcatgtctatgggtgctttcagttttgcactgcgaagaagtcggcttttacaaaaaactgcttcctggatccagccctttggtttagcttttggcttttatcgggcaaaagtcaaagccaaaagtcaaaccaaagacatcctaagtatctaacaatctcaaatttatatgacagtcttatggtggggtgcctatggacaattggcatatgaactccaaagccttgcaaaaagaattataagcctatgttgctcagcatctggttgtgaaagaaactggagtgattttgcagatccatacaaaaaagagaaacagactggagcacaagagactaaataaattggcctatgtaagctacaacaggaagatggataataggttcacaaatataagagagctaggttccaagggaaagagaagcaatccactgttgcttgaagagtttacgtggcaaaattaatgggttgaagaagaatctgatggtgataacatttgggatgttgtggatgaagctctaggtgcaactcagggtcttcggggtcaaaatttgcctaggactgctgctgctggttcctcctctcaaactcagacacaaacctatgttagaaccagaaaacgacccagaaatgcaacagctacagctcaagacatacgtgaagaagatgacaattctcctgctgaagatgaacaagaacaagagacagcaagacaaatgaatgatgatgaagatgaaggcgaacaagaatcaggtggaaggggagctgcaggtgatgaatttcagttggatgaagatcttctttaggtaactgggtggtaatgggtgttgtgtggtatctgggactggtagtattagtaactagtaattgtttctttgctgttttcagtattgctgaattcatgtcatgtttaccctatccttcatatatattatatagttatataattatatactgttacagatatatgtacatgggcctggcccattaggacactagtactgtagctagggtttctgtaactgcagacattctcacatggtaccagagccttgactgttccagccgccgctgtcccatggctggccggccctctctcccctcctccggcgagctcttccctcctctccctctctcctacagggctgcgttggccgcgccctctcctcccgagcgcggcgcgactctggtcaggcaccccgcgccgccggcccccatggccggacatcccgcgccgccgcctccctccgccggatccggcgggcccgcgtcggccgcgccaccacccgccgggctggccctcatggccgggagccccgcgccgccaccgccctccagcggctccggccccgccggcgcacagcccgcgtcggccacacctctgccgccaggcctgcccgcccccgaccccgctgcacctcctcccgcgccccctgcgccgccggcgcttccttcgcctgcgccgctgccgggtccggccgggtccggctttgccggtgcctgtcccgcgtcgatctcccttcttcgcgcgtcccagaccaccgtgctcggccacgacgacgccctgctgttgcccctggtttttcccggtggcaccattggcacggcggtctacagccagccgtccgctatcacctctacaatgtgtgctccttccccttcggatgacgctgcaaccatcctcgctgcaacccgtgctgctgttgcggcggctcgccagcgggcccaggacgccgctcgtgcccttgagcaggaacaggcggttgtcgacgccatcgagcgccagtacgccgagacctaccgtcgcctcgctagcaagggtgtctcggatggttctcctatgtccgctcgtcacagcgccgacactttcgagcccgcgcccgtcccagccttgacccttcgcgcctctcttcacgcccaagcggcggccctcaccagcatccgagcaaccgtcaccgacgttctcacgtcggactccactcagtatcctcggtggcgcgaccaggtcctgcagaccctccgccgctacgcccttgccgaccacgtcctccccacggtcgctgcaccgacggaggattggctcctgatggacgaagtggtgctctcttggatccatggcaccctcacggccaaacttcaggacatcgttcgcgtgccggacgatactgctcaccatatctggggtgcccctgaggctcagttcctcgacaaccgccagactcggatcctgtacctagagaccgccttccgccagcttgttcagggcgatctctctgtggatgagtactaccgtcagatgaagacgatggcggacactctccgcaccctcggggcccccatgaccgatgagagcctcgtgctcaacctcctctgtggtctgagtcctcgcttcgatcgcgtggcccccatcctcacccgcatgaagccatttcccacctttgcggaggctaagaacgatctgcttctcgaggagcttcgcctctccgccgctgcgaccaccgctcccgccacggccctctacagcgcacctcgggctgccccctccgactccgggggggtcctgctccccgcactccggccccgctgccctctggagctccgcgacagactactggcttcgggggcgctcgcagccgcgaacgcggctgtggtcgcaagggcggacgcagtggcggtggcctgtcgggaggccgtggtggctcctcgggtggctctcagtggccatccttctacaacccgtggactagcaccattcacatgtggcccgggctgtccgcgggtgcctcggcccctcgccccaccgcctctcagcaggtcttctttgcctctgcacccccggcggcacccttggctcctccccagcctcggcaggtattctatcttccacctcccccgcccacccctctcttccctcttccatcattgtcggaaacgagtccgcccttcccgtcacctcagtaggtgacgcggtcctccccggtcctttccgcttaaccaacgttcttgttgccccccacatcattcaaaatcttcttttcgtacgtcaatttactactgacaactcttgttccatggagtttgacccgtttggtctttctgtgaaggatcttgccaccaggactcttctcgctcggtgtgacagccccgagcccctctacacgcttcgcctgcctgctcccactacttcgacctcagccccacatgttcttgcagcggccgcctcttctgcgacttggcatcgtcgtctcggccaccccgggcgtgatgtgatgtccaagctctccagtagtacttatgtttctggttgtaggggatctattgagcacctctgtcatgcttgtaagttaggtcgccatgttaggctcccattccccacctcctctagagcagcaggcatttttgatctgatacactgtgatgtatggacatcccctgtaatcagcatttctggctataagtattatttactcattctcgatgacttctcgcattatttgtggacttttcctttacgtcagaagtcggacacttttcccaccctgtctcacttctttgcctgggtctctactcaatttggtcgcaccatccgaagcatccagtgtgacaacgggcgcaagttctataacaatgcgtcccgtgacttcttcctctctcgcggcatccacctccgcatgtcatgcccctacacgtctcctcaaaacggcagggctgaacgtatgattcgcacgacaaacgatgtcgtgcgctctctactctttcaggcttcccttcctgctcactactgggctgaggccctcgccactgccacctacctcctcaaccgtcttcccaccaaggcggttgcccacccccactccttacttcgctcttttcgacatccacccctcatataaccatcttcgcgttttcgggtgcgcttgctaccctaatctcgcatccactgctcctcataaactagccccccgctccactcgctgcgtcttcctcggatactcccccgaccataaggggtatcgatgcctcgacctcacctcccacagagtcctcatctctcgtcacgtcgttttcgacgagtcggatttccccttttcgtcctctcccgcagcctctctcaccgagctcgacgtgttcctcgaccccgactctgtgtcccccactgtcgtgcctcccttccctgcaggtccgtccactgctccgcctcgtgaggccccgcttgtgacgccctcccccgcacagccacgtgcggcctcgacgcctcctg

SEQ ID NO: 84388 - DNA, 6174 bp, Zea Mays
gagacctgagcagcagtttgattcgaaaacgagtatcttaattaaaaccttccattaacagaattgcatttgtaatttggagcaggagttaggaaactctactttagttcaacgatactactttgctgacaagatttaaaaaaacacagcgcgaccatagaacagaagatctatagctaactaaatcagtgttctagttcagaaacctgattacctggtaaacctaccagattagaaacaggagagactgcccatgctgctttcatgtccaatttctaaatgattcggcaaaaactgttttgcaaaaactggcacactgctaggacaactgagaatcaggcaaaaccaatagcaggcgaacataaaaccatatttacagtttttttaaacttgcatggacaaagaagagaacgcacaccacaaagcgcacatgagatccacaacacagcaagcagcctacctttaaacgttgcacacgggaagagcaacacaagccttgcatgcctgcgccatcgccagggccgcagcggagcaacactacaacggtgcataggtagcacttgataagcagatctacaagtgtagtagcaagcgtttggtgcacaaatcagagttgagaaagaacggtacaataccttgcgcttgaagggggcgagtggatggtttccaggagggaaaatcaaccaccctggtaggtaggttgtagagctaggagggagggaagaggaaacccacggtccaagggcttatccgtggggcagcagctagaggacgacatgggtacacagcggccaaagtacaacgcactactgcggcagagggatggcgaggggcgtccaccgcgcgccccggccgatgggcagcatcacgtggcggagacctgcacaggcgctatgagagggggcggtccgaaatgaaagtacgacccgccacagatttttggcgcgcgacagatcccatggctgaagggagtacctatgagcaaaaccctacctcacccgacacgtggagcggtggacggctagatgcatggcgtggcggagagcaagtgtggcatggcggacgggacacccccgccgcgccggtccgccgacgtcaacgcccaaatcccgtagagaggaggtgtccctgctcttccgggtacggcgtgagcgcagttctcgcatgcgaactattcgtggtaggagagcgttccaagttccagacttcaccgacctagatttctcatctagacacgcacgcgcggttccagacacgcgcggttccagaaatccaggatatttcaccggcatgagatcatcttttggagaagtagtttcgaatgatatgtatgcttatttgaaaaggaacacaaggcttgtgctttctgttgaaagtgaggaaggaggacagaaagatggtgatgctactgaacctgaacaaaaggtacatgaaccaagttcagagacaaaacacaagcaagcgaagaagaaagcaactcaagccaccattagctcttttgttgtttcagctcatcccacccaaaagtccggcaagtcagtggctgccatgttttgcaagacgccagaagaagttgttgctgacaggcataaaaataaaaccactcagtcaactcttgaagcttgcacaaagaaaggaaaggaagccaagcaaattgttaacgaccatgtcgcagattttctatatgagaacaaaataccattgcacgtcgtcaattcaaggagctgggaggttatgttggagtcaattgggcaatttggtcctggatacagtggtccatcgtaccatgatgttagggtaccttggcttgatagggttgtcgatagggcaacaacattgaggtcgaagcatgaacaagcttggaaggaatatggctgcactgtttttgaatccagggaaattcttctccattagggagaaagacaagaagcaagctggaattctgagatctatgttcaatgatgtgatgtggaaaatgatcagtgatgaggaagaacaaactaaaataagtaatcaagcagatgactacgagaggtccgaaggggaagcattctcaaaacctagagcgataagagacagagagaaaaaaatcctatggtggggtgcctatggacaattggcatatgaactccaaagccttgcaaaaagaattataagcctatgttgctcagcatctggttgtgaaagaaactggagtgattttgcagcaatccatacaaaaaagagaaacagactggagcacaagagactaaataaattggcctatgtaagctacaacaggaagatggataataggttcacaaatataagagagctaggttccaagggaaagagaagcaatccactgttgcttgaagagtttacgtggcaaaattaatgggttgaagaagaatctgatggtgataacatttgggatgttgtggatgaagctctaggtgcaactcagggtcttcggggtcaaaatttgcctaggactgctgctgctggttcctcctctcaaactcagacacaaacctatgttagaaccagaaaacgacccagaaatgcaacagctacagctcaagacatacgtgaagaagatgacaattctcctgctgaagatgaacaagaacaagagacagcaagacaaatgaatgatgatgaagatgaaggcgaacaagaatcaggtggaaggggagctgcaggtgatgaatttcagttggatgaagatcttctttaggtaactgggtggtaatgggtgttgtgtggtatctgggactggtagtattagtaactagtaattgtttctttgctgttttcagtattgctgaattcatgtcatgtttaccctatccttcatatatattatatagttatataattatatactgttacagatatatgtacatgggcctggcccattaggacactagtactgtagctagggtttctgtaactgcagacattctcacatggtaccagagccttgactgttccagccgccgctgtcccatggctggccggccctctctcccctcctccggcgagctcttccctcctctccctctctcctacagggctgcgttggccgcgccctctcctcccgagcgcggcgcgactctggtcaggcaccccgcgccgccggcccccatggccggacatcccgcgccgccgcctccctccgccggatccggcgggcccgcgtcggccgcgccaccacccgccgggctggccctcatggccgggagccccgcgccgccaccgccctccagcggctccggccccgccggcgcacagcccgcgtcggccacacctctgccgccaggcctgcccgcccccgaccccgctgcacctcctcccgcgccccctgcgccgccggcgcttccttcgcctgcgccgctgccgggtccggccgggtccggctttgccggtgcctgtcccgcgtcgatctcccttcttcgcgcgtcccagaccaccgtgctcggccacgacgacgccctgctgttgcccctggtttttcccggtggcaccattggcacggcggtctacagccagccgtccgctatcacctctacaatgtgtgctccttccccttcggatgacgctgcaaccatcctcgctgcaacccgtgctgctgttgcggcggctcgccagcgggcccaggacgccgctcgtgcccttgagcaggaacaggcggttgtcgacgccatcgagcgccagtacgccgagacctaccgtcgcctcgctagcaagggtgtctcggatggttctcctatgtccgctcgtcacagcgccgacactttcgagcccgcgcccgtcccagccttgacccttcgcgcctctcttcacgcccaagcggcggccctcaccagcatccgagcaaccgtcaccgacgttctcacgtcggactccactcagtatcctcggtggcgcgaccaggtcctgcagaccctccgccgctacgcccttgccgaccacgtcctccccacggtcgctgcaccgacggaggattggctcctgatggacgaagtggtgctctcttggatccatggcaccctcacggccaaacttcaggacatcgttcgcgtgccggacgatactgctcaccatatctggggtgcccctgaggctcagttcctcgacaaccgccagactcggatcctgtacctagagaccgccttccgccagcttgttcagggcgatctctctgtggatgagtactaccgtcagatgaagacgatggcggacactctccgcaccctcggggcccccatgaccgatgagagcctcgtgctcaacctcctctgtggtctgagtcctcgcttcgatcgcgtggcccccatcctcacccgcatgaagccatttcccacctttgcggaggctaagaacgatctgcttctcgaggagcttcgcctctccgccgctgcgaccaccgctcccgccacggccctctacagcgcacctcgggctgccccctccgactccgggggggtcctgctccccgcactccggccccgctgccctctggagctccgcgacagactactggcttcgggggcgctcgcagccgcgaacgcggctgtggtcgcaagggcggacgcagtggcggtggcctgtcgggaggccgtggtggctcctcgggtggctctcagtggccatccttctacaacccgtggactagcaccattcacatgtggcccgggctgtccgcgggtgcctcggcccctcgccccaccgcctctcagcaggtcttctttgcctctgcacccccggcggcacccttggctcctccccagcctcggcaggtattctatcttccacctcccccgcccacccctctcttccctcttccatcattgtcggaaacgagtccgcccttcccgtcacctcagtaggtgacgcggtcctccccggtcctttccgcttaaccaacgttcttgttgccccccacatcattcaaaatcttcttttcgtacgtcaatttactactgacaactcttgttccatggagtttgacccgtttggtctttctgtgaaggatcttgccaccaggactcttctcgctcggtgtgacagccccgagcccctctacacgcttcgcctgcctgctcccactacttcgacctcagccccacatgttcttgcagcggccgcctcttctgcgacttggcatcgtcgtctcggccaccccgggcgtgatgtgatgtccaagctctccagtagtacttatgtttctggttgtaggggatctattgagcacctctgtcatgcttgtaagttaggtcgccatgttaggctcccattccccacctcctctagagcagcaggcatttttgatctgatacactgtgatgtatggacatcccctgtaatcagcatttctggctataagtattatttactcattctcgatgacttctcgcattatttgtggacttttcctttacgtcagaagtcggacacttttcccaccctgtctcacttctttgcctgggtctctactcaatttggtcgcaccatccgaagcatccagtgtgacaacgggcgcaagttctataacaatgcgtcccgtgacttcttcctctctcgcggcatccacctccgcatgtcatgcccctacacgtctcctcaaaacggcagggctgaacgtatgattcgcacgacaaacgatgtcgtgcgctctctactctttcaggcttcccttcctgctcactactgggctgaggccctcgccactgccacctacctcctcaaccgtcttcccaccaaggcggttgcccacccccactccttacttcgctcttttcgacatccacccctcatataaccatcttcgcgttttcgggtgcgcttgctaccctaatctcgcatccactgctcctcataaactagccccccgctccactcgctgcgtcttcctcggatactcccccgaccataaggggtatcgatgcctcgacctcacctcccacagagtcctcatctctcgtcacgtcgttttcgacgagtcggatttccccttttcgtcctctcccgcagcctctctcaccgagctcgacgtgttcctcgaccccgactctgtgtcccccactgtcgtgcctcccttccctgcaggtccgtccactgctccgcctcgtgaggccccgcttgtgacgccctcccccgcacagccacgtgcggcctcgacgcctcctg

SEQ ID NO: 84389 - DNA, 6670 bp, Zea Mays
gtgctctccaatccttggtccctctgaagggatcaaaagctccacagcaagtatgatcttcagctgacgaacaggagacctgagcagcagtttgattcgaaaacgagtatcttaattaaaaccttccattaacagaattgcatttgtaatttggagcaggagttaggaaactctactttagttcaacgatactactttgctgacaagatttaaaaaaacacagcgcgaccatagaacagaagatctatagctaactaaatcagtgttctagttcagaaacctgattacctggtaaacctaccagattagaaacaggagagactgcccatgctgctttcatgtccaatttctaaatgattcggcaaaaactgttttgcaaaaactggcacactgctaggacaactgagaatcaggcaaaaccaatagcaggcgaacataaaaccatatttacagtttttttaaacttgcatggacaaagaagagaacgcacaccacaaagcgcacatgagatccacaacacagcaagcagcctacctttaaacgttgcacacgggaagagcaacacaagccttgcatgcctgcgccatcgccagggccgcagcggagcaacactacaacggtgcataggtagcacttgataagcagatctacaagtgtagtagcaagcgtttggtgcacaaatcagagttgagaaagaacggtacaataccttgcgcttgaagggggcgagtggatggtttccaggagggaaaatcaaccaccctggtaggtaggttgtagagctaggagggagggaagaggaaacccacggtccaagggcttatccgtggggcagcagctagaggacgacatgggtacacagcggccaaagtacaacgcactactgcggcagagggatggcgaggggcgtccaccgcgcgccccggccgatgggcagcatcacgtggcggagacctgcacaggcgctatgagagggggcggtccgaaatgaaagtacgacccgccacagatttttggcgcgcgacagatcccatggctgaagggagtacctatgagcaaaaccctacctcacccgacacgtggagcggtggacggctagatgcatggcgtggcggagagcaagtgtggcatggcggacgggacacccccgccgcgccggtccgccgacgtcaacgcccaaatcccgtagagaggaggtgtccctgctcttccgggtacggcgtgagcgcagttctcgcatgcgaactattcgtggtaggagagcgttccaagttccagacttcaccgacctagatttctcatctagacacgcacgcgcggttccagacacgcgcggttccagaaatccaggatatttcaccggcatgagatcatcttttggagaagtagtttcgaatgatatgtatgcttatttgaaaaggaacacaaggcttgtgctttctgttgaaagtgaggaaggaggacagaaagatggtgatgctactgaacctgaacaaaaggtacatgaaccaagttcagagacaaaacacaagcaagcgaagaagaaagcaactcaagccaccattagctcttttgttgtttcagctcatcccacccaaaagtccggcaagtcagtggctgccatgttttgcaagacgccagaagaagttgttgctgacaggcataaaaataaaaccactcagtcaactcttgaagcttgcacaaagaaaggaaaggaagccaagcaaattgttaacgaccatgtcgcagattttctatatgagaacaaaataccattgcacgtcgtcaattcaaggagctgggaggttatgttggagtcaattgggcaatttggtcctggatacagtggtccatcgtaccatgatgttagggtaccttggcttgatagggttgtcgatagggcaacaacattgaggtcgaagcatgaacaagcttggaaggaatatggctgcactgtttttgaatccagggaaattcttctccattagggagaaagacaagaagcaagctggaattctgagatctatgttcaatgatgtgatgtggaaaatgatcagtgatgaggaagaacaaactaaaataagtaatcaagcagatgactacgagaggtccgaaggggaagcattctcaaaacctagagcgataagagacagagagaaaaaaatcctagtaagtgttaaaccttccttctaattggttctgtctgttaatgtgctttctagtttctactgatctaagggtctgtttggttgggttgtggctgtggctgtgaaaaaagttcttgtgggctgtgagctatggaaaaagctactgtgagctgttaaaaagctagaaactgtttggtgaaaaccactaaaagccgttaaaagttcttcgatatatgttttcacagttctatccgaaagccactaaaagcatgtctatgggtgctttcagttttgcactgcgaagaagtcggcttttacaaaaaactgcttcctggatccagccctttggtttagcttttggcttttatcgggcaaaagtcaaagccaaaagtcaaaccaaagacatcctaagtatctaacaatctcaaatttatatgacagtcttatggtggggtgcctatggacaattggcatatgaactccaaagccttgcaaaaagaattataagcctatgttgctcagcatctggttgtgaaagaaactggagtgattttgcagatccatacaaaaaagagaaacagactggagcacaagagactaaataaattggcctatgtaagctacaacaggaagatggataataggttcacaaatataagagagctaggttccaagggaaagagaagcaatccactgttgcttgaagagtttacgtggcaaaattaatgggttgaagaagaatctgatggtgataacatttgggatgttgtggatgaagctctaggtgcaactcagggtcttcggggtcaaaatttgcctaggactgctgctgctggttcctcctctcaaactcagacacaaacctatgttagaaccagaaaacgacccagaaatgcaacagctacagctcaagacatacgtgaagaagatgacaattctcctgctgaagatgaacaagaacaagagacagcaagacaaatgaatgatgatgaagatgaaggcgaacaagaatcaggtggaaggggagctgcaggtgatgaatttcagttggatgaagatcttctttaggtaactgggtggtaatgggtgttgtgtggtatctgggactggtagtattagtaactagtaattgtttctttgctgttttcagtattgctgaattcatgtcatgtttaccctatccttcatatatattatatagttatataattatatactgttacagatatatgtacatgggcctggcccattaggacactagtactgtagctagggtttctgtaactgcagacattctcacatggtaccagagccttgactgttccagccgccgctgtcccatggctggccggccctctctcccctcctccggcgagctcttccctcctctccctctctcctacagggctgcgttggccgcgccctctcctcccgagcgcggcgcgactctggtcaggcaccccgcgccgccggcccccatggccggacatcccgcgccgccgcctccctccgccggatccggcgggcccgcgtcggccgcgccaccacccgccgggctggccctcatggccgggagccccgcgccgccaccgccctccagcggctccggccccgccggcgcacagcccgcgtcggccacacctctgccgccaggcctgcccgcccccgaccccgctgcacctcctcccgcgccccctgcgccgccggcgcttccttcgcctgcgccgctgccgggtccggccgggtccggctttgccggtgcctgtcccgcgtcgatctcccttcttcgcgcgtcccagaccaccgtgctcggccacgacgacgccctgctgttgcccctggtttttcccggtggcaccattggcacggcggtctacagccagccgtccgctatcacctctacaatgtgtgctccttccccttcggatgacgctgcaaccatcctcgctgcaacccgtgctgctgttgcggcggctcgccagcgggcccaggacgccgctcgtgcccttgagcaggaacaggcggttgtcgacgccatcgagcgccagtacgccgagacctaccgtcgcctcgctagcaagggtgtctcggatggttctcctatgtccgctcgtcacagcgccgacactttcgagcccgcgcccgtcccagccttgacccttcgcgcctctcttcacgcccaagcggcggccctcaccagcatccgagcaaccgtcaccgacgttctcacgtcggactccactcagtatcctcggtggcgcgaccaggtcctgcagaccctccgccgctacgcccttgccgaccacgtcctccccacggtcgctgcaccgacggaggattggctcctgatggacgaagtggtgctctcttggatccatggcaccctcacggccaaacttcaggacatcgttcgcgtgccggacgatactgctcaccatatctggggtgcccctgaggctcagttcctcgacaaccgccagactcggatcctgtacctagagaccgccttccgccagcttgttcagggcgatctctctgtggatgagtactaccgtcagatgaagacgatggcggacactctccgcaccctcggggcccccatgaccgatgagagcctcgtgctcaacctcctctgtggtctgagtcctcgcttcgatcgcgtggcccccatcctcacccgcatgaagccatttcccacctttgcggaggctaagaacgatctgcttctcgaggagcttcgcctctccgccgctgcgaccaccgctcccgccacggccctctacagcgcacctcgggctgccccctccgactccgggggggtcctgctccccgcactccggccccgctgccctctggagctccgcgacagactactggcttcgggggcgctcgcagccgcgaacgcggctgtggtcgcaagggcggacgcagtggcggtggcctgtcgggaggccgtggtggctcctcgggtggctctcagtggccatccttctacaacccgtggactagcaccattcacatgtggcccgggctgtccgcgggtgcctcggcccctcgccccaccgcctctcagcaggtcttctttgcctctgcacccccggcggcacccttggctcctccccagcctcggcaggtattctatcttccacctcccccgcccacccctctcttccctcttccatcattgtcggaaacgagtccgcccttcccgtcacctcagtaggtgacgcggtcctccccggtcctttccgcttaaccaacgttcttgttgccccccacatcattcaaaatcttcttttcgtacgtcaatttactactgacaactcttgttccatggagtttgacccgtttggtctttctgtgaaggatcttgccaccaggactcttctcgctcggtgtgacagccccgagcccctctacacgcttcgcctgcctgctcccactacttcgacctcagccccacatgttcttgcagcggccgcctcttctgcgacttggcatcgtcgtctcggccaccccgggcgtgatgtgatgtccaagctctccagtagtacttatgtttctggttgtaggggatctattgagcacctctgtcatgcttgtaagttaggtcgccatgttaggctcccattccccacctcctctagagcagcaggcatttttgatctgatacactgtgatgtatggacatcccctgtaatcagcatttctggctataagtattatttactcattctcgatgacttctcgcattatttgtggacttttcctttacgtcagaagtcggacacttttcccaccctgtctcacttctttgcctgggtctctactcaatttggtcgcaccatccgaagcatccagtgtgacaacgggcgcaagttctataacaatgcgtcccgtgacttcttcctctctcgcggcatccacctccgcatgtcatgcccctacacgtctcctcaaaacggcagggctgaacgtatgattcgcacgacaaacgatgtcgtgcgctctctactctttcaggcttcccttcctgctcactactgggctgaggccctcgccactgccacctacctcctcaaccgtcttcccaccaaggcggttgcccacccccactccttacttcgctcttttcgacatccacccctcatataaccatcttcgcgttttcgggtgcgcttgctaccctaatctcgcatccactgctcctcataaactagccccccgctccactcgctgcgtcttcctcggatactcccccgaccataaggggtatcgatgcctcgacctcacctcccacagagtcctcatctctcgtcacgtcgttttcgacgagtcggatttccccttttcgtcctctcccgcagcctctctcaccgagctcgacgtgttcctcgaccccgactctgtgtcccccactgtcgtgcctcccttccctgcaggtccgtccactgctccgcctcgtgaggccccgcttgtgacgccctcccccgcacagccacgtgcggcctcgacgcctcctg

SEQ ID NO: 84390 - DNA, 2657 bp, Zea Mays
acagcttaatgcagagaagagcccgtttcaacgtacatatgctgcccagatcaaaaggtgtagtgaaatggctcgtaaattgaggttttttaaggagcagatgtcaaaagctgacataggtcctacacaactaaatgaaactcatctggattttgatgacttggagataaagcttggagaactggaagctgagctaactgaagtcaatgcaaacaatgaaaagttactgaggacctacaatgagctattagagtaccatactgttctccaaaaggctggtgattttttctattcagctcaaagaactgctgcatcacaacaaagggaattggaggcaaatcaatctggtcaaacttcactggagagccctctgttggaacagatgtcaactgatccatcaaaacaagtgaagcttggttcattgagtggccttgttccaaaggaaaaggcaatggctttcgaacggatcttattccgtgccacaaggggtaacattttccttaggcaggagcctgttgatgagcctgtcactgacccagtttctggggagaaggtaacgaagaatgcatttgttatattctactctggagagagggcaaaaaccaaaattctgaagatatgtgatgccttcaatgcgaaccgttacccattcccagaagatgttagcaaacaacttcatgctgttcaggaggtatctggaaagatctcagagttgaaggcaacaattgacatgggtttagctcatcgtgacagtatactaaaaaatattgcttctgattttgaacagtggaaccatctggtgaagaaggaaaaagcaatttatcacaccttgaacatgctgagcgttgatgttacgaagaaatgcctagttgctgagggctggagtccagtttttgcaagcattcagattcaagatgctcttcagcgtgctactgttaatagcaaatcccaagttggttcaatatttgaagttctcaacacaaaagaatctccaccaacatatttccagacaaataaatttacttcagcgttccaggaaattgttgatgcatatggtgtagccaaatatcaagaagcaaatcctggagtattcaccatcgtgactttcccttttctatttgccgtcatgtttggtgattggggccatgggatttgcttgttacttgcaacactttatctgataatacgggagaagaaactagcttcacagaaacttggagacataatggagatgatgtttggtgggcgttatgtaattatgatgatggcagttttttcaatctacacaggattaatatacaatgaatttttctctgttccatttgggctttttggtaaatctgcctatgcatgccgtgattcttcttgtagtgatgctactactgaaggactaattaaggtaagagatgcatacccttttggtgtggaccctgtttggcatggtagccgcagcgagctgccgtttctcaattcactgaagatgaagatgtccattcttcttggagttgcacaaatgaaccttgggattgtgatcagctacttcaatgcaaaattttttaggaacagtcttaatgtgtggtaccagttcattccccagctgatcttcttgaacagcttatttggttacctgtccttgcttattattattaagtggtgcacggggtcaaaagcagatctataccatgttatgatctacatgttccttagcccaacagatgagattggtgaaaaccagttgtttagtggccagaagacagtgcagcttgttctacttctgcttgctctggtgtctgtgccttggatgttgattccaaaacctcttctattgaagaagcaacatcagcaaaggcatcaaggtcaccagtacgcaatgcttcagggcgttgatgaatcagtgggagcagagctgggggaacatcatgaggaagcacatgaccatgaggagtttgagttcagcgaagtttttgttcaccagctgattcacacgatcgaatttgttcttggtgcagtctcaaacacagcttcgtaccttcgcctttgggctctgagtcttgcacactccgagttgtccactgtattctacgataaagtactactcatggcatgggggtttaacaatgtcatcatccttattattggcatcatcgtcttcatatttgccacggttggtgtcctgcttgttatggagaccctgagtgcattccttcacgcactgaggcttcactgggtggagttccagaacaagttctatgaaggtgatggttacaagttcgccccattctcctttgcgctgattcgtgaggaagaagattgagatcgtcccatgtagccgatgtacaatctttgatggcctttgttcccggaacaaatcattttttcatctgttgtctcggatggatcataaacctcagtcccctttgtttagacatgggacgaacagcaccatttttccttgtttagctatgcagaggatttttgggtcggttggcggcaaacatggggggtgatatcaccattgtatgatgctaataagtagttgccgattgggcggtgtgttggatataaataagcactgtattgaaggttaaacattccgctacgttcgttgtcaataaagagtgctatttacgctgctggcgttagtcatttcctggtct

SEQ ID NO: 84391 - DNA, 2752 bp, Zea Mays
acagcttaatgcagagaagagcccgtttcaacgtacatatgctgcccagatcaaaaggtgtagtgaaatggctcgtaaattgaggttttttaaggagcagatgtcaaaagctgacataggtcctacacaactaaatgaaactcatctggattttgatgacttggagataaagcttggagaactggaagctgagctaactgaagtcaatgcaaacaatgaaaagttactgaggacctacaatgagctattagagtaccatactgttctccaaaaggctggtgattttttctattcagctcaaagaactgctgcatcacaacaaagggaattggaggcaaatcaatctggtcaaacttcactggagagccctctgttggaacaggagatgtcaactgatccatcaaaacaagtgaagcttggttcattgagtggccttgttccaaaggaaaaggcaatggctttcgaacggatcttattccgtgccacaaggggtaacattttccttaggcaggagcctgttgatgagcctgtcactgacccagtttctggggagaaggtaacgaagaatgcatttgttatattctactctggagagagggcaaaaaccaaaattctgaagatatgtgatgccttcaatgcgaaccgttacccattcccagaagatgttagcaaacaacttcatgctgttcaggaggtatctggaaagatctcagagttgaaggcaacaattgacatgggtttagctcatcgtgacagtatactaaaaaatattgcttctgattttgaacagtggaaccatctggtgaagaaggaaaaagcaatttatcacaccttgaacatgctgagcgttgatgttacgaagaaatgcctagttgctgagggctggagtccagtttttgcaagcattcagattcaagatgctcttcagcgtgctactgttaatagcaaatcccaagttggttcaatatttgaagttctcaacacaaaagaatctccaccaacatatttccagacaaataaatttacttcagcgttccaggaaattgttgatgcatatgggtatgtagccaaatatcaagaagcaaatcctggagtattcaccatcgtgactttcccttttctatttgccgtcatgtttggtgattggggccatgggatttgcttgttacttgcaacactttatctgataatacgggagaagaaactagcttcacagaaacttggagacataatggagatgatgtttggtgggcgttatgtaattatgatgatggcagttttttcaatctacacaggattaatatacaatgaatttttctctgttccatttgggctttttggtaaatctgcctatgcatgccgtgattcttcttgtaggtaaggaaaatgaaataaataaacctatgcttatttatttatagaactgcacatttatctggctcattaatttccccacttgttcatagtgatgctactactgaaggactaattaaggtaagagatgcatacccttttggtgtggaccctgtttggcatggtagccgcagcgagctgccgtttctcaattcactgaagatgaagatgtccattcttcttggagttgcacaaatgaaccttgggattgtgatcagctacttcaatgcaaaattttttaggaacagtcttaatgtgtggtaccagttcattccccagctgatcttcttgaacagcttatttggttacctgtccttgcttattattattaagtggtgcacggggtcaaaagcagatctataccatgttatgatctacatgttccttagcccaacagatgagattggtgaaaaccagttgtttagtggccagaagacagtgcagcttgttctacttctgcttgctctggtgtctgtgccttggatgttgattccaaaacctcttctattgaagaagcaacatcagcaaaggcatcaaggtcaccagtacgcaatgcttcagggcgttgatgaatcagtgggagcagagctgggggaacatcatgaggaagcacatgaccatgaggagtttgagttcagcgaagtttttgttcaccagctgattcacacgatcgaatttgttcttggtgcagtctcaaacacagcttcgtaccttcgcctttgggctctgagtcttgcacactccgagttgtccactgtattctacgataaagtactactcatggcatgggggtttaacaatgtcatcatccttattattggcatcatcgtcttcatatttgccacggttggtgtcctgcttgttatggagaccctgagtgcattccttcacgcactgaggcttcactgggtggagttccagaacaagttctatgaaggtgatggttacaagttcgccccattctcctttgcgctgattcgtgaggaagaagattgagatcgtcccatgtagccgatgtacaatctttgatggcctttgttcccggaacaaatcattttttcatctgttgtctcggatggatcataaacctcagtcccctttgtttagacatgggacgaacagcaccatttttccttgtttagctatgcagaggatttttgggtcggttggcggcaaacatggggggtgatatcaccattgtatgatgctaataagtagttgccgattgggcggtgtgttggatataaataagcactgtattgaaggttaaacattccgctacgttcgttgtcaataaagagtgctatttacgctgctggcgttagtcatttcctggtct

SEQ ID NO: 84392 - DNA, 2183 bp, Zea Mays
acagcttaatgcagagaagagcccgtttcaacgtacatatgctgcccagatcaaaaggtgtagtgaaatggctcgtaaattgaggttttttaaggagcagatgtcaaaagctgacataggtcctacacaactaaatgaaactcatctggattttgatgacttggagataaagcttggagaactggaagctgagctaactgaagtcaatgcaaacaatgaaaagttactgaggacctacaatgagctattagagtaccatactgttctccaaaagctcaaagaactgctgcatcacaacaaagggaattggaggcaaatcaatctggtgaagaaggaaaaagcaatttatcacaccttgaacatgctgagcgttgatgttacgaagaaatgcctagttgctgagggctggagtccagtttttgcaagcattcagattcaagatgctcttcagcgtgctactgttaatagcaaatcccaagttggttcaatatttgaagttctcaacacaaaagaatctccaccaacatatttccagacaaataaatttacttcagcgttccaggaaattgttgatgcatatggtgtagccaaatatcaagaagcaaatcctggagtattcaccatcgtgactttcccttttctatttgccgtcatgtttggtgattggggccatgggatttgcttgttacttgcaacactttatctgataatacgggagaagaaactagcttcacagaaacttggagacataatggagatgatgtttggtgggcgttatgtaattatgatgatggcagttttttcaatctacacaggattaatatacaatgaatttttctctgttccatttgggctttttggtaaatctgcctatgcatgccgtgattcttcttgtagtgatgctactactgaaggactaattaaggtaagagatgcatacccttttggtgtggaccctgtttggcatggtagccgcagcgagctgccgtttctcaattcactgaagatgaagatgtccattcttcttggagttgcacaaatgaaccttgggattgtgatcagctacttcaatgcaaaattttttaggaacagtcttaatgtgtggtaccagttcattccccagctgatcttcttgaacagcttatttggttacctgtccttgcttattattattaagtggtgcacggggtcaaaagcagatctataccatgttatgatctacatgttccttagcccaacagatgagattggtgaaaaccagttgtttagtggccagaagacagtgcagcttgttctacttctgcttgctctggtgtctgtgccttggatgttgattccaaaacctcttctattgaagaagcaacatcagcaaaggcatcaaggtcaccagtacgcaatgcttcagggcgttgatgaatcagtgggagcagagctgggggaacatcatgaggaagcacatgaccatgaggagtttgagttcagcgaagtttttgttcaccagctgattcacacgatcgaatttgttcttggtgcagtctcaaacacagcttcgtaccttcgcctttgggctctgagtcttgcacactccgagttgtccactgtattctacgataaagtactactcatggcatgggggtttaacaatgtcatcatccttattattggcatcatcgtcttcatatttgccacggttggtgtcctgcttgttatggagaccctgagtgcattccttcacgcactgaggcttcactgggtggagttccagaacaagttctatgaaggtgatggttacaagttcgccccattctcctttgcgctgattcgtgaggaagaagattgagatcgtcccatgtagccgatgtacaatctttgatggcctttgttcccggaacaaatcattttttcatctgttgtctcggatggatcataaacctcagtcccctttgtttagacatgggacgaacagcaccatttttccttgtttagctatgcagaggatttttgggtcggttggcggcaaacatggggggtgatatcaccattgtatgatgctaataagtagttgccgattgggcggtgtgttggatataaataagcactgtattgaaggttaaacattccgctacgttcgttgtcaataaagagtgctatttacgctgctggcgttagtcatttcctggtct

SEQ ID NO: 84393 - DNA, 2660 bp, Zea Mays
acagcttaatgcagagaagagcccgtttcaacgtacatatgctgcccagatcaaaaggtgtagtgaaatggctcgtaaattgaggttttttaaggagcagatgtcaaaagctgacataggtcctacacaactaaatgaaactcatctggattttgatgacttggagataaagcttggagaactggaagctgagctaactgaagtcaatgcaaacaatgaaaagttactgaggacctacaatgagctattagagtaccatactgttctccaaaaggctggtgattttttctattcagctcaaagaactgctgcatcacaacaaagggaattggaggcaaatcaatctggtcaaacttcactggagagccctctgttggaacaggagatgtcaactgatccatcaaaacaagtgaagcttggttcattgagtggccttgttccaaaggaaaaggcaatggctttcgaacggatcttattccgtgccacaaggggtaacattttccttaggcaggagcctgttgatgagcctgtcactgacccagtttctggggagaaggtaacgaagaatgcatttgttatattctactctggagagagggcaaaaaccaaaattctgaagatatgtgatgccttcaatgcgaaccgttacccattcccagaagatgttagcaaacaacttcatgctgttcaggaggtatctggaaagatctcagagttgaaggcaacaattgacatgggtttagctcatcgtgacagtatactaaaaaatattgcttctgattttgaacagtggaaccatctggtgaagaaggaaaaagcaatttatcacaccttgaacatgctgagcgttgatgttacgaagaaatgcctagttgctgagggctggagtccagtttttgcaagcattcagattcaagatgctcttcagcgtgctactgttaatagcaaatcccaagttggttcaatatttgaagttctcaacacaaaagaatctccaccaacatatttccagacaaataaatttacttcagcgttccaggaaattgttgatgcatatggtgtagccaaatatcaagaagcaaatcctggagtattcaccatcgtgactttcccttttctatttgccgtcatgtttggtgattggggccatgggatttgcttgttacttgcaacactttatctgataatacgggagaagaaactagcttcacagaaacttggagacataatggagatgatgtttggtgggcgttatgtaattatgatgatggcagttttttcaatctacacaggattaatatacaatgaatttttctctgttccatttgggctttttggtaaatctgcctatgcatgccgtgattcttcttgtagtgatgctactactgaaggactaattaaggtaagagatgcatacccttttggtgtggaccctgtttggcatggtagccgcagcgagctgccgtttctcaattcactgaagatgaagatgtccattcttcttggagttgcacaaatgaaccttgggattgtgatcagctacttcaatgcaaaattttttaggaacagtcttaatgtgtggtaccagttcattccccagctgatcttcttgaacagcttatttggttacctgtccttgcttattattattaagtggtgcacggggtcaaaagcagatctataccatgttatgatctacatgttccttagcccaacagatgagattggtgaaaaccagttgtttagtggccagaagacagtgcagcttgttctacttctgcttgctctggtgtctgtgccttggatgttgattccaaaacctcttctattgaagaagcaacatcagcaaaggcatcaaggtcaccagtacgcaatgcttcagggcgttgatgaatcagtgggagcagagctgggggaacatcatgaggaagcacatgaccatgaggagtttgagttcagcgaagtttttgttcaccagctgattcacacgatcgaatttgttcttggtgcagtctcaaacacagcttcgtaccttcgcctttgggctctgagtcttgcacactccgagttgtccactgtattctacgataaagtactactcatggcatgggggtttaacaatgtcatcatccttattattggcatcatcgtcttcatatttgccacggttggtgtcctgcttgttatggagaccctgagtgcattccttcacgcactgaggcttcactgggtggagttccagaacaagttctatgaaggtgatggttacaagttcgccccattctcctttgcgctgattcgtgaggaagaagattgagatcgtcccatgtagccgatgtacaatctttgatggcctttgttcccggaacaaatcattttttcatctgttgtctcggatggatcataaacctcagtcccctttgtttagacatgggacgaacagcaccatttttccttgtttagctatgcagaggatttttgggtcggttggcggcaaacatggggggtgatatcaccattgtatgatgctaataagtagttgccgattgggcggtgtgttggatataaataagcactgtattgaaggttaaacattccgctacgttcgttgtcaataaagagtgctatttacgctgctggcgttagtcatttcctggtct

SEQ ID NO: 84394 - DNA, 3082 bp, Zea Mays
atcccctttcgatctatgatagtggctaggtgataagtaggactttgtgatcggggctttctgggagttagtcagggtttcctgtcgacactacaaaattgggaatttgcagctacgacgtgcaattttttgctctttactgttctccaacattggaatagcggtataatggttcacattggtgagattggttgtagtcggaaccaggagtttagcacatgatgaatgttttttattgggaattatctcacatatgcagaatttccagtagtcaatgaaagtaacagctcctgctaaaatttaccattggtatgatattgtgcttcattagctgaccgtgatggtgtgcttttgatgcccgctctaggtgctgattattttaccggttgattttactgttaatctgattactttttttcgccacagcttaatgcagagaagagcccgtttcaacgtacatatgctgcccagatcaaaaggtgtagtgaaatggctcgtaaattgaggttttttaaggagcagatgtcaaaagctgacataggtcctacacaactaaatgaaactcatctggattttgatgacttggagataaagcttggagaactggaagctgagctaactgaagtcaatgcaaacaatgaaaagttactgaggacctacaatgagctattagagtaccatactgttctccaaaaggctggtgattttttctattcagctcaaagaactgctgcatcacaacaaagggaattggaggcaaatcaatctggtcaaacttcactggagagccctctgttggaacaggagatgtcaactgatccatcaaaacaagtgaagcttggttcattgagtggccttgttccaaaggaaaaggcaatggctttcgaacggatcttattccgtgccacaaggggtaacattttccttaggcaggagcctgttgatgagcctgtcactgacccagtttctggggagaaggtaacgaagaatgcatttgttatattctactctggagagagggcaaaaaccaaaattctgaagatatgtgatgccttcaatgcgaaccgttacccattcccagaagatgttagcaaacaacttcatgctgttcaggaggtatctggaaagatctcagagttgaaggcaacaattgacatgggtttagctcatcgtgacagtatactaaaaaatattgcttctgattttgaacagtggaaccatctggtgaagaaggaaaaagcaatttatcacaccttgaacatgctgagcgttgatgttacgaagaaatgcctagttgctgagggctggagtccagtttttgcaagcattcagattcaagatgctcttcagcgtgctactgttaatagcaaatcccaagttggttcaatatttgaagttctcaacacaaaagaatctccaccaacatatttccagacaaataaatttacttcagcgttccaggaaattgttgatgcatatggtgtagccaaatatcaagaagcaaatcctggagtattcaccatcgtgactttcccttttctatttgccgtcatgtttggtgattggggccatgggatttgcttgttacttgcaacactttatctgataatacgggagaagaaactagcttcacagaaacttggagacataatggagatgatgtttggtgggcgttatgtaattatgatgatggcagttttttcaatctacacaggattaatatacaatgaatttttctctgttccatttgggctttttggtaaatctgcctatgcatgccgtgattcttcttgtagtgatgctactactgaaggactaattaaggtaagagatgcatacccttttggtgtggaccctgtttggcatggtagccgcagcgagctgccgtttctcaattcactgaagatgaagatgtccattcttcttggagttgcacaaatgaaccttgggattgtgatcagctacttcaatgcaaaattttttaggaacagtcttaatgtgtggtaccagttcattccccagctgatcttcttgaacagcttatttggttacctgtccttgcttattattattaagtggtgcacggggtcaaaagcagatctataccatgttatgatctacatgttccttagcccaacagatgagattggtgaaaaccagttgtttagtggccagaagacagtgcagcttgttctacttctgcttgctctggtgtctgtgccttggatgttgattccaaaacctcttctattgaagaagcaacatcagcaaaggcatcaaggtcaccagtacgcaatgcttcagggcgttgatgaatcagtgggagcagagctgggggaacatcatgaggaagcacatgaccatgaggagtttgagttcagcgaagtttttgttcaccagctgattcacacgatcgaatttgttcttggtgcagtctcaaacacagcttcgtaccttcgcctttgggctctgagtcttgcacactccgagttgtccactgtattctacgataaagtactactcatggcatgggggtttaacaatgtcatcatccttattattggcatcatcgtcttcatatttgccacggttggtgtcctgcttgttatggagaccctgagtgcattccttcacgcactgaggcttcactgggtggagttccagaacaagttctatgaaggtgatggttacaagttcgccccattctcctttgcgctgattcgtgaggaagaagattgagatcgtcccatgtagccgatgtacaatctttgatggcctttgttcccggaacaaatcattttttcatctgttgtctcggatggatcataaacctcagtcccctttgtttagacatgggacgaacagcaccatttttccttgtttagctatgcagaggatttttgggtcggttggcggcaaacatggggggtgatatcaccattgtatgatgctaataagtagttgccgattgggcggtgtgttggatataaataagcactgtattgaaggttaaacattccgctacgttcgttgtcaataaagagtgctatttacgctgctggcgttagtcatttcctggtct

SEQ ID NO: 84395 - DNA, 1707 bp, Zea Mays
acagcttaatgcagagaagagcccgtttcaacgtacatatgctgcccagatcaaaaggtgtagtgaaatggctcgtaaattgaggttttttaaggagcagatgtcaaaagctgacataggtcctacacaactaaatgaaactcatctggattttgatgacttggagataaagcttggagaactggaagctgagctaactgaagtcaatgcaaacaatgaaaagttactgaggacctacaatgagctattagagtaccatactgttctccaaaaggctggtgattttttctattcagctcaaagaactgctgcatcacaacaaagggaattggaggcaaatcaatctggtcaaacttcactggagagccctctgttggaacaggagatgtcaactgatccatcaaaacaagtgaagcttggttcattgagtggccttgttccaaaggaaaaggcaatggctttcgaacggatcttattccgtgccacaaggggtaacattttccttaggcaggagcctgttgatgagcctgtcactgacccagtttctggggagaaggtaacgaagaatgcatttgttatattctactctggagagagggcaaaaaccaaaattctgaagatatgtgatgccttcaatgcgaaccgttacccattcccagaagatgttagcaaacaacttcatgctgttcaggaggtatctggaaagatctcagagttgaaggcaacaattgacatgggtttagctcatcgtgacagtatactaaaaaatattgcttctgattttgaacagtggaaccatctggtgaagaaggaaaaagcaatttatcacaccttgaacatgctgagcgttgatgttacgaagaaatgcctagttgctgagggctggagtccagtttttgcaagcattcagattcaagatgctcttcagcgtgctactgttaatagcaaatcccaagttggttcaatatttgaagttctcaacacaaaagaatctccaccaacatatttccagacaaataaatttacttcagcgttccaggaaattgttgatgcatatggtgtagccaaatatcaagaagcaaatcctggagtattcaccatcgtgactttcccttttctatttgccgtcatgtttggtgattggggccatgggatttgcttgttacttgcaacactttatctgataatacgggagaagaaactagcttcacagaaacttggagacataatggagatgatgtttggtgggcgttatgtaattatgatgatggcagttttttcaatctacacaggattaatatacaatgaatttttctctgttccatttgggctttttggtaaatctgcctatgcatgccgtgattcttcttgtaggtaaggaaaatgaaataaataaacctatgcttatttatttatagaactgcacatttatctggctcattaatttccccacttgttcatagtgatgctactactgaaggactaattaaggtaagagatgcatacccttttggtgtggaccctgtttggcatggtagccgcagcgagctgccgtttctcaattcactgaagatgaagatgtccattcttcttggagttgcacaaatgaaccttgggattgtgatcagctacttcaatgcaaaattttttaggaacagtcttaatgtgtgacaacagattatgatttttccacgcttactcctttga

SEQ ID NO: 84396 - DNA, 721 bp, Zea Mays
taccgtttaaaagttaaaaagggggttgatggaatggggtttgctcccggtggatgtggctagaaaatgttttgagaagaaacaaggtcagaaggttaagtcaccagtcaaagcaattgtggcgaagagaattccttcttctccagccaagacactgccttcatctgcaaagaagttagttatgccttcaaacagtgctggaaagctgaagtctcagaagaaaaggaaggcaagtgatgacacagatgatgacgacgacgacgatgattttgtagcttctaaagcaaagaccaagaggcacaaggcctagttaggtcctagcatctcattatcctagtaatgagacgtgttcttcagacaatttctagctcggatgaccttggatgattgttccttccattggtttgctcatttggggcgcgcaactaaattatgtgaagtagcgtgttgtgttgtgtcaagaagtaccacttgtcgatggccttttcagatctggaatgaaggtaagttcctgcaaactttcacttggttagcatttgactccagtgaaacatctggttggttagcatttgactccagtgaaacatctggttggatgactgtatttgcacggggtaacatatttcgccgagctcgacgtaggcgcatccccaagcaaaacagaatttagaataattattaggttgccgtcgatgatacgtaattctgaaaagcttgaacg

SEQ ID NO: 84397 - DNA, 1121 bp, Zea Mays
ggcgggcgtcgcagtgcgagtgacgctagggaaacgagaagcagaaaggcaacaatagcaatatgaaggcttcttcgaaagtcaagaaagaagtcagttctgatgatgattttgtcatgccaacggcgcagaagaaaagtgcaggtgctgctggaagtaatgccaagacatccaaggttaaaaaaattaaagatgaagatttggaagatctcaaggaggacaagaaaaggaagaaacgagtgggtgtcaaagaagaggcaaagttggccttggccattgtaaagggagagaaggttaagaaagagaggaaagtgtatggtttgccagggcagaagcatgatcctcctgaagaaagggatccattgaggatattctatgaatcactctatgagcaggtccccaccagtgacatggctgcaacctggttgatggaatggggtttgctcccggtggatgtggctagaaaatgttttgagaagaaacaaggtcagaaggttaagtcaccagtcaaagcaattgtggcgaagagaattccttcttctccagccaagacactgccttcatctgcaaagaagttagttatgccttcaaacagtgctggaaagctgaagtctcagaagaaaaggaaggcaagtgatgacacagatgatgacgacgacgacgatgattttgtagcttctaaagcaaagaccaagaggcacaaggcctagttaggtcctagcatctcattatcctagtaatgagacgtgttcttcagacaatttctagctcggatgaccttggatgattgttccttccattggtttgctcatttggggcgcgcaactaaattatgtgaagtagcgtgttgtgttgtgtcaagaagtaccacttgtcgatggccttttcagatctggaatgaaggtaagttcctgcaaactttcacttggttagcatttgactccagtgaaacatctggttggttagcatttgactccagtgaaacatctggttggatgactgtatttgcacggggtaacatatttcgccgagctcgacgtaggcgcatccccaagcaaaacagaatttagaataattattaggttgccgtcgatgatacgtaattctgaaaagcttgaacg

SEQ ID NO: 84398 - DNA, 557 bp, Zea Mays
tctcgcctacccgcgcacccgccccccccctctctccctttgcctaccgagcgactaagcgaagactcccttttccccgagcacaagagaaccatggcggcggcggcagtatacggcggcttcaaggggaagcttggcgtcgaggatgcccccgagctgcagctcaaccgcatccgcatcacactctcatccaagaacgtcaagaacttggagaaaggtataaccaaacctcatgaattcacatatctttctcaagtggtctaatatcttagctaatctcgatcgtatggagtatatagtagtggcgtatacaagctttcattgacggataattcgtatattgtttacgattatgctttagatctgcctgtcgaatttgttgcttcccgtcctagtctcgagaacatgtacaaatctatctcggagacagttagtcgcggattacaatggctgggtgtgcgaacccattttctatgcgccattcgatttgctatttgcctatgcacaagcggtggtgcagtgcctaagtgctttgtttgttctgttggatggtattg

SEQ ID NO: 84399 - DNA, 1348 bp, Zea Mays
cgctggtttactcatgcttcaccgatgcttttttcaatgctggcacgtcgaggccccaattaagcagctgttttcttatatgcatgaaagatgacatcattgagggaatctatgaaaccctcaaagagtgtgctgtaataagcaaatctgctggaggaattggtgtctcagttcataatgtctgtgctactgagagttatattcgaggaacaaatggaacatcaaatggaattgttcttatgttacgtgtctttaatgatactgctcgctatgttgatcagggtggtggcaaaagaaaggtgcattttgctgtatacttggagccttggcatgctgatatttttgagttccttgatctgagaaagaaccccgggaaggttcttaaggaatcaagtgacgaggaaagggagcaagctgaagagaagatgaagtactaggttcttaaggaatcaagtgacgagaaaagggagcaagctgaagagatgatgaagtactagatttgtgtctgagtagcaaaattccagaagtgtttggcatcatgcaggcaactactgttatgtgagcacataaaatttgtgtgtgttttttgtggaagaggtcatttttgctgttctacatccatctttctcaacaagaaaaacaagacaacatgttaaatattaacacatcaacttgtattattatttttgtatattaggtttattttttctctatttttagggcatttttattatgaccattagatcttgatctagtggatatgagatgtgtgtgttttgtgtttccaaaacacacagtttttcttaaaagaaatatgtgtgttttttcagctacaaacacacgcgtgtttttaggcataaattgtccatgtgctgtatagacagtcccaaactaaaacataataacaataattgagtggtataataaatttttaataaaattattaaaaatagaattgtaaaatttatttatttataaaaatatcaggaacaccaatgtaaaaaatgattttaaattagatatattttttaagagatatagttagacaaagtacataaaaacaatatacaatttgcttatagtggacaactcacaacaatttaaaacaaaacgactttcatttttttcttatagtaattttttcatagcagacagctcacatcggttttttagtctttagtcgtgcagtgtttagtcaagcaacctttagtcgagtagcgtttagtcaagcaacctttgtcgagtagcgtttagtcaagcaacctaaagtaaagcattcttcagtcaaatggggtgaatgattttcagtcggacgatctttagtcggataaacgattttgagtcgagt

SEQ ID NO: 84400 - DNA, 2125 bp, Zea Mays
ctcgcttcttcctgtactttgcaagaatgggaagaagtcatttttgaagtataccgttctgaaagtgtgggtgattgctggtttataaccagccaaaaacccatagaagaataagaagtgctctgcatctcccctggtcttaaattccatcccaacttgagcatcaaagttttcacgagcacttgatgtttcaactgcccttccatctacatttggtgcacaatcagatcatttggagttttcgagatggatgatttcgtacctcagcgtatgcacttgaacatccatccacttcaaaattcttaccttgtttatggacatatagctagacgaaatgcagctgttgtgctctagtcatcaaataagaaggcataggttgagaagatcatggagaccaagcaagtttggaggcggaggcgtaggggcaagttcatgtaataggtttgttttttgtgtggcagatcatcattggatggctaatggatagtgtcaggtttctctccaattgcagaggttatttttacgtgggtagcactgattgaatgagagaaacaacattaaaatgagggcgtggggctcatatctggtggcgaggattgttgtatcgaacctgcacaagaacacgaagaagtcattctcggagacgtttaaggacatgtacatgcaaacaagagatccaggctgatgcccctctggtcactgaagatgtttatgaaatcatcatgaagaatgctgctcgcttggacagtgagataatttatgatagggatttcgactacgactattttggcttcaaaactctagagaggtcttacctgttgaagcttgatggtaagttaagcagctgttttcttatatgcatgaaagatgacatcattgagggaatctatgaaaccctcaaagagtgtgctgtaataagcaaatctgctggaggaattggtgtctcagttcataatgtctgtgctactgagagttatattcgaggaacaaatggaacatcaaatggaattgttcttatgttacgtgtctttaatgatactgctcgctatgttgatcagggtggtggcaaaagaaaggtgcattttgctgtatacttggagccttggcatgctgatatttttgagttccttgatctgagaaagaaccccgggaaggttcttaaggaatcaagtgacgaggaaagggagcaagctgaagagaagatgaagtactaggttcttaaggaatcaagtgacgagaaaagggagcaagctgaagagatgatgaagtactagatttgtgtctgagtagcaaaattccagaagtgtttggcatcatgcaggcaactactgttatgtgagcacataaaatttgtgtgtgttttttgtggaagaggtcatttttgctgttctacatccatctttctcaacaagaaaaacaagacaacatgttaaatattaacacatcaacttgtattattatttttgtatattaggtttattttttctctatttttagggcatttttattatgaccattagatcttgatctagtggatatgagatgtgtgtgttttgtgtttccaaaacacacagtttttcttaaaagaaatatgtgtgttttttcagctacaaacacacgcgtgtttttaggcataaattgtccatgtgctgtatagacagtcccaaactaaaacataataacaataattgagtggtataataaatttttaataaaattattaaaaatagaattgtaaaatttatttatttataaaaatatcaggaacaccaatgtaaaaaatgattttaaattagatatattttttaagagatatagttagacaaagtacataaaaacaatatacaatttgcttatagtggacaactcacaacaatttaaaacaaaacgactttcatttttttcttatagtaattttttcatagcagacagctcacatcggttttttagtctttagtcgtgcagtgtttagtcaagcaacctttagtcgagtagcgtttagtcaagcaacctttgtcgagtagcgtttagtcaagcaacctaaagtaaagcattcttcagtcaaatggggtgaatgattttcagtcggacgatctttagtcggataaacgattttgagtcgagt

SEQ ID NO: 84401 - DNA, 573 bp, Zea Mays
gtactttgcaagaatgggaagaagtcatttttgaagtataccgataagacaatatagcaatcatctttcgagtagcatcaaagttttcacgagcacttgatgtttcaactgcccttccatctacatttggtgcacaatcagatcatttggagttttcgagatggatgatttcgtacctcagcgtatgcacttgaacatccatccacttcaaaattcttaccttgtttatggacatatagctagacgaaatgcagctgttgtgctctagtcatcaaataagaaggcataggttgagaagatcatggagaccaagcaagtttggaggcggaggcgtaggggcaagttcatgtaataggtttgttttttgtgtggcagatcatcattggatggctaatggatagtgtcaggtttctctccaattgcagaggttatttttacgtgggtagcactgattgaatgagagaaacaacattaaaatgagggcgtggggctcatatctggtggcgaggattgttgtatcgaacctgcacaagaacacgaagaagtcattctcggagacgtgtttaaggacat

SEQ ID NO: 84402 - DNA, 838 bp, Zea Mays
agttgcttcgctcatcctgctgccgaactgctagggcaccaggattccagcaaagggattcctaccgaatctgcagctggccatagcgccccgcgcccccgtccgtgtctgcatgacttggtttaggccataggccatagcgattgctatccgtttttttgttcttggtgtggtagattcaacttgcaaaaggcctaaaccaagtcacgaacgattccgaagttctacagcacttatgtaccaagcacccttccaacttgtaaaagaatgtttctatcacttcagccgagcaggagggggctatataagcgtgtttggcgggagcttcggcaacgtccataccccgtcgatgagacgatgacggagggttgcagcggcgtcctggatctgccaccgccaccgtcctcgctcgaactcccagctcgggccgctgcaagcaggatctggttcagacgctgtcgtcgcccgtcttcaggaggtcttcttctccgaattgtgttgtcgggtcgtctctcagaaagcaccgtcgggatctacagcttgccaagcttgtgggtacggttcgaaaaagccacctccagtgacacttcgttactatttgtgagacaattcgaggcgttgaaaacttcctatcgttttgtaatggttatcacatgatactaatccatatctatgtgggaaagatggattagtaattagttggttcagtttaaaaagtttgtcggttaaatgaggttatatgttttcgtgatatgcttggctgccgggctgacatgcacctttttcgtgagttcacctgctcagcgagacaacaatgttgtctgtgattagttctaac

SEQ ID NO: 84403 - DNA, 888 bp, Zea Mays
atttcatagccaacaggcagaggggcagaggagttgcttcgctcatcctgctgccgaactgctagggcaccaggattccagcaaagggattcctaccgaatctgcagctggccatagcgccccgcgcccccgtccgtgtctgcatgacttggtttaggccataggccatagcgattgctatccgtttttttgttcttggtgtggtagattcaacttgcaaaaggcctaaaccaagtcacgaacgattccgaagttctacagcacttatgtaccaagcacccttccaacttgtaaaagaatgtttctatcacttcagccgagcaggagggggctatataagcgtgtttgattattcgagcaactgcaggcgggagcttcggcaacgtccataccccgtcgatgagacgatgacggagggttgcagcggcgtcctggatctgccaccgccaccgtcctcgctcgaactcccagctcgggccgctgcaagcaggatctggttcagacgctgtcgtcgcccgtcttcaggaggtcttcttctccgaattgtgttgtcgggtcgtctctcagaaagcaccgtcgggatctacagcttgccaagcttgtgggtacggttcgaaaaagccacctccagtgacacttcgttactatttgtgagacaattcgaggcgttgaaaacttcctatcgttttgtaatggttatcacatgatactaatccatatctatgtgggaaagatggattagtaattagttggttcagtttaaaaagtttgtcggttaaatgaggttatatgttttcgtgatatgcttggctgccgggctgacatgcacctttttcgtgagttcacctgctcagcgagacaacaatgttgtctgtgattagttctaac

SEQ ID NO: 84404 - DNA, 936 bp, Zea Mays
cgcgctgagttcttgagctggaggaattcctgccaggaatctcgacgtttccatagtaactcactgcattaggagcgggagttctacatcaggcggttggacgagcggccaattagctcggcgaccgagaggcggcgcgtgatccaatgcttggaagcggccatcgagaggcgcgcatccgagggagtgaggctggagctgcgcatcaccgaccgccgcgggctgctcgcctacgtcacgcgtgtgttcagggagaacagcctctcggtcacgcacgccgagatcaccaccagggggcgacatggccatgaacgtgttccacgtcaccgacgtggccggccgacccgcggaccccaagaccatcgacgaggtgatccagaggatcggcacggagagcctccgggtggacgaggagcggtggccgcgcctgtgctcgacggagggcgacgctggccgcggcggcggcggtgcggggatcttctcgctcgggagccttgtcaagaagaacctggtcagtcttggcctcataagatcctgctcgtgaggacgcgatcaatggggggcatgtgctccatgggatccttgtgtaaatatgggatggtgcatgggttagtttgtaaatggagtaggggtttaaatcgccgtttctagttctaggtttaagttgccacgtgtacatagtagcaagtggagatggaaggttttaaaagttgctggtcggcaacagcaaggataatggacctctctggtgggtcgtgccatgtgtctatctaacttttacgtaagaaaaagtattatacatggatcgctgaaacagagtacttgtttcgcaagaccaaaaatggatcaacaatactatacttgacccattcacctcaaaaggtcaaatctgagatcacacaacggaatagtgcacggagtatgacggttggtttg

SEQ ID NO: 84405 - DNA, 2553 bp, Zea Mays
accagtactagcagtggcgcaaaaacttttttattacaacttcccggcaggacccgtttcgttcggtccaagtctccaacccctagcagcccacccacatacaattccgtttgcccgggtcctctcctcgcccgcgaccgccgtttgactcccggacccgacccactcccaccaatcggaggcaaagatcgcgtgaaatcccgggtctcgcgcgcccatttcagccggacgctgaccaagacaaccccggcgatccccacacccgcacacacaaagacgcagaccacacaacggctcggcaagcggcagcaagcccagaccagagcgaaaacccaccgttccagcacccgattttgaaccaccgcgacactcccaagtcccaaccaaatctacgacccctccgaccgaaacgagatctccgcctcccctcacggaaaggaaagaaacgctctccccccggggcaaagggaaccgtcgccgcgtcgcggaaaactgaagcggggcacaggaggaggagaggccgaggcagggagagggttccggcggcgatggagcggtacaacccctccgaggtgtacgagctcttcgtgcgccacatgaacaacccgagggtggtggtggacaacggcgcgtgcgcgacggcgacgctggtgcaggtgcacagcgcgaggaagcacggcgtgctgctcgacgcggtggcggccctgtccgaccacggcgtctgcgtccgcaaaggctacatctcctccgacgacggccgctggttcatggacgtcttccacgtcgtcgacgccgcgggcggcaaggtggccgacgccggcgccctgctggcgcgcctcgagtcctcgctctccgccgacgcattgccgccccgcccgccgcccgccgccgcgggggccgggacgcccaccctgctcgagctcgtcggcgccgaccgcccgggcctcctctccgaggtcttcgccgtgctgcacgacctccgctgcggcaccgtcgacgccagggcctggacgcacgccggccgcgtcgccgcgctcgtgttcgtgcgcgacgaggagaccggctcgccgatcgacgacgcggcgcgggtcaggcgcgtggagtccaggctccggcacgtcctccgcggcggcgcgctcggcgcgaggatggtccgggcagacgcctccgccgtcaacatggaccggaggctccaccagcttctcaacgaggacggggaggccgggagccgcgccgaccgggcggagtcggaggcggaggcgcccacgcccacagcggtcgccgtgcaggattgggtggagagggggtactcggtggtgacagtgagctgccgcgaccggcccaagctgctcttcgacgtcgtctgcaccttgacagacttggattacgtggtgtaccacggcacgttccacacagacgacgatcacgcccgccaggagttctacatcaggcggttggacgagcggccaattagctcggcgaccgagaggcggcgcgtgatccaatgcttggaagcggccatcgagaggcgcgcatccgaggtgcgtgatcgctgagtatctcccttcctttccctacatgccacgctacgccacgccaccgcagcaaaaacacacaacgccggatgctcgctccaccttcctccctccctcccagtcccagcccaggcgcaacgtctctttcacgccctgcccaactttccacttcaccgccatgtgttcggacgaaatcccagccgcaccacctctctatctaggagtattctctaacgccagagcgatcctctgtggctgtgcgcagggagtgaggctggagctgcgcatcaccgaccgccgcgggctgctcgcctacgtcacgcgtgtgttcagggagaacagcctctcggtcacgcacgccgagatcaccaccagggggcgacatggccatgaacgtgttccacgtcaccgacgtggccggccgacccgcggaccccaagaccatcgacgaggtgatccagaggatcggcacggagagcctccgggtggacgaggagcggtggccgcgcctgtgctcgacggagggcgacgctggccgcggcggcggcggtgcggggatcttctcgctcgggagccttgtcaagaagaacctggtcagtcttggcctcataagatcctgctcgtgaggacgcgatcaatggggggcatgtgctccatgggatccttgtgtaaatatgggatggtgcatgggttagtttgtaaatggagtaggggtttaaatcgccgtttctagttctaggtttaagttgccacgtgtacatagtagcaagtggagatggaaggttttaaaagttgctggtcggcaacagcaaggataatggacctctctggtgggtcgtgccatgtgtctatctaacttttacgtaagaaaaagtattatacatggatcgctgaaacagagtacttgtttcgcaagaccaaaaatggatcaacaatactatacttgacccattcacctcaaaaggtcaaatctgagatcacacaacggaatagtgcacggagtatgacggttggtttg

SEQ ID NO: 84406 - DNA, 823 bp, Zea Mays
ccattttttatggaacgagttcatgctcatgcttgggttcatcagcaatgtttgcgatgtgcagcctttcagcaaggttattgtcaagcactgacatcggatggtataccaccagttcaaggattcttcccatgccagtaggaaggttttgtgcactcacactgtaggggtgatcccattgaacactacatcattcctcgttttctaaagggtccatgcccctaaaatgaccaagatgttgaaaccattccgcacaccgttgctcattcgatcatttgattgctgccatcgtaagaagaaattgatactgtccgtttggggtgtgagtccggaatcccaaaatatcgccatagctgatgccaaaagtgccgagtgaagacacacaccaagagtagatggttaatcgtctcatcttcctggtcacaacagtgatctggatggggaaggccatgacatgccatcctgtccgttgtctttgttggattgtgtaaaatagatgatacggtacagtagatgatactgtttaacactgtttacagagtaaagtttgaaatagatgataagataaaggatgagacaggggagctgctagagacaacctcagcaacggttgtgggccactagctataggaaaaacttacatttccttggagtccatattttcaaaatcattactgaagaagtgcgaaataagctgatttggtggagaaccggccccaggcgaggcttcaaaagcgccatttatgatttaagaacatcctgagtatctggctgtaacaccacctcttgtaccaggtcccaaatggccaacaaccgaatatat

SEQ ID NO: 84407 - DNA, 1419 bp, Zea Mays
gaagatcacctcgtcgccgtctcccaccatctcggccatgaatcccctcctcccctcctcctttccgaaatcaccccacccgccggacccaaaccctagctccccgaatcctagcccctgcagctacctcctccacgccgacaccgacgacgaggcgctgattcaaatccccggtcagaaccctaccctggtgggcgcctccgcccccttcgcgttgctgccgtctatcgacccggtcccgcacgtctcgtcgcagttctacaccttcagcgccgcctcctacgggctcatggtacgctgcatccgagcaggccgctccgcatcttccgacgaggtccgcggcgccacgtcgctctccgtgctcgcctcctggcgggcggtctggaaggatcggaacgaggacactgcctacctcaccgcgtggaagcgcatccaggacaagctcgccgcttcggccgacggccggcaccttcacttcaagtccaacaccgcgcagcgcgtctcccacgtcggcatgtggagggacatagtctcggaggcgcacgccgaccccgacctgctccggcacctcgcgttcaaggacaccgtcgaccgcatcaagcagtcttggactgtgggggccaaaatctacggttcatcagcaatgtttgcgatgtgcagcctttcagcaaggttattgtcaagcactgacatcggatggtataccaccagttcaaggattcttcccatgccagtaggaaggttttgtgcactcacactgtaggggtgatcccattgaacactacatcattcctcgttttctaaagggtccatgcccctaaaatgaccaagatgttgaaaccattccgcacaccgttgctcattcgatcatttgattgctgccatcgtaagaagaaattgatactgtccgtttggggtgtgagtccggaatcccaaaatatcgccatagctgatgccaaaagtgccgagtgaagacacacaccaagagtagatggttaatcgtctcatcttcctggtcacaacagtgatctggatggggaaggccatgacatgccatcctgtccgttgtctttgttggattgtgtaaaatagatgatacggtacagtagatgatactgtttaacactgtttacagagtaaagtttgaaatagatgataagataaaggatgagacaggggagctgctagagacaacctcagcaacggttgtgggccactagctataggaaaaacttacatttccttggagtccatattttcaaaatcattactgaagaagtgcgaaataagctgatttggtggagaaccggccccaggcgaggcttcaaaagcgccatttatgatttaagaacatcctgagtatctggctgtaacaccacctcttgtaccaggtcccaaatggccaacaaccgaatatat

SEQ ID NO: 84408 - DNA, 2621 bp, Zea Mays
caaaaatcgtgcggagaatttttttttgcccgaagatgccgaagatcacctcgtcgccgtctcccaccatctcggccatgaatcccctcctcccctcctcctttccgaaatcaccccacccgccggacccaaaccctagctccccgaatcctagcccctgcagctacctcctccacgccgacaccgacgacgaggcgctgattcaaatccccggtcagaaccctaccctggtgggcgcctccgcccccttcgcgttgctgccgtctatcgacccggtcccgcacgtctcgtcgcagttctacaccttcagcgccgcctcctacgggctcatggtacgctgcatccgagcaggccgctccgcatcttccgacgaggtccgcggcgccacgtcgctctccgtgctcgcctcctggcgggcggtctggaaggatcggaacgaggacactgcctacctcaccgcgtggaagcgcatccaggacaagctcgccgcttcggccgacggccggcaccttcacttcaagtccaacaccgcgcagcgcgtctcccacgtcggcatgtggagggacatagtctcggaggcgcacgccgaccccgacctgctccggcacctcgcgttcaaggacaccgtcgaccgcatcaagcagtcttggactgtgggggccaaaatctacggtattccagaatcatttatccgtgcatgtgtcgctgcatgccccgtttgtaaagctgcgcctgctagccaacctgatcccgctacctcatcacctaaacgtgggaagcggcgccgcaggtttgtatatactgagacattggatgtgcctgctcgagatgtgccttggaggttacaacaattggctgccaagcataaggttgtactttgtataaggcagaagtatatacggtataagcccttcatggctgaggtgaaagattatgcctgcgaccgtgctggagtgcccacatcaagtagtgggagtgctgcatcctcagccaataattccgagggtaagaaggcgcgggttctaaagcgagagccataccagtcaaagaggtgtggttgtggattccgtattcgggcaattgtgccgatagctaactataatgaaaaagacaagacttttgtgtacttggaggagggcactgcagtgttcaagctttacgctgtgcattcagggcatgaaccagggccacttgatggcaatgcacgaattgttcacaggttggttggtcataagggagctcttgagtttgatccagacatttatggtgtcagtgaggaaggtgatcctaccttttcagcgaagggggatgaagatgttgatattgacgactcacaccaggcagtcttgcggcaagtacggtatctgagatcagaagttctctcgctagaagggaaggtggctaagatgcacccagaattgttagggtcactgtccactgagttgtctgaggttttgcacaggattaggaagtttaatttggaaggcaatgtctaccaacagcagatattgatggtaggcaatgaagaagtcaggggatgggggtcaggggatgtatctcaccaattagaccagcatgatcgaccattctgcaaggatgatgagatgcttgatgatgatgatactgactttggctcaagcattggacctattgtctcatgggacaggatggcagcagagtgcgaggataggaagatgctcatgggtgatagcccaaagtgtgacaagtggatgcttaaggatgatgtgggtgattttgatgcaaagagtattcttaactgtggggatgatgatggcgtggaggattccaaggtcatcaagccgttgatgcatgacgataccatggtaactgacccaaatttgcctttcagcaaggttattgtcaagcactgacatcggatggtataccaccagttcaaggattcttcccatgccagtaggaaggttttgtgcactcacactgtaggggtgatcccattgaacactacatcattcctcgttttctaaagggtccatgcccctaaaatgaccaagatgttgaaaccattccgcacaccgttgctcattcgatcatttgattgctgccatcgtaagaagaaattgatactgtccgtttggggtgtgagtccggaatcccaaaatatcgccatagctgatgccaaaagtgccgagtgaagacacacaccaagagtagatggttaatcgtctcatcttcctggtcacaacagtgatctggatggggaaggccatgacatgccatcctgtccgttgtctttgttggattgtgtaaaatagatgatacggtacagtagatgatactgtttaacactgtttacagagtaaagtttgaaatagatgataagataaaggatgagacaggggagctgctagagacaacctcagcaacggttgtgggccactagctataggaaaaacttacatttccttggagtccatattttcaaaatcattactgaagaagtgcgaaataagctgatttggtggagaaccggccccaggcgaggcttcaaaagcgccatttatgatttaagaacatcctgagtatctggctgtaacaccacctcttgtaccaggtcccaaatggccaacaaccgaatatat

SEQ ID NO: 84409 - DNA, 3172 bp, Zea Mays
ccaaaaatcgtgcggagaatttttttttgcccgaagatgccgaagatcacctcgtcgccgtctcccaccatctcggccatgaatcccctcctcccctcctcctttccgaaatcaccccacccgccggacccaaaccctagctccccgaatcctagcccctgcagctacctcctccacgccgacaccgacgacgaggcgctgattcaaatccccggtcagaaccctaccctggtgggcgcctccgcccccttcgcgttgctgccgtctatcgacccggtcccgcacgtctcgtcgcagttctacaccttcagcgccgcctcctacgggctcatggtacgctgcatccgagcaggccgctccgcatcttccgacgaggtccgcggcgccacgtcgctctccgtgctcgcctcctggcgggcggtctggaaggatcggaacgaggacactgcctacctcaccgcgtggaagcgcatccaggacaagctcgccgcttcggccgacggccggcaccttcacttcaagtccaacaccgcgcagcgcgtctcccacgtcggcatgtggagggacatagtctcggaggcgcacgccgaccccgacctgctccggcacctcgcgttcaaggacaccgtcgaccgcatcaagcagtcttggactgtgggggccaaaatctacggtattccagaatcatttatccgtgcatgtgtcgctgcatgccccgtttgtaaagctgcgcctgctagccaacctgatcccgctacctcatcacctaaacgtgggaagcggcgccgcaggtttgtatatactgagacattggatgtgcctgctcgagatgtgccttggaggttacaacaattggctgccaagcataaggttgtactttgtataaggcagaagtatatacggtataagcccttcatggctgaggtgaaagattatgcctgcgaccgtgctggagtgcccacatcaagtagtgggagtgctgcatcctcagccaataattccgagggtaagaaggcgcgggttctaaagcgagagccataccagtcaaagaggtgtggttgtggattccgtattcgggcaattgtgccgatagctaactataatgaaaaagacaagacttttgtgtacttggaggagggcactgcagtgttcaagctttacgctgtgcattcagggcatgaaccagggccacttgatggcaatgcacgaattgttcacaggttggttggtcataagggagctcttgagtttgatccagacatttatggtgtcagtgaggaaggtgatcctaccttttcagcgaagggggatgaagatgttgatattgacgactcacaccaggcagtcttgcggcaagtacggtatctgagatcagaagttctctcgctagaagggaaggtggctaagatgcacccagaattgttagggtcactgtccactgagttgtctgaggttttgcacaggattaggaagtttaatttggaaggcaatgtctaccaacagcagatattgatggtaggcaatgaagaagtcaggggatgggggtcaggggatgtatctcaccaattagaccagcatgatcgaccattctgcaaggatgatgagatgcttgatgatgatgatactgactttggctcaagcattggacctattgtctcatgggacaggatggcagcagagtgcgaggataggaagatgctcatgggtgatagcccaaagtgtgacaagtggatgcttaaggatgatgtgggtgattttgatgcaaagagtattcttaactgtggggatgatgatggcgtggaggattccaaggtcatcaagccgttgatgcatgacgataccatggtaactgacccaaatttggtaggtattcatgtagaaggattttacactggaacaaaatggtatgattcaccaggtttagattccaatgttgatggaggggatagcagttttaggcatggtggaatcttgtgagttgtgataacctgatacctggaaggttctgtaaattctgtatactagtgtatttagcttacaccaatttgattaagtgtctgtaggtggagcttcagtcaaagtaatctgtttgccctgatatatacaggctgcactttcaagtcaacttttgttttaacttgtatatagtccctgtatgaagggcaggcttggtgaagttgtgtgagctgtctcattgagtctctaggtcgcaggttcaaagctctacccctgcatttgcgggggaaggtttgcctcgagttatcccttccccagaccctaccctactcatgtgggagcctcgagtctgcccttccccctttatagtccctgcttgcttcaatacattaaagctatggttctgttgggggcatgccttaatattttgttcatcagcaatgtttgcgatgtgcagcctttcagcaaggttattgtcaagcactgacatcggatggtataccaccagttcaaggattcttcccatgccagtaggaaggttttgtgcactcacactgtaggggtgatcccattgaacactacatcattcctcgttttctaaagggtccatgcccctaaaatgaccaagatgttgaaaccattccgcacaccgttgctcattcgatcatttgattgctgccatcgtaagaagaaattgatactgtccgtttggggtgtgagtccggaatcccaaaatatcgccatagctgatgccaaaagtgccgagtgaagacacacaccaagagtagatggttaatcgtctcatcttcctggtcacaacagtgatctggatggggaaggccatgacatgccatcctgtccgttgtctttgttggattgtgtaaaatagatgatacggtacagtagatgatactgtttaacactgtttacagagtaaagtttgaaatagatgataagataaaggatgagacaggggagctgctagagacaacctcagcaacggttgtgggccactagctataggaaaaacttacatttccttggagtccatattttcaaaatcattactgaagaagtgcgaaataagctgatttggtggagaaccggccccaggcgaggcttcaaaagcgccatttatgatttaagaacatcctgagtatctggctgtaacaccacctcttgtaccaggtcccaaatggccaacaaccgaatatat

SEQ ID NO: 84410 - DNA, 2539 bp, Zea Mays
aaattccccaaaaatcgtgcggagaatttttttttgcccgaagatgccgaagatcacctcgtcgccgtctcccaccatctcggccatgaatcccctcctcccctcctcctttccgaaatcaccccacccgccggacccaaaccctagctccccgaatcctagcccctgcagctacctcctccacgccgacaccgacgacgaggcgctgattcaaatccccggtcagaaccctaccctggtgggcgcctccgcccccttcgcgttgctgccgtctatcgacccggtcccgcacgtctcgtcgcagttctacaccttcagcgccgcctcctacgggctcatggtacgctgcatccgagcaggccgctccgcatcttccgacgaggtccgcggcgccacgtcgctctccgtgctcgcctcctggcgggcggtctggaaggatcggaacgaggacactgcctacctcaccgcgtggaagcgcatccaggacaagctcgccgcttcggccgacggccggcaccttcacttcaagtccaacaccgcgcagcgcgtctcccacgtcggcatgtggagggacatagtctcggaggcgcacgccgaccccgacctgctccggcacctcgcgttcaaggacaccgtcgaccgcatcaagcagtcttggactgtgggggccaaaatctacggtttgtatatactgagacattggatgtgcctgctcgagatgtgccttggaggttacaacaattggctgccaagcataaggttgtactttgtataaggcagaagtatatacggtataagcccttcatggctgaggtgaaagattatgcctgcgaccgtgctggagtgcccacatcaagtagtgggagtgctgcatcctcagccaataattccgagggtaagaaggcgcgggttctaaagcgagagccataccagtcaaagaggtgtggttgtggattccgtattcgggcaattgtgccgatagctaactataatgaaaaagacaagacttttgtgtacttggaggagggcactgcagtgttcaagctttacgctgtgcattcagggcatgaaccagggccacttgatggcaatgcacgaattgttcacaggttggttggtcataagggagctcttgagtttgatccagacatttatggtgtcagtgaggaaggtgatcctaccttttcagcgaagggggatgaagatgttgatattgacgactcacaccaggcagtcttgcggcaagtacggtatctgagatcagaagttctctcgctagaagggaaggtggctaagatgcacccagaattgttagggtcactgtccactgagttgtctgaggttttgcacaggattaggaagtttaatttggaaggcaatgtctaccaacagcagatattgatggtaggcaatgaagaagtcaggggatgggggtcaggggatgtatctcaccaattagaccagcatgatcgaccattctgcaaggatgatgagatgcttgatgatgatgatactgactttggctcaagcattggacctattgtctcatgggacaggatggcagcagagtgcgaggataggaagatgctcatgggtgatagcccaaagtgtgacaagtggatgcttaaggatgatgtgggtgattttgatgcaaagagtattcttaactgtggggatgatgatggcgtggaggattccaaggtcatcaagccgttgatgcatgacgataccatggtaactgacccaaatttggttcatcagcaatgtttgcgatgtgcagcctttcagcaaggttattgtcaagcactgacatcggatggtataccaccagttcaaggattcttcccatgccagtaggaaggttttgtgcactcacactgtaggggtgatcccattgaacactacatcattcctcgttttctaaagggtccatgcccctaaaatgaccaagatgttgaaaccattccgcacaccgttgctcattcgatcatttgattgctgccatcgtaagaagaaattgatactgtccgtttggggtgtgagtccggaatcccaaaatatcgccatagctgatgccaaaagtgccgagtgaagacacacaccaagagtagatggttaatcgtctcatcttcctggtcacaacagtgatctggatggggaaggccatgacatgccatcctgtccgttgtctttgttggattgtgtaaaatagatgatacggtacagtagatgatactgtttaacactgtttacagagtaaagtttgaaatagatgataagataaaggatgagacaggggagctgctagagacaacctcagcaacggttgtgggccactagctataggaaaaacttacatttccttggagtccatattttcaaaatcattactgaagaagtgcgaaataagctgatttggtggagaaccggccccaggcgaggcttcaaaagcgccatttatgatttaagaacatcctgagtatctggctgtaacaccacctcttgtaccaggtcccaaatggccaacaaccgaatatat

SEQ ID NO: 84411 - DNA, 1772 bp, Zea Mays
atcgtgcggagaatttttttttgcccgaagatgccgaagatcacctcgtcgccgtctcccaccatctcggccatgaatcccctcctcccctcctcctttccgaaatcaccccacccgccggacccaaaccctagctccccgaatcctagcccctgcagctacctcctccacgccgacaccgacgacgaggcgctgattcaaatccccggtcagaaccctaccctggtgggcgcctccgcccccttcgcgttgctgccgtctatcgacccggtcccgcacgtctcgtcgcagttctacaccttcagcgccgcctcctacgggctcatggtacgctgcatccgagcaggccgctccgcatcttccgacgaggtccgcggcgccacgtcgctctccgtgctcgcctcctggcgggcggtctggaaggatcggaacgaggacactgcctacctcaccgcgtggaagcgcatccaggacaagctcgccgcttcggccgacggccggcaccttcacttcaagtccaacaccgcgcagcgcgtctcccacgtcggcatgtggagggacatagtctcggaggcgcacgccgaccccgacctgctccggcacctcgcgttcaaggacaccgtcgaccgcatcaagcagtcttggactgtgggggccaaaatctacggtttgtatatactgagacattggatgtgcctgctcgagatgtgccttggaggttacaacaattggctgccaagcataaggttgtactttgtataaggcagaagtatatacggtataagcccttcatggctgaggtgaaagattatgcctgcgaccgtgctggagtgcccacatcaagtagtgggagtgctgcatcctcagccaataattccgagggtaagaaggcgcgggttctaaagcgagagccataccagtcaaagaggtgtggttgtggattccgtattcgggcaattgtgccgatagctaactataatgaaaaagacaagacttttgtgtacttggaggagggcactgcagtgttcaagctttacgctgtgcattcagggcatgaaccagggccacttgatggcaatgcacgaattgttcacaggttggttggtcataagggagctcttgagtttgatccagacatttatggtgtcagtgaggaaggtgatcctaccttttcagcgaagggggatgaagatgttgatattgacgactcacaccaggcagtcttgcggcaagtacggtatctgagatcagaagttctctcgctagaagggaaggtggctaagatgcacccagaattgttagggtcactgtccactgagttgtctgaggttttgcacaggattaggaagtttaatttggaaggcaatgtctaccaacagcagatattgatggtaggcaatgaagaagtcaggggatgggggtcaggggatgtatctcaccaattagaccagcatgatcgaccattctgcaaggatgatgagatgcttgatgatgatgatactgactttggctcaagcattggacctattgtctcatgggacaggatggcagcagagtgcgaggataggaagatgctcatgggtgatagcccaaagtgtgacaagtggatgcttaaggatgatgtgggtgattttgatgcaaagagtattcttaactgtggggatgatgatggcgtggaggattccaaggtcatcaagccgttgatgcatgacgataccatggtaactgacccaaatttggcttgttctggtctgtatattcagtacaatgat

SEQ ID NO: 84412 - DNA, 4590 bp, Zea Mays
ctcacgttagcagacaacccaacaggtcatatgacttttttgagtaggaaaatgattccgagctactactaccccggtacagtacagtagtgccatcacgcatgattgcatctggcgtgagagttgagttggatggtaatggtattgcacttgagcaaaaaaaatatgactcctgttttttatttcccacaaaacccaaaactagcctcaactagtactattgtagatcatggtagaagaactcgctgatcactgttcttctgtcgctttcatttctgccatctttgaggtgatgtgtaattctctgcttgcatcacgcactaacctgtttctctcagagaacagaggagaggtgcagagtgcagagagctctcttgccaacttttccccacaccccaccatttcttcctttctcctccctcctccctcctatcgctcgcccccgcttttttagcccacctaccggcagcagcgccccgtaaacaaagagcacccgcacggcacctctaccattctccccacctctccctcgttccccttcgaaccaaaacccaaacccaaacaccaccatcaccaccacctccaccactcatacagcggcagagcgagagccgagaggcgagccgcattgccaaaccgggcgagccgcagtgctgcaaccgcccaccgcgcacgcgccggggaggcgccgcccgccaccctacgcgcgagcccagcagcgggaggaggaggcgagattccaaagggaaaaaaaggcggcgggagcaaaaggggaggcgaggtgtggaggggggaaaagcggcagtgggcagctgggagggagtccagagtccagtccagtccagtccaaaccagccggaccacggccgacgcggcagggcagctgtgactggctggaaggcaagtgtgctcggcaagcgacgcacgccacgccaccgacaccggcaccggcacccccgcccgcggtgatcggacccgcgcgccagatccgacaccccggccggaatcgcggcggactccagcgcccgcggccccgccccccggatctgcattccgcgcagccgcgcaggggctcctcctggccgccgcgcgccctcgtctccccagatactctgcaagcaatggatcgacgcagctggccttggaagaagaaatcatctgacaaatcatcaaatgcggatgtgctgcagaattttaatcatgcagaacaggaagataaagctccaaaatttgtgcaaatttcacctgaaacatatgcacatcttaccgagtcagaggaaaaagtaaaaaaattagaagaaaacgtgaaggtcttgaatgaaaaactctctgcagcgcaatctgagatcacaactaaagatgctcttgtgaagcagcatgcaaaagttgctgaagaagctgtatcaggttgggagaaagctgaagcagaggcctccgcgctcaagcttcagctagaaactgttacattatctaagctagccgctgaagaaagagctgcacatctggatggtgcattgaaagaatgcatgaagcaagtaagggctgttaaggaagaaggtgagcagaagctacatgatgtagtctttgcaaaaaccaaacagtgggagaagataaaggccgagttagaagcaaaattacttgaatttgaacaggaactcataagggctggtgctgagaatgatgcactcacaagagcacttcaagaacgggcagaactgttgatgaaaattgatgaggaaaaagctcaagcagaagctgagattgaaatcttaaagagcacaatccaatcaggcgaaagggaaataaattcacttaaatacgaattgcatgttgtctccaaagagcttgaaatccgcaatgaagaaaagaacatgagtgtgcgctcagctgatgtagcaactaaacagcaccaggaagatgtcaagaaaatatcaaaacttgaagctgaatgccaaagattacgtggccttgttcgaaagaagttacctggtcctgcagcactagctcaaatgaaaatggaggtggagagcttgggtagagagtatggagaccacagagtacgacgatctcctgcaaagaattctagtttccatcggcccatgtctcctatgtctcctgttcctgattacgcaatcgagaacatacagtacatgcagagagagaatgagtttctgactgctcgtttattaacaatggaagaagaaaccaagatgcttaaagaggcattgacaaagcgaaacagtgagctgcaatcttcaagaagcatgtatgctaagacagcaggaaagctccgaagctttgaagttcatatgttgactggaaaccaacataagagtccaactatgaacatggatattcattttgatggtgcactgagccaaaatggaagcaacccacctagcatgacttccatgtctgaagatggggttgatgatgaaggaagttgtacagaatcttgggccaacactctggtgtctgagctctctcagttcaaaaaagagaaggctgccaagagcagtgcgacagaaagctccaataggttggaactcatggatgacttcttagagatggagagattagcatgtctgtcttctgatgttaatggcaatggcagcactattgacaaaatgaagatagatgaagttggggctactttgtctgactttactgaaagagatggtgttaaagatttgcagtcagcttcaccaatgacagaaagtccatctaataaacagcgtttgtctgagaaatcttcgctttcgaaattccagtcaagaatatctttattactggattctgaatcagcagagaataatgctgaggtacttgatagtatcagaaacattctaaaggatattgaagatgaggcagattcggtgaacacaaatggaactcatcattcaggcaggaccttaagtttagatagcaaatgtgccatcgatcaagaacttaagaatgccatattgaagattcaagactttgttaagttacttgatcaagaagtctccaagtttcaaggccagtcatctgattataatgggctaagtgagaaaacacaacagttctctgcattggttgacaaagttctgtcaaacgatgatgtcctaaatgatattgtcatggcactgtctgttatcttgtcagaaactagccagattaagttgacactgttgagagacaacaacaatgaagcagaaagtaataacttagattgtgttgataaagtgactctacttgaaaataaggtgcagcctgagccagtaaaagacaatggttctggtctctgcccactgttgcctcattcatcttctgatcctgagtttgaggggcctactgatgctggatttgatgttaaggctgcagtgaaggtatgctcgccggaggaatatgaacaacttaaatctgagaggacaaatttggagggagagttagcaaagtgcaacaaaataatagaagaaacaaaggttagattaagtgatatggagaaaaacctggaaaacctcacatctaagttggctgacagtgagaaatcaaatagcttgagtgagacacagttgaagtgtatggctgaatcctacaagtcacttgaatcaaggaaacttgaattagaaaatgagatagaagtgctaaggtccaaaatagatgctttaacagctgaactctctgatgaaaggcaaagtcatcaggacgacttagttaaatacagagatctcgaggagaagatggaaaggtatgagatggagaggagttcaatgcttgtggatggggacccagacaccaagtcaaagcaggataaagagataggggctgcagcagagaaactggcagagtgccaggagaccatattgattcttggccgtcagctgcaagctatgcgtcctccagccgagtcactcggctcttcacctaatcggcaaggcacggagaactttctacaggacgtggtaggaacaaccgcaggagaatattcccagaagccttcaggccaacctgatacagaccaggatatgcttgggacaggaaatgtctctccggtcaatggatacaagacacacatgatcccttctgatgcagacggaagccctttcctttctccgaacagctccaagcgcccgaagcatcgatcgagatcctcttcgtcttcgtcattcaccaaccaccagttgccagacaaacagagccgaggattcagtcggttctttgcgaagaccaaagagtgaaacttctcccgattgggtgggatggtggaggacatgaatttctgtagagcttattgaggcaagccttcgtgtgcgttctctcaggtcaggtgatgctttgggttgctggaataatactcagcttgcagtcgagcgggtcgtgggccagagtgttgcggaatgtatgttatcagtctcttctgctagagcttttctgggttgctgtgtgtttgaaacctcactgtacatgtgcttacatgcatgaaggagcatggttgttggtttgtgtttaatcttcttgtgaattagcatgtgtattttccttgtactggtttcatgtacagttaacctgcgctaatttcaagggcattgatatacgtattatattgtg

SEQ ID NO: 84413 - DNA, 1789 bp, Zea Mays
tccgattccgtcaggatgcagagacgagacagttttggtttaggggtgaatggctgcactggtaacatggggttatctgtcgctgaggctgctgctctgaggggccttcacctagtccctgtttcattcagtagtagagagaaggttgaaaaaacaatacaagttggacaaacagacattcaaatatatggtccttctaaaagagaagatgttgtttcatctattgctgatgaattcccagatgtcattgttgtggactacacaggacccaattctgtgaactgtaaacagtttaaccttgttattttctcaatacactagataaagttcttagtacatgttatgatcactttaccttacgcaatcatgatattccagtttgagaaatttgaagtcttcttgctagtttgtcctaattactaaacctgctgttataaaatcattttgctgctatattcacatcaaaatgtatattcaggagttttgttgtagatttttttgtcatgtttatgctaaggattacatttctgttcttacatggtaggataacaattataagacaaatacattttttatgcctgtcaaatttcatgtagaacatctaggaagctgtcacatttagttcaatattgctgaaagccttgaactattgatttttcttctgaaaacaaattgcagatttttttatatttttctaccttttatgtgtctccttttttttattgttttgaatactctatttgattcagcactattcttctcatttgaaacaaaaaaatgagactcttgcattttgtagctaatgctgagctctattgcaagcttggcttgccatttgtgatgggcacaactggtgggaacaagcatttgctctacaagtcagtgcaagattcaaaaaattatgcactaatatctccacagatgggcaaacaagtggttgcatttgttgctgctatgaaaatcatggctgagcagtttccaggggccttttcaggttatcatttagaggtccttcaatcaattgtctggcctgagactttaaatgctaaattttgatatgtggtcataccatctgccaatacctgcaattctgagtgtcaggattccttttcccaggttttagaatcccatcaagctggcaagctggatacatctggtacagctaaagacgtgattgcttgttttgagaaactaggtgtgtcatatgatatgaaccggatggttaagattagagatccagaacagcagcttgagatggtgggtgtccctgaagaacacatccaagggcatgcattccatctgtatcatctcacttctcctgatgacagtgtttcatttgagttccagcacaatgtttgtggccgttcaatctatgccgaaggaactattgacgcggcaatgtttctgcataggaaggtgcaatcaaaggattctaagagaatatataatatggatgatgtcctgcgagaagaaacttgccataaagcctactgattagctgctgataaataatactccctccgttcttttttatttttcgctgtttagttcaaaaataaactagcgagcgacaaatattcaaggatggaggcaatattaagcacagcgctgttgtttttaccgttttttgttagaataatgcactgcgcaccttcacccattttagacttttgtgtaattgggttgaatatgagaggttcaataggaaaaaaatgacatgcttctagtgatggcaatcataatttaatattctcgacttcttgcacagatttatactagataaaaaaac

SEQ ID NO: 84414 - DNA, 1940 bp, Zea Mays
tattgggcccgatttaggagatactcccccggttctactggagataaaccgttcgtctagcttggctcgtccctgtccggtacccttctctcaagccgcgcagttgtcgaagtcgaaactatccgctgctgtagtagagatgctctcgatgcggccacccagcaccaccttgtcgcgccccttgatttggccgagacggggtcgcctcgggggagccgccgcgccgcaatatgttagcgccgcggcaccggcgcccgctctggagccagctgcgcctccggagagcgtctcctttccgattctggtgaatggctgcactggtaacatggggttatctgtcgctgaggctgctgctctgaggggccttcacctagtccctgtttcattcagtagtagagagaaggttgaaaaaacaatacaagttggacaaacagacattcaaatatatggtccttctaaaagagaagatgttgtttcatctattgctgatgaattcccagatgtcattgttgtggactacacaggacccaattctgtgaactgtaaacagtttaaccttgttattttctcaatacactagataaagttcttagtacatgttatgatcactttaccttacgcaatcatgatattccagtttgagaaatttgaagtcttcttgctagtttgtcctaattactaaacctgctgttataaaatcattttgctgctatattcacatcaaaatgtatattcaggagttttgttgtagatttttttgtcatgtttatgctaaggattacatttctgttcttacatggtaggataacaattataagacaaatacattttttatgcctgtcaaatttcatgtagaacatctaggaagctgtcacatttagttcaatattgctgaaagccttgaactattgatttttcttctgaaaacaaattgcagatttttttatatttttctaccttttatgtgtctccttttttttattgttttgaatactctatttgattcagcactattcttctcatttgaaacaaaaaaatgagactcttgcattttgtagctaatgctgagctctattgcaagcttggcttgccatttgtgatgggcacaactggtgggaacaagcatttgctctacaagtcagtgcaagattcaaaaaattatgcactaatatctccacagatgggcaaacaagtggttgcatttgttgctgctatgaaaatcatggctgagcagtttccaggggccttttcaggttatcatttagaggttttagaatcccatcaagctggcaagctggatacatctggtacagctaaagacgtgattgcttgttttgagaaactaggtgtgtcatatgatatgaaccggatggttaagattagagatccagaacagcagcttgagatggtgggtgtccctgaagaacacatccaagggcatgcattccatctgtatcatctcacttctcctgatgacagtgtttcatttgagttccagcacaatgtttgtggccgttcaatctatgccgaaggaactattgacgcggcaatgtttctgcataggaaggtgcaatcaaaggattctaagagaatatataatatggatgatgtcctgcgagaagaaacttgccataaagcctactgattagctgctgataaataatactccctccgttcttttttatttttcgctgtttagttcaaaaataaactagcgagcgacaaatattcaaggatggaggcaatattaagcacagcgctgttgtttttaccgttttttgttagaataatgcactgcgcaccttcacccattttagacttttgtgtaattgggttgaatatgagaggttcaataggaaaaaaatgacatgcttctagtgatggcaatcataatttaatattctcgacttcttgcacagatttatactagataaaaaaac

SEQ ID NO: 84415 - DNA, 1372 bp, Zea Mays
ccggcggcgtgactccattcgttgtcgtgttggtcgccgccatcgcggattgcaccaccgattgcatctggttcgctcttgcccgctgttggccagtagaagtttccaacgggttcggcggcacattggttgaggaaccaggctcgtcttggcgcacgcttcgcgatttggcaagcacaacggagtgaagattgtcgagcgacgtcgtggtcgccgctgccgcagtaacggcgttccgggagccgttcacgccgatggaatacctgctatgctccttgatggttccggaagagaggtgagtgacgagatgcctgacggcgttgctctgcgcgaacaggtcctggcacttgtggctgtggcgcgccagcgacgcgatggcgtccgcgaccgcggcctgcacgcgcatcggcggctccttgagcgcagcggcgaagacggagcacaccccggagtggaggagcttgtccaggctgtcctcgtcgcggcagaggaggccgagcgccgtggccgcggcctcctgcccgtcgtcggtgccttccttgagcagcttgacgaggggcgcgacgccgtcctcctcgacgatgtacttggcgaagtaggagttgccccgggcgagggaggcgagggtggcggccgcgtcggcccgcgcggcgaggccgccggtgtggaggcgcgcgatgttgtcccagaccatgccgagcacgggctcgttctgcgcgatgttggggagcccccgcaggtcgccgtcgtcgtcgccgtcgtcgtcctgcggggacgagacgcggatgagccaggcgatgtcctcgagcgcggtgtcgagcagggcgagagtgcgcgggagcccggacaccgggttgagcgtgaagaagcggcggaggcgggagtggctctggaagcagcgcgcggccatgcccgcggccttgtggagcgcccgctccgtgtcggccatgacgcgcgcggcggggcgctcgtacagctccacccgcgccgcctgccgcaggagctcggcgagcttcatggcgcgggaccgtagctccgtgcagtccgccctgaggcactgccaccccgcctgctgcgctacctggtccgcgagctggatgggcttggccagcatcgccttcgacccctcacccatcctcgtcgctcggggttgcaggcgaattttgggcggagagcgtgctgggtctggtatcaccaccacgaactgaactttaaatcgggggctatagctcccgcggcgttggcacggcgccgaagggcagatgggccaagacggcggcagagaaatgcagccagtaacgaaccgccgcacgcccagcaaggccggggcgtcgggcgcgtgggttcctaagctgcttgcttggctttggtg

SEQ ID NO: 84416 - DNA, 117 bp, Zea Mays
gatctaagcatgataaacactttttttttgttaccatttccatttacacgtacaggaacgatcgacccgaattcctttggagttaagaataagcactacatcaatcagtatttttca

SEQ ID NO: 84417 - DNA, 1732 bp, Zea Mays
agctcctactccgctagcgaggatttccgtagacgatggaaaatctcaaaactcaaagaccggtgagacaagcacatcacgtaaccaaaccccacgagcgaacttctcttttcctgctcagttcagcttccaggtttcttcccgcgtcaataacccccctgctcaggtagcccaatatttcccgtcccgcactaccatctataaaaatggaggtcccgacgagcaggtaataccagctccgatcggtagctcaccggcgttgatatattttggaagtcggtgagggaactgagcccgtgccgacgttggctgagaggctgacatctgggccttagtgtcagtcggtccaggacgggcagatacaaactccccttcgcttcgtccctctcctatacaaattcaagtggccgccgtcaaagatcggtcgtcccccttccatcccgttgcggcccattaccattacaacaaaggcagcggaagccagcagagtgagccggagagcttagagctaagtcctcgtgtgaaagatggaaatggcgcgaagcccagctcatgttgctctctgctcgcttgctctgctcctcctgcttacagccgcgcgatcggcgacgttcacgctgaccaacaactgcgggtacacggtgtggccgggttcacgctggacggctccggcggcctggacttcttcgacgtcagcctcgtcgacggctacaacgtcccgatgctcatcgtcccgcagggcgcgggcggcggcggcggaggcggaggcaacggatccgccggcgccgagtcgagcaagtgtatggccacaggctgcctcgtggacctcaacggcgcgtgccccgctgacctgagggtcatggccgcgtcgtcgtccggcggcggcggcggcggggccgtggcgtgccggagcgcgtgcgaggcgttcgggacgccgcagtactgctgcagcggcgcttatgggaaccccagcacgtgccggccgtcgacgtactcgcagttcttcaagaacgcctgcccgcgcgcctacagctacgcctacgacgactccacctccaccttcacctgcgccaccggcatcggatacgccatcaccttctgcccgagcaccaccagcgggaagtactccggcgagaacccgcaggccgcctcggctaccagctcgatggtctacctcggcggcgagcagctcgccaccggcgcctccgccacggcgacccgagcgtctcagctcctcgtggccgccgccgccgccgccgcagtcgcgctcctctgagcttgccgatgtacgtcggcgtgtgaaaatggcgcgtggcaggagtcgtatatgtctttgttcagtcacgcctcttccggcatgacgggggcagcgataagattcgacaagagaaaagggggttcgccgcccgtgcccatgagaccaaaggctggcgagtcacgacagggctgctgctacggctaaccgaagaaaacaacgatatctccgcgtaccggatggcatcgtcctatactttataggtagcttaggtcatagggtttaggataactagtagcatgtgataacctttgcatgcttctagtccacgcttcctcgatttgccgttgagcctatgctcgacgtgctaaaatagattacagcaattatgattatttactttacctgttcaacattagtggaaaagaacgaaaagggtaaaatcattgttcacacaaaactacgtttcctttgact

SEQ ID NO: 84418 - DNA, 1671 bp, Zea Mays
gaaagacaaaggagttgagattcacgtctttggccacgctgtcgcggccattcccggcctccgttgtcggtgcccgaaccctccactccatccctccacggctgaggtaccattcccgtcgcagcgaattgcgccaatgagggtggctcttgtcgaggcctgatccggagacctaaccaccggggctttttgtcggcgccgtcgggttcgagcggcggcggcgatgttttggaaggatagcggcagccggagcagcagtggcagcggtcgggatcagaacggcgtcggccccttcggccaagtgcgcgtcctcattgtcggtgattcaggcggttcatctaataacatcagtgacgctgaaaggaacttctttgttgagctttgggatgtctcaggacacgaacggtacaaggcatgccggtcgattttctatacacaaataaatggcgtcatatttgtttacgatctctctcagaggaagaccaagacgaatttgaataaatgggcagttgaagttgctgaaactggcaccttttcagctccattgggatctggtggaccaggaggacttccagtgccctatctggtaattgctaataaagtggatatcgttccaagggatggggcaagagcaagcagggggaatcttgttgatcttgctcgccaatgggctgagaagcagggccttcttcggtgcagcgaagaacttccactcacagagagctttcctgggaactccggtcttgtgtcggttagatcttttattgacattctcctactctggtctcatggtacttcactttctctcatggaatgtgatgcagtgacatgtatgccttgttaccaggctgctaaacaagcaagatatgacaaagaagccgtgatcaagtttttccgcttggtttgttatcagaacagttccgttggtttattttatccactccgtatgttttcacctttaatgcgatgctactgaaatgcatttttcagcttattagaagaagatacttctcaaacgaacctcctgccccaagtccctggtcccttgctccaagagaagataccatccttcctatggagactcttggagatggcgcagatagcttccaaaggaaaagcagcccgtgtcgcccttggataactacagatatcatcgattctcctcctcgtcgcttccggacgtgagcagcagcagaacaagccgagaagatattattaatctatgatgtggtaggcatctgagagaggtcatacgccacaacattacctgcaaaacgtgggaagcatatggtgcctgggaattgtgttcctgtggcatcttgaactgcttaaagcctttgcttgcagcatttggaatgctgccagggtgagctttttgttctgttttaaatgtcatgtcgttgtcagatcactaggaagtggttctttctccttttcgtttcctttccatcctccacctgcattcatttagaatacgtgttgactgggatggaggcaatacatgatacgccagtataccttcaaaggcaaatgtaagtttttttatgtactgtttcttttacttgatctggtctaacttggcaagcttgatgaatgatgcggagaactacaccttcaaaaccacagcaaaggtaagtccctctagtcatgagggcagcgagcctttggttc

SEQ ID NO: 84419 - DNA, 1621 bp, Zea Mays
aaagtgcaatcagcttgaaacgaaagacaaaggagttgagattcacgtctttggccacgctgtcgcggccattcccggcctccgttgtcggtgcccgaaccctccactccatccctccacggctgaggtaccattcccgtcgcagcgaattgcgccaatgagggtggctcttgtcgaggcctgatccggagacctaaccaccggggctttttgtcggcgccgtcgggttcgagcggcggcggcgatgttttggaaggatagcggcagccggagcagcagtggcagcggtcgggatcagaacggcgtcggccccttcggccaagtgcgcgtcctcattgtcggtgattcaggtgttgggaaatcttcattggtgcatctcattttgaaaagttctgccattgctcgaccatctcaaacagtaggatgcactgtgggcattaaacatgttacttacggaagtgcaggcggttcatctaataacatcagtgacgctgaaaggaacttctttgttgagctttgggatgtctcaggacacgaacggtacaaggcatgccggtcgattttctatacacaaataaatggcgtcatatttgtttacgatctctctcagaggaagaccaagacgaatttgaataaatgggcagttgaagttgctgaaactggcaccttttcagctccattgggatctggtggaccaggaggacttccagtgccctatctggtaattgctaataaagtggatatcgttccaagggatggggcaagagcaagcagggggaatcttgttgatcttgctcgccaatgggctgagaagcagggccttcttcggtgcagcgaagaacttccactcacagagagctttcctgggaactccggtcttgtgtcggctgctaaacaagcaagatatgacaaagaagccgtgatcaagtttttccgcttgcttattagaagaagatacttctcaaacgaacctcctgccccaagtccctggtcccttgctccaagagaagataccatccttcctatggagactcttggagatggcgcagatagcttccaaaggaaaagcagcccgtgtcgcccttggataactacagatatcatcgattctcctcctcgtcgcttccggacgtgagcagcagcagaacaagccgagaagatattattaatctatgatgtggtaggcatctgagagaggtcatacgccacaacattacctgcaaaacgtgggaagcatatggtgcctgggaattgtgttcctgtggcatcttgaactgcttaaagcctttgcttgcagcatttggaatgctgccagggtgagctttttgttctgttttaaatgtcatgtcgttgtcagatcactaggaagtggttctttctccttttcgtttcctttccatcctccacctgcattcatttagaatacgtgttgactgggatggaggcaatacatgatacgccagtataccttcaaaggcaaatgtaagtttttttatgtactgtttcttttacttgatctggtctaacttggcaagcttgatgaatgatgcggagaactacaccttcaaaaccacagcaaaggtaagtccctctagtcatgagggcagcgagcctttggttc

SEQ ID NO: 84420 - DNA, 2678 bp, Zea Mays
ctcagaatgagtgcctgttaatctcagagtttgggcctatacggaaaacgaaagagctttgggttgacaagtacacaccccactcgttggctgagcttgctgttcataaaaagaagattgaagatgtaaagaaatggatggaagagaagctgaaggcaccaaaggcaacggttggaggatggacccttgtcctaactgggcaaactggtgttggaaaatcagtatgttcatccctcgcacttcgaacatgttgtacccaaatgatgaaagcgagtttgggctcaatttgattaaggacagctgttagtttgttcagtagacctgttcgatccctagtttgctggatgcaatttggtgtatcatgaaccacagcctggcataacaggttgacagctctaaagttttcatgttctggtagttaagacgctcctcccttcctctcccccaagtgcacttgcgtgtgtgcgcgtgcatgcatgttggatgtgcatgcacgcacacatgctgacatgcatgtgtgtgaatgacatcactcaatttctgataatacccttcttatagtatcacacagttgagttcatttctttctttgattttgttccttcaatctttcttttagggcgggggtgttttttgggtgttagttcttgttccttcagaatacttaggtgaacgtagagagaaaaaatcactatgctatccgtagtgaattacttgattaattctgttgctttggaactgtacttgctagtgatgtttaatttcatcccaggcaactgtgagagcaattgctgatgaccttggagcagacttatgtgagtggacgactccagtaccaacactgtgggctgaacatgttcatgctaattcaggattacgctatacatccaagcttgaagaatttgaaacttttgtagagaagataaggaagtattcaatgctttgtccaaccaacaccaggtcccaaaggaatctcattatcattttgattgatgacatccctgtaacaagtggaaatgttgcttttgcaagactagggaaatgcctaactggtttaattcgaagtactcaagtaccaactgtcatttcactcactcactaccacaaaagtgagagtaacgatactgcaatgtggaactctgaggaccttgagtccttacttcaagatgctggtgctcacaagattggtttcaatccagtaaccacaaattctatcaagaagatccttgttcgagtatgcaaagaagaaagctgccatgcatctgaagaattattgcatcaaatagccacctctagtggaggtgatattagacatgcaataatgtctcttcaatactattgtcttgaccccagaaggcatagttctgcattggcaacaagttctagttctactgtcccaaagaaccttgattctctggttccagggcatgagagctatggccctagcagtgcattaccttccccatgtggaagagatgagacactttcactatttcatgccttggggaaatttttgcacaacaagagggaaactaatagtgatgctgatatcgacctggattcgtgtcctcttaaagaaacctaagaagaaatgcactcaaaatggatgttccagaaaagattctttcacaagcacacggaaaagtacgaacagttgtggattttctttatgtaaatgttattgatttcattgacagtgaagctgttgatgatgcatgggctgtggtatcatatttgggtgaggcggattgtcttcttactggtggtccagtcgcatcatacaactcagaaaacatagcacagctcattgctgcctctgttgcggcacggggagttctttttggaaatgctcatgtcacaccatcaaggtggcatacaatccggagcccgaggctctggcaaactgatcaatcatctcgatccaataaggaccacattctgaaggaaagatttgattgttcaaggacgtgtggtttttgcaacttcgctgacttggtcacagaattcagaccattggagagatggattggtcctcgtaatggtgggcatagaagcagctgcttgccccacggcgtaggttgctcgcccatgggagtcgctgatggaaataattctgaagaggatgacgatatgatagaagattgttaatcgtgagtcgcattatgagatgccaacatatcattatggatgctgactagctgattcaaatagtggctcgctgtttaagggtgccattgatatttaagttttatgaagctaattgttgcacttaccagtttcatgcgtcacgtccgaagcgtgtagagtagctcggtttttctttcccatatgtcgtctaacaatcaaggagttaccagctgcgagaaaacatctaagtctaacatggcatgaagttacatagatgtagcactcatggtatcacttcgctagctgaactgaggatgattgattgaccgagttataaaaaagtgtagcatctacaatttaatatttagtatgtggctcatatgtccactttaattttaattttaaatttatttttgtagggagagtattacattggcttaccacgggatgttgtgcaattgttgtactataacatcaaatatgattcgtatgctgtcataacgcacgggcatattgtaccagtatatctctagtatattaaagcagcagtt

SEQ ID NO: 84421 - DNA, 2498 bp, Zea Mays
cgctctttctccctctcccggtcagtttccctcacggcctcaccgactgaaacccagccaaagtgccaaacccctcccaagcgcggggagcaaaacaaaccctcacaatatcgctagtcgtgcagatttccgagctctagcccttggcccttgaaattgctatccccgctatcaccattccgccaatggggaagcgaccgcaggtcgttgttctgtcctcttcctctggggaagatgacggcggggggcgccgcggccctcgggcgcggaggccgaggacgcccgcgacggctccggcgcaggctcaggcaacaggcgcctcgaggaaaaagccgcgtcgcgagagcagcgcggggagaggacgtcgccgcgccgcaaaactagcgccgtccgtctccttgaagggcctatacggaaaacgaaagagctttgggttgacaagtacacaccccactcgttggctgagcttgctgttcataaaaagaagattgaagatgtaaagaaatggatggaagagaagctgaaggcaccaaaggcaacggttggaggatggacccttgtcctaactgggcaaactggtgttggaaaatcagcaactgtgagagcaattgctgatgaccttggagcagacttatgtgagtggacgactccagtaccaacactgtgggctgaacatgttcatgctaattcaggattacgctatacatccaagcttgaagaatttgaaacttttgtagagaagataaggaagtattcaatgctttgtccaaccaacaccaggtcccaaaggaatctcattatcattttgattgatgacatccctgtaacaagtggaaatgttgcttttgcaagactagggaaatgcctaactggtttaattcgaagtactcaagtaccaactgtcatttcactcactcactaccacaaaagtgagagtaacgatactgcaatgtggaactctgaggaccttgagtccttacttcaagatgctggtgctcacaagattggtttcaatccagtaaccacaaattctatcaagaagatccttgttcgagtatgcaaagaagaaagctgccatgcatctgaagaattattgcatcaaatagccacctctagtggaggtgatattagacatgcaataatgtctcttcaatactattgtcttgaccccagaaggcatagttctgcattggcaacaagttctagttctactgtcccaaagaaccttgattctctggttccagggcatgagagctatggccctagcagtgcattaccttccccatgtggaagagatgagacactttcactatttcatgccttggggaaatttttgcacaacaagagggaaactaatagtgatgctgatatcggtatgtaatcgtgtcctcttaaagaaacctaagaagaaatgcactcaaaatggatgttccagaaaagattctttcacaagcacacggaaaagtacgaacagttgtggattttctttatgtaaatgttattgatttcattgacagtgaagctgttgatgatgcatgggctgtggtatcatatttgggtgaggcggattgtcttcttactggtggtccagtcgcatcatacaactcagaaaacatagcacagctcattgctgcctctgttgcggcacggggagttctttttggaaatgctcatgtcacaccatcaaggtggcatacaatccggagcccgaggctctggcaaactgatcaatcatctcgatccaataaggaccacattctgaaggaaagatttgattgttcaaggacgtgtggtttttgcaacttcgctgacttggtcacagaattcagaccattggagagatggattggtcctcgtaatggtgggcatagaagcagctgcttgccccacggcgtaggttgctcgcccatgggagtcgctgatggaaataattctgaagaggatgacgatatgatagaagattgttaatcgtgagtcgcattatgagatgccaacatatcattatggatgctgactagctgattcaaatagtggctcgctgtttaagggtgccattgatatttaagttttatgaagctaattgttgcacttaccagtttcatgcgtcacgtccgaagcgtgtagagtagctcggtttttctttcccatatgtcgtctaacaatcaaggagttaccagctgcgagaaaacatctaagtctaacatggcatgaagttacatagatgtagcactcatggtatcacttcgctagctgaactgaggatgattgattgaccgagttataaaaaagtgtagcatctacaatttaatatttagtatgtggctcatatgtccactttaattttaattttaaatttatttttgtagggagagtattacattggcttaccacgggatgttgtgcaattgttgtactataacatcaaatatgattcgtatgctgtcataacgcacgggcatattgtaccagtatatctctagtatattaaagcagcagtt

SEQ ID NO: 84422 - DNA, 2563 bp, Zea Mays
cgctctttctccctctcccggtcagtttccctcacggcctcaccgactgaaacccagccaaagtgccaaacccctcccaagcgcggggagcaaaacaaaccctcacaatatcgctagtcgtgcagatttccgagctctagcccttggcccttgaaattgctatccccgctatcaccattccgccaatggggaagcgaccgcaggtcgttgttctgtcctcttcctctggggaagatgacggcggggggcgccgcggccctcgggcgcggaggccgaggacgcccgcgacggctccggcgcaggctcaggcaacaggcgcctcgaggaaaaagccgcgtcgcgagagcagcgcggggagaggacgtcgccgcgccgcaaaactagcgccgtccgtctccttgaaggctgaatttgatacgctctctgaagatttttcagaatgttttaatgacttcagcattccagacagggcctatacggaaaacgaaagagctttgggttgacaagtacacaccccactcgttggctgagcttgctgttcataaaaagaagattgaagatgtaaagaaatggatggaagagaagctgaaggcaccaaaggcaacggttggaggatggacccttgtcctaactgggcaaactggtgttggaaaatcagcaactgtgagagcaattgctgatgaccttggagcagacttatgtgagtggacgactccagtaccaacactgtgggctgaacatgttcatgctaattcaggattacgctatacatccaagcttgaagaatttgaaacttttgtagagaagataaggaagtattcaatgctttgtccaaccaacaccaggtcccaaaggaatctcattatcattttgattgatgacatccctgtaacaagtggaaatgttgcttttgcaagactagggaaatgcctaactggtttaattcgaagtactcaagtaccaactgtcatttcactcactcactaccacaaaagtgagagtaacgatactgcaatgtggaactctgaggaccttgagtccttacttcaagatgctggtgctcacaagattggtttcaatccagtaaccacaaattctatcaagaagatccttgttcgagtatgcaaagaagaaagctgccatgcatctgaagaattattgcatcaaatagccacctctagtggaggtgatattagacatgcaataatgtctcttcaatactattgtcttgaccccagaaggcatagttctgcattggcaacaagttctagttctactgtcccaaagaaccttgattctctggttccagggcatgagagctatggccctagcagtgcattaccttccccatgtggaagagatgagacactttcactatttcatgccttggggaaatttttgcacaacaagagggaaactaatagtgatgctgatatcgacctggattcgtgtcctcttaaagaaacctaagaagaaatgcactcaaaatggatgttccagaaaagattctttcacaagcacacggaaaagtacgaacagttgtggattttctttatgtaaatgttattgatttcattgacagtgaagctgttgatgatgcatgggctgtggtatcatatttgggtgaggcggattgtcttcttactggtggtccagtcgcatcatacaactcagaaaacatagcacagctcattgctgcctctgttgcggcacggggagttctttttggaaatgctcatgtcacaccatcaaggtggcatacaatccggagcccgaggctctggcaaactgatcaatcatctcgatccaataaggaccacattctgaaggaaagatttgattgttcaaggacgtgtggtttttgcaacttcgctgacttggtcacagaattcagaccattggagagatggattggtcctcgtaatggtgggcatagaagcagctgcttgccccacggcgtaggttgctcgcccatgggagtcgctgatggaaataattctgaagaggatgacgatatgatagaagattgttaatcgtgagtcgcattatgagatgccaacatatcattatggatgctgactagctgattcaaatagtggctcgctgtttaagggtgccattgatatttaagttttatgaagctaattgttgcacttaccagtttcatgcgtcacgtccgaagcgtgtagagtagctcggtttttctttcccatatgtcgtctaacaatcaaggagttaccagctgcgagaaaacatctaagtctaacatggcatgaagttacatagatgtagcactcatggtatcacttcgctagctgaactgaggatgattgattgaccgagttataaaaaagtgtagcatctacaatttaatatttagtatgtggctcatatgtccactttaattttaattttaaatttatttttgtagggagagtattacattggcttaccacgggatgttgtgcaattgttgtactataacatcaaatatgattcgtatgctgtcataacgcacgggcatattgtaccagtatatctctagtatattaaagcagcagtt

SEQ ID NO: 84423 - DNA, 1580 bp, Zea Mays
attgcaacgacaaagctttgttccactctctcctactactcctgctgggtctgttatctatcttcgtcaggggcgaggatccctgatggagattttcctctctgcagtcctaggcgagctcgcctctagatccataaatctactcatcagcagaaggtcggccaggccaacggcgctggatgtgggagacagcctgcaaagcgctctcctccgagcgcaggtcatcgttgatgaggctatgggacggcacatcgcaaaccaagccatgctccagcagctagacatgctgagagacgccatgcaccgggcctgctacgtcctcgacacctccaggtgccagtcccacgacgaggaggacgccgaagatcagaaagacgccgccgcttctggaacagctgcaagagtcgcttcagaacttgagctctatgatccttgacgcgagagagctagtggtgttcttcagaagctaccctcctcgcctttactctcagccctacagcatgcatctcctgctaggaaccagagagtgcgcgaccatttctcgggaatcctgttgctgcacgatcacgattttgcggacgacggcgacgacgacatctcaacgacgttcggacagcgatgtgcaacgaagcttcaacttcgcatgccagattcaaacaaggatgggagactgctagtcgtcgtcgacttggttggtgaccttggcgaagctgcatggaatgtgctgtactccacgtgtaaacagcgcagcatggcaagcagaagcaagatcatcctcacaagccggtcagacaagatcgtcaagttcggaacaaggccagctctgcgtctcagctacgtgtccagcgaagcgttctggtatttcttcaagactatcacatttggcagcacggatcccaaggtgcacccaaggctcctgcaccttgccatggacatagccaagatgctggacaggtctctcatcggagcaaacatcaccgcttgtttgctgagggagaacttcgacgtccactactggtccaaagttcggaccttcttgagaggcctcgtccagaagcacatctccaaattcggtgttcatccagctcatcttttagagcaagacagacctctgcaggtcgggagaatggctacaactttggaagacctcgtgttcttctatgagtgccaacggtcatcgcaagaggaggttccggaaatgagattccaagatgtgatgtatggaaatgttaaggcggttgggaaattcaaggccttgggatggaggtctcaaataccgccctattacagttatgttattagttgccagattattgggcaagaaacagctagagctaccaaaaggaaacgttcagtaagaaacagaaccaacagttttgcataagctgtcactgttactggccacatcagctagggaaaacatttgtgcatgtacgtagtcttttgtagtttgtcaccatcacatgtttcgacatagtcaagataggatgtatcaggttgtgaaaactgtgctactagtgctagtgctagcttctgcgtttaatattattaacacaatactttatgattacatagctgat

SEQ ID NO: 84424 - DNA, 3102 bp, Zea Mays
aaacaacgcgtaaccgagactgacgcgctagttgcccgcacgactcggcctcctcgcccccggctttaaatagtggcgtacccccatcccatagaagagactctttcatttccttctaccgcagcctcagaattcccccctcccccgtagcgaaaccctagccgccacgccaaaaccaaatcccgccgagcccgaaaaattccggcgggttccttgccgcgaatcgattgatttcgagcgattcgattccttgtgatctctcggcggggtagagcgcggtcgaccgtcggccatgtcgaggtgcttcccctacccgccaccggggtacgtgcggaacccagtggccgtggccgagccggagtcgaccgctaaggtttgttgaaccttcggatttacacacgcacgtgccagatcgtttgttcaatatgtaggttttgcgcggatctgtggtttgcgcgtgcgtgatgtgggtattgcccgtgcctaagctaaccgagctgaggaagtgtatggatcttgtgtagctgaacgaggtcctccaaatcgattgaaaaatttaagttgtatggccggtaggccaagattgggttagtccggttttcgaaaactggtagcatggttatcggggacattgaaagaatgatagaacatcaaattcgattcaaaactgtgctagatttgcatatttagtcgccctaaaattacgtggacgtgggtgatccgaattggttgttgtatgatggttggaatatgagccatctagtgcttccgtgactggccaattttttttgtttctcaaagttttctttgaaaaactgtttgtcgagcgtcaattcgtatttacctgaatttactaattcttaatacagtatgtcgttattttgggctaagcttgtgtaagaagggtcgtttgacattttgtactgtattaatgctgttttgtgtttctttgttcggagcagcattcaatgctccttttgttgtttgagagaatctgatatttgccatcgtaccgaaagtccgaaaccaactattcaaattgggatttcatttctttttttttctactgtttttagagttctctttttcgctgctgtgctcttgtgggtcagtacgtgcatttctctctttttttcttttttttttctgatgttactcttctgttgaccaaaggagttcagaattattttggccctgtatatcaatttgcaaccaacaccatttattgagcccatttttagttttcttgttctgtagagttatgcattgtttcaggtcttaactgttgtcagggaagtaacgtgttcaacatgattgtaaacgaatacaattctgttgctaactgtgtaatgatgagaaggataattgaatagtctttgtgaagtattactgtctgaactgtacgcaaatgctacattcattctgtgttcatgtaaatatcattatacataaaaatgctgcattgcattcccgtcgtccgttctaaatcagaactgacgattgctctggtggctgaagctcctgaaagaaaaggaaaaggccgaaaagaagaaagagaaaaggagtgacaggaaagatcccaagcagtgtgagacgtccaaacactcaaagcacagccataagaagagaaagcttgaagatgtcatcaaagctgagcagggtcccaaaagagtacccaaagaatcagttgagcagttggagaagagtggactctcagaagagcatggagctccttcttttgtacatacgatacgggactctcctgagagctcacaggacagcggcaagagacgaaaggttgtcctgtccagtcctagccaacctaagaatggaaacattcttcgcttcaagattaaaagtagtcaagatccccaatcagctgttctggagaaaccaagggttcttgagcaaccattggtccaacaaatgggatcaggttcatccctgtctggcaagcaaaattcaagccatcataagatgaatgtgagatctacctctggtcagcggagggtcaatggtgactcccaagcagtacaaaaatgtttgattacagaatccccggcaaagaccatgcatagacttgtcccccagcctgcagctaaggacacacatcctgttgatccccagtcagctgttaaggtgccagttggaagatcgggcctacctctgaagttttcgggaagtgtggacccttcgcctgctagagttatgagaagatttgatcctccacctgttaagatgatgtcacagagagttcaccatccagcttccatggtgtcgcagaaagttgatcctccgttaccgaaggtattacataaggaaaccggatctgttgttcgcctaccagaagctgcccggcctactgttcttcaaaaacccaaggacttgccttctatcaagcagcaggagatcaggacctcttcctcaaaagaagagccctgcttctctggtaggaatgcagaagctgttcaagtgcaggatactaagctctcccggtcagatatgaagaaaatccgcaaagctgagaaaaaagataagaagttcagagatctgtttgttacctggaatccggtattgatagagaatgaaggttcagatcttggtgatgaagactggctgttcagcagtaaaaggaactccgatgctatcatggttcaaagcagagctactgatagttcagtgccgatccatccaatggtgcagcagaagccttctttacaacccagggcaacatttttgccggaccttaatatgtaccagctgccatatgtcgtaccattttaaacatctggcgaggtagatgagaattagatgagatgttgggagagagctgtgtggatgtgggagataatgggttccctgccgcagttttccagctttgttccatagtgtttctttgaggccaatagagttctggcagaacttataatgtaatattgattaattatttcgctcatgtatgtaagcagttgaactgcaaaatcttgtttctaggatgttactgttttatgacacgcagtatttgttatattgaccttttgcctcgtttatttcagttgcattaatttcgagataatgcgaagaggtattttgttcttatga

SEQ ID NO: 84425 - DNA, 1017 bp, Zea Mays
tcaaaacctgcatttagaacttagacgaacacattccccattccccacgacatccccaggtaaatcggagctctaggctacagctccctccccacgccggccactctcctgctcgcacatcggcaaatccgctcgatccactcccccatcgatccgtcttctgctcgatccactccgccatcgatcacgctcctgctcgcacatcggcgagtctgctggatccactccctcgtcggctcagctgctcgatctggagatcaccatgacgcctgggcgtaaaactacagcaaaatcaaccaaaccaacagaagtgccactaacagaatatgagaaattgagagctgagaatttgatgaggaataaccaaaagttgcaaagacttggtgtcactacactagcgtcaatacttaaccatacttctgcaaagagcaaggttgacactcgtgaaaaatctggatctttctatgaggtccaggaaggtgaaggttctgaagatgaggaagtcaatcagtgtgcaacaaaccggagaaacagattaaagagggtcttggcacctgcgcaacaagatgaacctacaagatttactaggcagaatacaagggatttggctttaactttcagtccagaactgcaacaagtcgaaaccttaggcctctctactatcacatccacccctcaacaggaccaaaacaactctagtgatcaaggtgcacttgaggcaaccatagatccaaatggaaaaaggaatagaagtatgggcagagaactggataggataagtagaggtttatgcactaacatccccatacacattgctgaaggaaagatacggccagaagcacctatgcaagctgccaaacttgcatcagagggcgggattatacttaggcagcaaatgtcgatcctccggcattggaaagagtacaagaaggataagtcaattgttacaaactatatcggcaaagttgctgcccaattcaccatggacaccaacaataatgcaatcaaagccgcatg

SEQ ID NO: 84426 - DNA, 1132 bp, Zea Mays
ctcgctcaccctgccctaccccgtcgctgccaccccatcgattcgtgagatctgccgctcaggtttctccctaggccatcgatgccttgtcgtacgtcgtcgactaggtttgccccttttccttgcccttcttccgcattctgatgtcctccccgccaccctgcaccacctccctcagtcgccttccccattcgcaccttgtcagggatcagatgcgtgttggagggcgtggcagagccaggcaacccaactctacgggaaatggattttttgtggaaggtgcggatgaggatgacgatgagaacccctcacatatgaggaaaccagagtacaggaagttctggtaatgtgtaccatattacctggaatatctacaagaaatgttccatggttatgttgttgacggacgttccacatgcaatactggagggagtaatgtaccagtacaagtagatgatgaaaatgaagaacacgatgatgatgctaccctcaacagcccaatgagtatcggttatcataaaagtcctagtagcacatctaacgttgtatcaagtccacttaataaaaacataaaagttccatgttcaacatgatgcaagggatgttggacaacctgaaccaaaatggtactgctcaatgggaaacattagttgaaatatctaaagaaagggcagatcaaaggaggagggaaattgtagttgatatgcaaaacaaaattgaagacataggaaggtgtttgaaactagatgtggactatggcatatcagaagtttcagatgagtattgggtggcaacatagttgtttgacaaaaaagtacaaccgatcagttttctcaagctttagaacatatgagggaaggataggttggttgcagaggtggtgcagacagttcagtggttgaaggtgtttgtgttatgaaagttaaatttgtgtaataagtctttatctgtgtgtgtgaacaaatttgaagtatgttgatttctagacttttttatggaataaataaacttgggtgtttattgtttctattgagttatttgctattcctgctgtttgcgactgagtcatcattttgttgtttggggatgcaaccaaaatgcattaataaaagggaacttgtaaattttgcta

SEQ ID NO: 84427 - DNA, 1561 bp, Zea Mays
ctcgctcaccctgccctaccccgtcgctgccaccccatcgattcgtgagatctgccgctcaggtttctccctaggccatcgatgccttgtcgtacgtcgtcgactaggtttgccccttttccttgcccttcttccgcattctgatgtcctccccgccaccctgcaccacctccctcagtcgccttccccattcgcaccttgtcagggatcaggttgtccacttcccagcctccctccccagtctacatcttcccctgcacacccattacaaacgagggagacaagtaccatggctttttctctcagggatcgattactggaaacgatgatcccactgattctgtcaacgacagactacccatctttcgatcgtcctttgctcgcacatgatcggcaacgggaaaccttgacctcgattttcagcaatcagcatgctaccttcccctaccttggcttgtactccggattacttcaacccgaagcagacatagctgaccagggacttcccctatggccctaacaagtagatctcgacatggctccttcattcctcctagactgaacgttggcggaagccggtctacgcatggtcttgcacgcccatctagtagacatgctactacaacaaatttcagagctagatgcgtgttggagggcgtggcagagccaggcaacccaactctacgggaaatggattttttgtggaaggtgcggatgaggatgacgatgagaacccctcacatatgaggaaaccagagtacaggaagttctggtaatgtgtaccatattacctggaatatctacaagaaatgttccatggttatgttgttgacggacgttccacatgcaatactggagggagtaatgtaccagtacaagtagatgatgaaaatgaagaacacgatgatgatgctaccctcaacagcccaatgagtatcggttatcataaaagtcctagtagcacatctaacgttgtatcaagtccacttaataaaaacataaaagttccatgttcaacatgatgcaagggatgttggacaacctgaaccaaaatggtactgctcaatgggaaacattagttgaaatatctaaagaaagggcagatcaaaggaggagggaaattgtagttgatatgcaaaacaaaattgaagacataggaaggtgtttgaaactagatgtggactatggcatatcagaagtttcagatgagtattgggtggcaacatagttgtttgacaaaaaagtacaaccgatcagttttctcaagctttagaacatatgagggaaggataggttggttgcagaggtggtgcagacagttcagtggttgaaggtgtttgtgttatgaaagttaaatttgtgtaataagtctttatctgtgtgtgtgaacaaatttgaagtatgttgatttctagacttttttatggaataaataaacttgggtgtttattgtttctattgagttatttgctattcctgctgtttgcgactgagtcatcattttgttgtttggggatgcaaccaaaatgcattaataaaagggaacttgtaaattttgcta

SEQ ID NO: 84428 - DNA, 1509 bp, Zea Mays
ctcgctcaccctgccctaccccgtcgctgccaccccatcgattcgtgagatctgccgctcaggtttctccctaggccatcgatgccttgtcgtacgtcgtcgactaggtttgccccttttccttgcccttcttccgcattctgatgtcctccccgccaccctgcaccacctccctcagtcgccttccccattcgcaccttgtcagggatcaggttgtccacttcccagcctccctccccagtctacatcttcccctgcacacccattacaaacgagggagacaagtaccatggctttttctctcagggatcgattactggaaacgatgatcccactgattctgtcaacgacagactacccatctttcgatcgtcctttgctcgcacatgatcggcaacgggaaaccttgacctcgattttcagcaatcagcatgctaccttcccctaccttggcttgtactccggattacttcaacccgaagcagacatagctgaccagggacttcccctatggccctaacaagtagatctcgacatggctccttcattcctcctagactgaacgttggcggaagccggtctacgcatgatgcgtgttggagggcgtggcagagccaggcaacccaactctacgggaaatggattttttgtggaaggtgcggatgaggatgacgatgagaacccctcacatatgaggaaaccagagtacaggaagttctggtaatgtgtaccatattacctggaatatctacaagaaatgttccatggttatgttgttgacggacgttccacatgcaatactggagggagtaatgtaccagtacaagtagatgatgaaaatgaagaacacgatgatgatgctaccctcaacagcccaatgagtatcggttatcataaaagtcctagtagcacatctaacgttgtatcaagtccacttaataaaaacataaaagttccatgttcaacatgatgcaagggatgttggacaacctgaaccaaaatggtactgctcaatgggaaacattagttgaaatatctaaagaaagggcagatcaaaggaggagggaaattgtagttgatatgcaaaacaaaattgaagacataggaaggtgtttgaaactagatgtggactatggcatatcagaagtttcagatgagtattgggtggcaacatagttgtttgacaaaaaagtacaaccgatcagttttctcaagctttagaacatatgagggaaggataggttggttgcagaggtggtgcagacagttcagtggttgaaggtgtttgtgttatgaaagttaaatttgtgtaataagtctttatctgtgtgtgtgaacaaatttgaagtatgttgatttctagacttttttatggaataaataaacttgggtgtttattgtttctattgagttatttgctattcctgctgtttgcgactgagtcatcattttgttgtttggggatgcaaccaaaatgcattaataaaagggaacttgtaaattttgcta

SEQ ID NO: 84429 - DNA, 1527 bp, Zea Mays
ctcgctcaccctgccctaccccgtcgctgccaccccatcgattcgtgagatctgccgctcaggtttctccctaggccatcgatgccttgtcgtacgtcgtcgactaggtttgccccttttccttgcccttcttccgcattctgatgtcctccccgccaccctgcaccacctccctcagtcgccttccccattcgcaccttgtcagggatcaggttgtccacttcccagcctccctccccagtctacatcttcccctgcacacccattacaaacgagggagacaagtaccatggctttttctctcagggatcgattactggaaacgatgatcccactgattctgtcaacgacagactacccatctttcgatcgtcctttgctcgcacatgatcggcaacgggaaaccttgacctcgattttcagcaatcagcatgctaccttcccctaccttggcttgtactccggattacttcaacccgaagcagacatagctgaccagggacttcccctatggccctaacaagtagatctcgacatggctccttcattcctcctagactgaacgttggcggaagccggtctacgcatggtcttgcacgcccatctaatgcgtgttggagggcgtggcagagccaggcaacccaactctacgggaaatggattttttgtggaaggtgcggatgaggatgacgatgagaacccctcacatatgaggaaaccagagtacaggaagttctggtaatgtgtaccatattacctggaatatctacaagaaatgttccatggttatgttgttgacggacgttccacatgcaatactggagggagtaatgtaccagtacaagtagatgatgaaaatgaagaacacgatgatgatgctaccctcaacagcccaatgagtatcggttatcataaaagtcctagtagcacatctaacgttgtatcaagtccacttaataaaaacataaaagttccatgttcaacatgatgcaagggatgttggacaacctgaaccaaaatggtactgctcaatgggaaacattagttgaaatatctaaagaaagggcagatcaaaggaggagggaaattgtagttgatatgcaaaacaaaattgaagacataggaaggtgtttgaaactagatgtggactatggcatatcagaagtttcagatgagtattgggtggcaacatagttgtttgacaaaaaagtacaaccgatcagttttctcaagctttagaacatatgagggaaggataggttggttgcagaggtggtgcagacagttcagtggttgaaggtgtttgtgttatgaaagttaaatttgtgtaataagtctttatctgtgtgtgtgaacaaatttgaagtatgttgatttctagacttttttatggaataaataaacttgggtgtttattgtttctattgagttatttgctattcctgctgtttgcgactgagtcatcattttgttgtttggggatgcaaccaaaatgcattaataaaagggaacttgtaaattttgcta

SEQ ID NO: 84430 - DNA, 2760 bp, Zea Mays
attttaaaaatatttataaaatatattatcatagcatatattcaaataatacagcattgacaggaatataagattgcacccatcatgaattcaccgtcacagaaaagaaaccggaacccaaaaggctctccgccgacacgccggctacggcgattctccaatctgaaacccttcctgccgacgattcctttccaccttccgctccatcgcgtggccgccgccgctctccacccgattggttcccgtgcctgccgccccaccgattcactccgcgcccgcgcgacccctgccgtccatgaacctctccgaggattggcgctccgtcttcccggtttgtgccgtcttcgctgcgccgtccgttgacccgctgcctgccgccgccgcctcccgcggccccctccacttctcccctctcccgccgcgcaccccgttgctctccctcccctaccccatcccattgccgcgctcctccacccgcggcctgaaccgcttcctccgctcttttgtccgaggcacctccttcctcccgcgctccgactttgactacctcgctgacacactcatcccccaaccgtcttcatcttctccgccttccaatctgctcgccgtcctccggctctcgtgctctctcattctctttttcccctacggcgagaatgcggagcatgttgcctttgttactctggatgccaccactgtcactggttccacgcctctctcgccggtcgttcagagtgatgggtttatgcacccgggccaccgcatccagcagcttgttaccactgctaatgagtcgtcatggccgtcgcagctggaagacaaccctgaggggttcctgcttgctgtgacaatgtactccctgaattggttcagggttgagtcacaggatttggggacttctgtcttagtgcctattgccaagcagcaggttgactctgtaattgtgcatgcttgttggagcaggcatttgccatccgaatgtgttgtgttgctggagagtggggagctgtgctggttcaatctggacacacgtcaaggtggaaagataaaaattgatgttggcagcaaggatgacactggggaatggctaagctgtgactatggggcacaaccatggatgataatcgtcgcgagttcaaaatccatccttttgatcgacttaagatttggggatcgtggtcaatacaaggttttggcgagagttggaatgccaggactgcttgaaactgatccttttgctgaggcagatcagtaccttgcattctgcaggggtgggcttgatcatttccatttctcagtggtgacaaagcgatacttgattctcctcgatttgagacagccattgacgcctgtgttggcgtggcagcatgagctgaaaagtcctagtaatgttgctatgtttcgactttctgaattgaggccttccaaggagcatgagtgggcatcaaattctggttttgctattttggttggttcgttcaagacaggggagttcagtgttttctgttatggacctaaagagcaaggctgtccagataactctcacctgtatgcttgggatcttccttcacggttttcgctgacaggtcatcactgcagctgcagcagcggaagaatgaaagatgtattctcaatgcctgtttcaagagatgaatatgcttcaaaatggagtaaaaactccattattggctactatgtgcttccaaaccacctctcagtttcagagacatcatttactggctttgctttggtctgcttgacagccatggggaaattagaaatgcaaagagaatattgaatggcctgccatcagacatcctgcatgtcaccttctccaaatacagtgacatgctagcatgcagcacagagaagaccttatgtgaacatttagatgttcctacctgtttgacgaacactaaacttagacctttcctgttggcaaaaccttcaagcataagttacaatctgactagcaaagtacgctctccagatgcccttgttggtccagtactacccatacctgttctgcttgcgctggaagagaaaagcaaggatgcagaaagctcttctcagggagtacccatagaaactgattccataaatgatcgatgtagagaagtttttgaagccctggatcctgtaatatccattgctgacactgacaacggcaatggatggcctgcttcacaagaactggatgaaggaaagtcctattttagttatgagcctcagattgaacataggttcagtatgggtagaagtaccagaaaggaggagaaagaagatcaaaaccaagatgatctgcataggtcttcaacgctatatgaggataaggtcttcacaacatttgtttgcggaaaagccaaagttcctgattcacctgaacaagctgcaactttgttcgatttcggcccagtgaggatagattttgataccccagccatggaaattcagcctgccgaggaaaaggtgtacaaatgtttgaggaaacaatttgtaacatggcgaaacaatttcaagccataccaagatttttgtagcacacataaaataccaaagctgaggcaatgagcccttccatccttcattcagtttcaacagggcttgtagatttacgcatatggctgcttgccttttttttttgttccgttttttttttggaagggtaagagcgaactaaaaatcaaatatacgctcttatgctatttctgatgtacatacatatggcctgctgttgaatataaatgctgttttcttcta

SEQ ID NO: 84431 - DNA, 1507 bp, Zea Mays
tcacagcctgagcgtcagatcgggctcctcccgggcgtgcacggcgacgccgccggccgagtccgccggcgcagcggcgtctggcctgaagctaccgggccagccgaagagcatctcctcgtcgtcggccacgaggaacggcatggggctcagcagcccccgcgcgggcctcctcagctcgtcggcgccggcgcgcgcgtcctcgtgctccgggagcgctgccgccgacgcgtgcgcctggatgccgatggggtacaggcaggagccgtacagcggcagcgacgccacgtcggcgtagtagccgtagccgtagccgtagtaggggcccgctgcgtcgagccgcagcgcgcgccgggccagcgtgcgctcccgccggtgcgcgttctggtgcccgcccagcgcctgcgagctgaagaacttgcgctggcagtagttgcacgtgaacacgcgggacggctcgcgggcggcgtcggcctgcgcgccgccgctgttgctgttgttaccgttgctgttgtcggtaacggagagcgagaggtcgaggctgaccgggccggaggagttggacgcctcctggctgctgatctcggtctcggacagctcgtcgcactgctcctggcacatcatctccttgtcgttcatctcgcaacagtcttttcacccgcacgtcacttggtttctctgtctcgcctacatgcaagcacttccgtgtgaatgccgctggcacgaataagatgccccgatctaaaaatctgatcacgattcttctgtgaacatgacaggttaggtaaggcagaaacacagacgcatgggttcaattcatgatgaaggtaagaaacatgctttgtgttcaacagactgctcccattttctgctcaacaatcatgagaagcatccgattcatccataggccttgatacgctagtttgaaattccgtgtccggagataaacatacgaaaagcaagccgtcttttttctggtctcagaatctctaaaaccgaaccttatctaacagtaaagtccgagaatagcatatccagtagctgtcagaaaagacggggagctctgtttgcttgcttgctccgatatataaaccacattagtttaaaaattatgctgtactttaggttaattaattcacctgctcacaatgcaccacctaaccatgcagctaaaaaaaatagcgttctccggataattccaccagttcaaagtaaaactgtaaaggttgggtaacaacgacagattactaacaggagaacggctctcgctggtaaatactctctgcatagaagaatacgaagcttatctgatgccgcgccacgaaattactggttgaaaattcgaacgagttgaagaacagttaaactctttcagacatatagacatagggccggaagacaatgtcagcaaatttaccttgttttggcttggtacattagcgaaagcatctggaccagagattaaagtaatcttatgtgaccaagcataggaaggaaggaaggagac

SEQ ID NO: 84432 - DNA, 2756 bp, Zea Mays
gcaaccacaaaccgagaatatgcggaagtcaaccgagcgcagcgcccgccaccccggcccggccccgctccgccggtcccttccccgccggccgaacaaaaaaaaaagggcaacgaaatccgaccgcgctcgccccggatccagcgacgatgttcggcgactccgacggatccaaggacgccagcgccgccgcgccagggtccaacccgccggagccgcccttccccagccgggagctcacgctcagcagctacctctgcgacaaggcgccgcccgccgcggcggggccatcctcgccgcccaaccccgaggcggcggctggcccggccgaagacgccgcggccagcgccaagctgtgcgtcgagcgggatttcctccacctcaccgcgcccaaacgcggggacccgcccggcgacgactcctccgtggtagggggtaagaagccccgcctagagtcgctccagctctcgctctccctctccaccgacgcgcccgcgccgccgccagcctcccagcagccgtcctcctccctgctgcctccgtcgcagctcgcgtcattcctcccggtcgatggcgatctgcggtgcgggagcgccgcgcccgccgccgccgccgcagtgcctgccgcgcccgcgccgcccccgaggcggacctacagcgccaacacggggcgcacccggagcatcaactccgacgacatgtcgtattcctactcggtgttctcgcacaacccgagctgctccctcacgcacaactccaccgacatctacgccgccggggagggcacgaacggctccgtccacagccggttcaacttccgccccatgggtgacggcagcgtcgccttcgccccggcgcagctcaaggagggcaccgcgtccttcttccccacggagctccctgcgagggcggcagcggcgctcagcgctggcggcagctttgacggcagccgtggagggatgcactcgtcacggcctgataggatcttgcgggagatcgtgtcggactccgtgcctgccgtggctcaggtcctgcaggatttccccagcgaaaccctggaggtgctgcgggagacagtgcggagcatggttgatgctccggagaagagggacgagctgtcaagcctgcagcggaagctggagcgtcgctcggacctgactgcggaggtattggggcgggcaaacaagacgcagctggagatcctggtggccatcaagaccggcatggccacttttgtcactggtaagggccgagtttcgggcagcgagcttgtggagatgtttctaatgacacgttgccgcaacatgaactgcaagagtgccgtccctgtggacgattgtgagtgtaagatttgctccaccaagaaggggttctgcagtgcatgtatgtgtccggtgtgccagaagtttgattgtgctgcaaatacatgcagctgggttggatgtgatgtctgctcccattggtgccatgctgcatgcgcgctagagaagaacttgataaggccagggccgacattgaagggagcgatgggcacaaccgagatgcagttccagtgcctcggctgcaatcatgcttctgagatgtttgggtttgttaaggaggtgtttaattgctgtgcggagaactggagtgctgagacgcagatgaaagagctagactttgttaggaagatatttgctgctagtgaggatttcgaggggaaggggcttcatgccaaggcagaagaggtcctcagcatgcttgtaaagaaaaccatttccccttctgatgctacgaaaaccatgctacaattctttaaatatggtgtaacagactattctgttactggcagcaagtcaaaaggaatactggcggctcagacaagcaaatctacagatatgctccatcttcagaccccaaccatcactccaccaaagtcctcgttcaacttcaagcccagcacctccattcttgattcacagatcaatgtgctcaaggccagcccaaaaccactctccatagaaccccatttcagctccagctcgaaggaggacgactcctccagcctcgagaccattgtgaagtgcaaggaagccgaggcaaaactgttccagaaactggccaatgatgcccggaaggaagtagacagctaccggcagatcgtgcgcgccaagacccataaactggaggaggagtacgccgcgaaggtcgcgaagctgtgcttccaggagacggaggagaagaggaggaagaaagtcgaagagctgaaggtgctcgagaactcgcactacgactaccacaagatgaagctgcggatgcagaccgagatccagggcttgcttgagcggatggaagccacaaagaagatgtgggtataggctccggttaacaattgcatgttgctgctgcttaatttcttcgggtatagactccagctaacaactgtctgctgctgctgctgaatacctgagatttggtgttgttcattaggagagtttgcccattgttatgtttcttaacatcttgtgttacaatctacctgcttttgtaacttgtaagtggatgcctagccttgcgcttgctgatataacttgccagcattcagttagtggtttgccagtttgtgctgctatatcattgcagatattttttataagcagattggagttgctagttgttgggtcacggcttggacgtgttgacccggtgttgtagaaaccctcgaaccttgagcgcccgttgaggaatcatatgggccagcacaaaaacaaaaaaaa

SEQ ID NO: 84433 - DNA, 3028 bp, Zea Mays
tttgataataagtttagtccattccagatcaacagcatcgacttcttctacatcaatgggcatgatcactgcctggaaacacacaagcagcaggcacagtccaattcaatacttcacaagcagagaccgttcaagagcatggagaggattcttccagccaaatgaaaacaagctcaagttcttttatgatgggcaagggtcatgtccatccagctataccaggaccaagctgaattcaccttctacgatgctgatggaaatatattgtaccagtattcccagtggagcttgagagaaacatatctacgccacagctatgtcgcataagaatgaggcagtccaaatcaccattggagagttagattggttcggctctctgtatcaaatttgaatgagacattgtggtaagtggcattagaaagttaaaaaatgcaaggatgtaatgtggtgtatgtgtatggtttaactgccaaagaaacatggagcgactacaggagttgtaatgtgtatgcgctgatgtgcaagcaggtccaaccaccgggaactatttatgcaatataggattagaccttaagaatactttctacaaattcaacaaattatgaaccatgtggccctggtgttggtatgggagcaaaagacagcgtggtaactttgtcagctgatattatttccaggaataaccaaccaatggcaagcagctcctctgccgtaacgcccggcagctgccaggcggggccaggccgtggccgggcccacgtgtcagccagatgtgcgcagctacgtctgcccatgttacggcagaggatctcctcgcccaaccactggcctgccaatgcttcaggccacagggtggttcttcctagtaaatttgggtgcctcaagcatgaaaattacacacaacaggacaattccatgatgaagcttcaaactgcatgcacaataaagcgacccctggcgataggtgttgtaccacctcgcctagaacctaggtgttttgctctaggctttttccgtgtggaggtattttggcttgatgcatgcatagaaatggggcaaaattagagagggaaaaggatgaattacgattattactcagggatgcataacaaaatcatatttttattctgatatgcaacttttcctctatgtatcatagcattattctaactgtgcgcaaaaagtataaacgcctagcaaagtctagtctctaggcagaggcgcagagcccaaccacctaaatagcgcctagtgccttttgatacactgggtgctgtaaaagattcttgatcatgccaaatgaaattatctaaatgcaattagcacaaactggttaccatggtgtcttatactcctacggaccccaaatacaagtccatgtggacttgagcacacaaatgaaggtaaaacgtacaatgacactattgcccatcaaatattgctatagtcaggtttattgcatttatgatgcatttgaggatgaaagaataaatcaaaaggtcgcatgtcattgacttatatttggtgcatttggaagaaagctctatggacttatggacttttattgggggtcagatggagtaccccatttttaagagagattattcaaatggaacagaactctttgagagctgcatttaatccaacagcgacaatctaaatcaaaaacattcatggctaaaaaggaaaggtcaaggtaaagcagcttgaaatgtgatatagattatttaattccaattcatcagatccttgttcagcttcttacatacctgcagctcagaggtatcaacaacataaatggtttcattggacaaccaatatggcaaaaatgtcaacaactgtttctttaactcttctgaatatttttcccacatagcaacagctaatgcaaaatcattccactggacaatctcctcagtattatatgatccaaatatagtttgtgcaagtgcgtgattgcatggtaatggtaattctgttccttttgaatgatgtgtaactggacagcagactgttcctgaactaacaacactttgttccctccttgctgccagctcatgttttttccagtagtagaattgcaccacctatttaagagatagatagatgtaacaaccacagacatgtgaacttaacatgacattattgtgcacctatggttagtgcttcgctgaaaaaacaaggacaaaaggtgaaaatagtactttacacctcattttaaagaataacattaagataagtgcatcctgaacgtgcaacgtgttggtaacaaatgatgaaaggacgactgatatatgatgttgacgtctttcagtcgacagcaaaaattaaggccactcaaagaatgaacatacctgaagagcatgtaagctgttagaaaatattttctcaaagacatcatctcccctcccgagccgcagttgctttccaagcaactctattgggtcatcttcagctggtgacgcagatatattgcattcaccactacttgagtgaaaactaaaccccagaatatgcactctagcacatcgtatgtcaaaaccagactgatcacaagaaaagcgatacatgttatcagaagctggtacaggaatataagaattttgctcagttggttcacagctcaatgatgtctgagacagaaagttaagaagttttggatcctcatcataagcacggtctctagtgaaccaaagagtcagggtcaacctttccccttcagttacctgtaaagcaaaacatgttgtaactgttggtaaaaatggaagggcatgcgagatccttcacaaagatcgaaaataattgataacaacaaggctgcaaagaattgatttttaccccaaaaaatgtgcaaggaaaaaacagaaatttgggatgactgttgataatgaaatgtcatattcaccattaactgtatagtacagttcatgaaagagttgatatgcatccaaatatccaacaaaaagtgaagaataaaataaaaagaaacagtgaataatgcagacaacaggacatacctcatttacac

SEQ ID NO: 84434 - DNA, 1635 bp, Zea Mays
tttgataataagtttagtccattccagatcaacagcatcgacttcttctacatcaatgggcatgatcactgcctggaaacacacaagcagcaggcacagtccaattcaatacttcacaagcagagaccgttcaagagcatggagaggattcttccagccaaatgaaaacaagctcaagttcttttatgatgggcaagggtcatgtccatccagctataccaggaccaagctgaattcaccttctacgatgctgatggaaatatattgtaccagtattcccagtggagcttgagagaaacatatctacgccacagctatgtcgcataagaatgaggcagtccaaatcaccattggagagttagattggttcggctctctgcagctcagaggtatcaacaacataaatggtttcattggacaaccaatatggcaaaaatgtcaacaactgtttctttaactcttctgaatatttttcccacatagcaacagctaatgcaaaatcattccactggacaatctcctcagtattatatgatccaaatatagtttgtgcaagtgcgtgattgcatggtaatggtaattctgttccttttgaatgatgtgtaactggacagcagactgttcctgaactaacaacactttgttccctccttgctgccagctcatgttttttccagtagtagaattgcaccacctatttaagagatagatagatgtaacaaccacagacatgtgaacttaacatgacattattgtgcacctatggttagtgcttcgctgaaaaaacaaggacaaaaggtgaaaatagtactttacacctcattttaaagaataacattaagataagtgcatcctgaacgtgcaacgtgttggtaacaaatgatgaaaggacgactgatatatgatgttgacgtctttcagtcgacagcaaaaattaaggccactcaaagaatgaacatacctgaagagcatgtaagctgttagaaaatattttctcaaagacatcatctcccctcccgagccgcagttgctttccaagcaactctattgggtcatcttcagctggtgacgcagatatattgcattcaccactacttgagtgaaaactaaaccccagaatatgcactctagcacatcgtatgtcaaaaccagactgatcacaagaaaagcgatacatgttatcagaagctggtacaggaatataagaattttgctcagttggttcacagctcaatgatgtctgagacagaaagttaagaagttttggatcctcatcataagcacggtctctagtgaaccaaagagtcagggtcaacctttccccttcagttacctgtaaagcaaaacatgttgtaactgttggtaaaaatggaagggcatgcgagatccttcacaaagatcgaaaataattgataacaacaaggctgcaaagaattgatttttaccccaaaaaatgtgcaaggaaaaaacagaaatttgggatgactgttgataatgaaatgtcatattcaccattaactgtatagtacagttcatgaaagagttgatatgcatccaaatatccaacaaaaagtgaagaataaaataaaaagaaacagtgaataatgcagacaacaggacatacctcatttacac

SEQ ID NO: 84435 - DNA, 484 bp, Zea Mays
cgctgttaggccctgcactgcatagtgtgctacctaccaaccaattccagtaataaatcagcagtaatcagcaagcgagggttcgttcgtgctcttatcagaggataaatatcaaacaacagacaaagcaagcaagcaatctagaaaggaactaagcaagcaaccaaccttgggactccctgaactcgtcggcgaacttggtgcccagatggaggccctgcattgccggaaccgatggggtcgccgccttataccatgaagccttgatgttgcggtggaacacagtgctgtcgtagtagccgctagcgtagagggccaagaagttctctgccgtgcggggcacctggttgcagaacacctcgcacttgatgtcgcccaggttcatatgcagcgttaccgactaccacacagccaccgtgaatcagggacttggcacgggatagggtatgataggatgcaggttgagcgaggggacgaatcatag

SEQ ID NO: 84436 - DNA, 2181 bp, Zea Mays
cgagggccgtccttgcttgcttcggccgtgtagttgtccaaggagtttgccgtcagcacgtcaccgatcctcggagagacaattgcgcacagaaattaagctcccttgtcgtagagaaaaagctctaaagcagtattaggtagagactttagggtatgttcggtggagacattaaaacagctttccaaacacaagggacaactaaaagactctattatacaataaaatgtttataaatatagtctattagtaaatgcagaagtaaatgtggttgtacgtcatcggatcgatataacagacgacgaattcgtacagtgataaatgagtcgtctgtttgtacttggtttacgagctgcgtctcttcacagagagatgactctacgatttttttgcaaataactttttaaacaccttaagagcctctacattaattaccattgtacatgtccttatggctagaccaaccaaaaccacaaagtaacgtagtctacactaaagactagtttgggaaaatggagttaccgaactggccctaataaagtggagttgagagaacatatgctggattctggagacatcagtcatggtttcccggcactaggcactgggagatgctatgccaaatccagaaaataaaaagagttttttctgatgcactgcacaagcctgacccaatattcaaccggattccatacaaagcagtacagaggaagctaaacacatcactaagaaaaggaacagatgtgaagaagaaaccggcaaaaactaagagatcagattttgaactgcaagatttttcggagggataactctagaccagttcctgtctcaccaaaagtgttcttcccctacctcaaaatgtaagacaagcaacttgcatcatctaatacaagtgttatcgtcccctgcaaattaaactatgcgcggactaacctttgccttatgtcatggatgaaaggtggtatttgtcgtctgcaacgctagttctaccacgcgataagagctaaaacatggattaaaggaactttcagaagttttagagaaaaaaaaggaggcaccatgttcttgagcttctttccgtgagctggtgcgctgatgcgattgatagaggggtttacagacgcagttttcatcattgagaaagcctttcttgcactgaaagaacttcaacttgttattatcattgacgaacgtaatttggaaaccttatcttgttctcatgtatacacaccaccgatcggcgcgctgttcttagccgtccaatgatttcatttcaccatttctctcgagtatgactggacccatgcgaacatggtgcagcaggtgttaggtgatccattccatgattcaatatgattgatcaaattcatttctttttgcccgctcgctaagacagtcatggagttatcaagtggaaagggcgtaacagtgcaacacaaatgagttagctgcagcttaaacaaatcccttggcgtatatatataactagtaacttactcgcgcctcgcgcgagtgttaatttaatcgttgtgtttatggtgttaaaataagagtattgctttaaacttatagtaacaataatatatatagatacatacacatagaaataacagaattacctaaatagaaaatcgtttgaagtggaacagttcggtgtacaaatgcagactcatgagcagtctagctattagattcctaaatggatatatatatacatgtactgaacatacaaaatattggttttagtggtcacaaaataattatgcactcaacttagtattcatgttataaagtagtacatgtggtgagacaacaacttaaaatgagatatgatgatgcaacaacttaaaaaattgatattacctaacatgctgagtagttgcagtaaatatacctgttatccttgaagcaacaacgatcaagaaaaatgcgatgaatcatgaggcgtaattctcaagcctttttttcctatcttcttaatataatgagtcgtagttctcctgcgttttcgagagaaaaaacttatatctatgtcagatattctagacagaataaacataaatcatgataccatagtacgatagtaatagtattataagctaagtttattctcacacttgcaggcaccgattaccatctaaaaatgttgagacatcatgaatcactatattaatatgtatg

SEQ ID NO: 84437 - DNA, 2054 bp, Zea Mays
ataggtatatgaccaaattatgaattttacagctggtctggattgaatataattcctcgagctgtgaatctgttacttttaggcgttggatctgtggtgaaggagaacaattatgtgaaacatatcgatatttcgacctgcctttctgctctcctgacaaagtgaaggagaagagcgaggcccttggggaggttctcaatggggatcggttagttgatgcgccttacaagcttgatttccgtgacgaagttgagtccaaggcagtttgctcaaagaagcttactacagaggatgtagtgaagttccggaatgcagtggctaaggactactacttccagatgtactatgatgatctcccactgtggggcttcatcggtaaagttgagaagggcggcaaggatgatccgagcgagtggaaatactatctgtacaggcacatcatcttcgacatcctatacaacaacgaccgggtgatcgaaatcaatgtgcacactgatcagagtgcattggttgacctgacagaggataaggagaccaatgtggaattcctgtactcagccaagtggaaggagacaccaacaccattcgagaagaggatggagaagtactccagctcctccaacatgccacaccacctggaggttcattggttctcaattataaactcttgtgttactgtcctcctcctcacagggttccttgcaactatcctcatgcgagtattgaagaatgattttgtcaagtatgcccatgatgaggaagcagccgatgaccaggaagagtctggatggaagtatatccatggtgatgtcttcaggttcccaaagaataagtcgctattttccgctgctcttggcacaggaactcaactatttgctctcacaacctttatattccttcttgcacttgtcggagtattctatccttacaaccgtggtgcactatttactgcattggttgtcatttatgcactcacttcaggaattgctggatacattgctacctctttctattgtcagttggaggggacaaactgggtgaggaacttgctattgacaggatgcctattctgtggacctctcttcctgacattttgcttcttgaacaccgttgctattgcttatagtgccacagcagcactgccctttggcactatctgtgtcattgtgctcatctggaccttggtcacatttcctttgcttgttttgggaggtattgctggcaaaaacagcaaaagtgaattccaagctccttgccgtaccacaaaataccccagggagattcctccacttccgtggtaccggagaactattccacagatggctatggccgggtttttgcctttcagtgccatatacatcgagctgtactacatctttgctagtgtttggggccacaggatttacacaatctacagcattctgtttattgtctttatcatcctccttatcgtcactgcattcatcacagttgcactgacatacttccagcttgctgctgaggaccatgagtggtggtggaggtcattcctatgcggaggatcaactggatttttcgtatacggctactgcctgtactactactatgcgcgatcggatatgtctggcttcatgcagacatctttcttctttggctacatggcctgcatctgctatgcattcttcttgatgcttgggatggtgggcttccgtgcctccttgttctttgtccgccacatatacaaatctatcaagtgtgagtgagctgttgttggaagatcaagagcagcagagctgtacccgtttttggtgccaccgagaagtcccaaatatagaaaaaaaatggtttgctctcgcgtgcaacaggagcagctagtgattgccatgtttcagattaggccattatttatagtaacagctaatgaacctataaatttgttccgttcatgggactgctatgataaaatcgtctttttttgtccgatgtattatctcccagtgacgtcagacggcatataactttgttggaaccgtggcatgccagcggtaattgctgaatatctctaagtcgttaca

SEQ ID NO: 84438 - DNA, 2179 bp, Zea Mays
cggaccagtactccgtcgccaccttccaccaccgaacctgagaacgccattcgaggagttcaggtctccaagccaaacccgacccagaccttcagatctcccttcccttccgttcctgttcctctctattaagcagcaagcaaagcgccactctcaatccacctcaggcctcgctcagatctctccgcccgggtccatcttcccaccccaaaccttctcccgcctctctcgtcaacgccgcccgacgagagggatggcggccttgcgggctccggccgcaacgctcctcgtcctcctcgccctagcggcggccggcggcgtggcggccgacggctccgatcaccggtacaagattcgcgagcccgtcccgctctacgccaacaaggtcggcccatttcacaatcccagtgaaacatatcgatatttcgacctgcctttctgctctcctgacaaagtgaaggagaagagcgaggcccttggggaggttctcaatggggatcggttagttgataagggcggcaaggatgatccgagcgagtggaaatactatctgtacaggcacatcatcttcgacatcctatacaacaacgaccgggtgatcgaaatcaatgtgcacactgatcagagtgcattggttgacctgacagaggataaggagaccaatgtggaattcctgtactcagccaagtggaaggagacaccaacaccattcgagaagaggatggagaagtactccagctcctccaacatgccacaccacctggaggttcattggttctcaattataaactcttgtgttactgtcctcctcctcacagggttccttgcaactatcctcatgcgagtattgaagaatgattttgtcaagtatgcccatgatgaggaagcagccgatgaccaggaagagtctggatggaagtatatccatggtgatgtcttcaggttcccaaagaataagtcgctattttccgctgctcttggcacaggaactcaactatttgctctcacaacctttatattccttcttgcacttgtcggagtattctatccttacaaccgtggtgcactatttactgcattggttgtcatttatgcactcacttcaggaattgctggatacattgctacctctttctattgtcagttggaggggacaaactgggtgaggaacttgctattgacaggatgcctattctgtggacctctcttcctgacattttgcttcttgaacaccgttgctattgcttatagtgccacagcagcactgccctttggcactatctgtgtcattgtgctcatctggaccttggtcacatttcctttgcttgttttgggaggtattgctggcaaaaacagcaaaagtgaattccaagctccttgccgtaccacaaaataccccagggagattcctccacttccgtggtaccggagaactattccacagatggctatggccgggtttttgcctttcagtgccatatacatcgagctgtactacatctttgctagtgtttggggccacaggatttacacaatctacagcattctgtttattgtctttatcatcctccttatcgtcactgcattcatcacagttgcactgacatacttccagcttgctgctgaggaccatgagtggtggtggaggtcattcctatgcggaggatcaactggatttttcgtatacggctactgcctgtactactactatgcgcgatcggatatgtctggcttcatgcagacatctttcttctttggctacatggcctgcatctgctatgcattcttcttgatgcttgggatggtgggcttccgtgcctccttgttctttgtccgccacatatacaaatctatcaagtgtgagtgagctgttgttggaagatcaagagcagcagagctgtacccgtttttggtgccaccgagaagtcccaaatatagaaaaaaaatggtttgctctcgcgtgcaacaggagcagctagtgattgccatgtttcagattaggccattatttatagtaacagctaatgaacctataaatttgttccgttcatgggactgctatgataaaatcgtctttttttgtccgatgtattatctcccagtgacgtcagacggcatataactttgttggaaccgtggcatgccagcggtaattgctgaatatctctaagtcgttaca

SEQ ID NO: 84439 - DNA, 2324 bp, Zea Mays
cggaccagtactccgtcgccaccttccaccaccgaacctgagaacgccattcgaggagttcaggtctccaagccaaacccgacccagaccttcagatctcccttcccttccgttcctgttcctctctattaagcagcaagcaaagcgccactctcaatccacctcaggcctcgctcagatctctccgcccgggtccatcttcccaccccaaaccttctcccgcctctctcgtcaacgccgcccgacgagagggatggcggccttgcgggctccggccgcaacgctcctcgtcctcctcgccctagcggcggccggcggcgtggcggccgacggctccgatcaccggtacaagattcgcgagcccgtcccgctctacgccaacaagtgaaacatatcgatatttcgacctgcctttctgctctcctgacaaagtgaaggagaagagcgaggcccttggggaggttctcaatggggatcggttagttgatgcgccttacaagcttgatttccgtgacgaagttgagtccaaggcagtttgctcaaagaagcttactacagaggatgtagtgaagttccggaatgcagtggctaaggactactacttccagatgtactatgatgatctcccactgtggggcttcatcggtaaagttgagaagggcggcaaggatgatccgagcgagtggaaatactatctgtacaggcacatcatcttcgacatcctatacaacaacgaccgggtgatcgaaatcaatgtgcacactgatcagagtgcattggttgacctgacagaggataaggagaccaatgtggaattcctgtactcagccaagtggaaggagacaccaacaccattcgagaagaggatggagaagtactccagctcctccaacatgccacaccacctggaggttcattggttctcaattataaactcttgtgttactgtcctcctcctcacagggttccttgcaactatcctcatgcgagtattgaagaatgattttgtcaagtatgcccatgatgaggaagcagccgatgaccaggaagagtctggatggaagtatatccatggtgatgtcttcaggttcccaaagaataagtcgctattttccgctgctcttggcacaggaactcaactatttgctctcacaacctttatattccttcttgcacttgtcggagtattctatccttacaaccgtggtgcactatttactgcattggttgtcatttatgcactcacttcaggaattgctggatacattgctacctctttctattgtcagttggaggggacaaactgggtgaggaacttgctattgacaggatgcctattctgtggacctctcttcctgacattttgcttcttgaacaccgttgctattgcttatagtgccacagcagcactgccctttggcactatctgtgtcattgtgctcatctggaccttggtcacatttcctttgcttgttttgggaggtattgctggcaaaaacagcaaaagtgaattccaagctccttgccgtaccacaaaataccccagggagattcctccacttccgtggtaccggagaactattccacagatggctatggccgggtttttgcctttcagtgccatatacatcgagctgtactacatctttgctagtgtttggggccacaggatttacacaatctacagcattctgtttattgtctttatcatcctccttatcgtcactgcattcatcacagttgcactgacatacttccagcttgctgctgaggaccatgagtggtggtggaggtcattcctatgcggaggatcaactggatttttcgtatacggctactgcctgtactactactatgcgcgatcggatatgtctggcttcatgcagacatctttcttctttggctacatggcctgcatctgctatgcattcttcttgatgcttgggatggtgggcttccgtgcctccttgttctttgtccgccacatatacaaatctatcaagtgtgagtgagctgttgttggaagatcaagagcagcagagctgtacccgtttttggtgccaccgagaagtcccaaatatagaaaaaaaatggtttgctctcgcgtgcaacaggagcagctagtgattgccatgtttcagattaggccattatttatagtaacagctaatgaacctataaatttgttccgttcatgggactgctatgataaaatcgtctttttttgtccgatgtattatctcccagtgacgtcagacggcatataactttgttggaaccgtggcatgccagcggtaattgctgaatatctctaagtcgttaca

SEQ ID NO: 84440 - DNA, 807 bp, Zea Mays
aatctgcaggcaacattggagaaacaattaggtaccgaaaggcagttcagttgtttgagttaacattggaccatacttcatcctctctgaatgaaatgtgggaaccaacattggtgaatcttgggcatgcacttcggaaactcaaggaataccagaaagcagtatcatattatgcaaaggcactcacttttccaaccaaaagtttgagtgcatttgctggtcttgcttacacttatcatcttatggatgattttgaggctgccataaattattaccataaggctctatggttgaaaccagacgaccagttttgcacagacatgctaacatatgctcttgagtccatctgccaaatcactgctcgtagaaagcctggtcgaggtttgctaaccgcaacaggtggtgtcacatgctagggtattattttccttacagacatagtagtagctaattatatgtaaatttgttggtgtacaatatgtaattgctcaagttcatttcagtcactcgaggctgatcgtagtgtaaagccagacattttctgtaccttttaatttatactagaaataggcagcgtccgaggacgctttgtaccagccacctacactatggaaaaactggggagagaccggagttgcaagatcaggttgttcagaggtatttttgcaaatcctaatagaaatgcatttacagaaatagagcatcgtgtcagacaagaaataggttagtgatgctcaggaaattgaagttttcctcttcctgaatattcattctcctgtgtgttagagttcaaaaaaaaaaatacaa

SEQ ID NO: 84441 - DNA, 1564 bp, Zea Mays
ctacaagcttgatcggattgattaatctgattggcaagtgtatctgttgaggaagttgagttattgtcctctctgcaattcggtgaagaagatgggtggctatcagcattctattcatgtttggtcacgaagcatgaaaaagaatatttagttgaagcaaaattcaaggaacttgagcaagaagcttgtagtatttcgtcctcgagttctggtgaaacaatgaaaaataacattgatgttttggtttgcaaagctgaatactaccaccagagtggagagtaccaaaaatgttttaaactcacatcctcgttacttgagagagaccctttccatttaaagtgcacattagttcatttggcaactgcaatggagcttggtcattgcaatgatctttatcttttggcatgcaacttagtgaaggattatcctcaaaaagctctttcatggtttgctgttggttgctattactactgtatcaagaagtatgatcaagcgcgaagatacttcggcaaagctacaggtttagatggggcatttcctcctgcttggattggtacaggcattgcctatgctgctcaagaggagggtgaccaagcaatggctgcgtttcggacggcagctcggttatttcctggatgccatctgccaactttatacatgggcatgcagtatgtgcgaatgcacaatttcaaacttgcagagcagttcttcacacaagcaaaatccatctgcccatctgatccacttattcacaatgagttgggggtcgttgcatataatatgaaggagtaccgaaaggcagttcagttgtttgagttaacattggaccatacttcatcctctctgaatgaaatgtgggaaccaacattggtgaatcttgggcatgcacttcggaaactcaaggaataccagaaagcagtatcatattatgcaaaggcactcacttttccaaccaaaagtttgagtgcatttgctggtcttgcttacacttatcatcttatggatgattttgaggctgccataaattattaccataaggctctatggttgaaaccagacgaccagttttgcacagacatgctaacatatgctcttgagtccatctgccaaatcactgctcgtagaaagcctggtcgaggtttgctaaccgcaacaggtggtgtcacatgctagggtattattttccttacagacatagtagtagctaattatatgtaaatttgttggtgtacaatatgtaattgctcaagttcatttcagtcactcgaggctgatcgtagtgtaaagccagacattttctgtaccttttaatttatactagaaataggcagcgtccgaggacgctttgtaccagccacctacactatggaaaaactggggagagaccggagttgcaagatcaggttgttcagaggtatttttgcaaatcctaatagaaatgcatttacagaaatagagcatcgtgtcagacaagaaataggttagtgatgctcaggaaattgaagttttcctcttcctgaatattcattctcctgtgtgttagagttcaaaaaaaaaaatacaa

SEQ ID NO: 84442 - DNA, 2076 bp, Zea Mays
tggctcttcaaccaaacactaccttagagaaccattggagttgctcttaccagacatgcactgctgcttcttttgccttcgaaaccatcccgaaccctaaattcgaatgcggaactcaaatttcggtttccctcgcgtcctgcccacatcgtccgcatccgccgagcctagccccaagcggaggagaataggagaggccaccgatccgccgccggagatgagggaggaggcactggagcggctgcgcggggtggtgcgggacagcgccggaggagttgaaagagtggcatcagtgtttgttgatgcttggggatgcaaaagtggatgagcatggaaatgtccttgatcatgatgttggcagtgatatatattttgacaaggacgctgaagatcatgagatcaatatcaaatcagctctatgtttcttacgtggcaaggcgtatgaagcactggataaccgtgatcttgctcgccaatggtacaaggcagctgttaaagccgatcctctgtgttatgaggctattgaatgtcttgttgataattatatgttgacatgtgaggaagaagttgagttattgtcctctctgcaattcggtgaagaagatgggtggctatcagcattctattcatgtttggtcacgaagcatgaaaaagaatatttagttgaagcaaaattcaaggaacttgagcaagaagcttgtagtatttcgtcctcgagttctggtgaaacaatgaaaaataacattgatgttttggtttgcaaagctgaatactaccaccagagtggagagtaccaaaaatgttttaaactcacatcctcgttacttgagagagaccctttccatttaaagtgcacattagttcatttggcaactgcaatggagcttggtcattgcaatgatctttatcttttggcatgcaacttagtgaaggattatcctcaaaaagctctttcatggtttgctgttggttgctattactactgtatcaagaagtatgatcaagcgcgaagatacttcggcaaagctacaggtttagatggggcatttcctcctgcttggattggtacaggcattgcctatgctgctcaagaggagggtgaccaagcaatggctgcgtttcggacggcagctcggttatttcctggatgccatctgccaactttatacatgggcatgcagtatgtgcgaatgcacaatttcaaacttgcagagcagttcttcacacaagcaaaatccatctgcccatctgatccacttattcacaatgagttgggggtcgttgcatataatatgaaggagtaccgaaaggcagttcagttgtttgagttaacattggaccatacttcatcctctctgaatgaaatgtgggaaccaacattggtgaatcttgggcatgcacttcggaaactcaaggaataccagaaagcagtatcatattatgcaaaggcactcacttttccaaccaaaagtttgagtgcatttgctggtcttgcttacacttatcatcttatggatgattttgaggctgccataaattattaccataaggctctatggttgaaaccagacgaccagttttgcacagacatgctaacatatgctcttgagtccatctgccaaatcactgctcgtagaaagcctggtcgaggtttgctaaccgcaacaggtggtgtcacatgctagggtattattttccttacagacatagtagtagctaattatatgtaaatttgttggtgtacaatatgtaattgctcaagttcatttcagtcactcgaggctgatcgtagtgtaaagccagacattttctgtaccttttaatttatactagaaataggcagcgtccgaggacgctttgtaccagccacctacactatggaaaaactggggagagaccggagttgcaagatcaggttgttcagaggtatttttgcaaatcctaatagaaatgcatttacagaaatagagcatcgtgtcagacaagaaataggttagtgatgctcaggaaattgaagttttcctcttcctgaatattcattctcctgtgtgttagagttcaaaaaaaaaaatacaa

SEQ ID NO: 84443 - DNA, 1962 bp, Zea Mays
tggctcttcaaccaaacactaccttagagaaccattggagttgctcttaccagacatgcactgctgcttcttttgccttcgaaaccatcccgaaccctaaattcgaatgcggaactcaaatttcggtttccctcgcgtcctgcccacatcgtccgcatccgccgagcctagccccaagcggaggagaataggagaggccaccgatccgccgccggagatgagggaggaggcactggagcggctgcgcggggtggtgcgggacagcgccggaggagttgaaagagtggcatcagtgtttgttgatgcttggggatgcaaaagtggatgagcatggaaatgtccttgatcatgatgttggcagtgatatatattttgacaaggacgctgaagatcatgagatcaatatcaaatcagctctatgtttcttacgtggcaaggcgtatgaagcactggataaccgtgatcttgctcgccaatggtacaaggcagctgttaaagccgatcctctgtgttatgaggctattgaatgtcttgttgataattatatgttgacatgtgaggaagaagttgagttattgtcctctctgcaattcggtgaagaagatgggtggctatcagcattctattcatgtttggtcacgaagcatgaaaaagaatatttagttgaagcaaaattcaaggaacttgagcaagaagcttgtagtatttcgtcctcgagttctggtgaaacaatgaaaaataacattgatgttttggtttgcaaagctgaatactaccaccagagtggagagtaccaaaaatgttttaaactcacatcctcgttacttgagagagaccctttccatttaaagtgcacattagttcatttggcaactgcaatggagcttggtcattgcaatgatctttatcttttggcatgcaacttagtgaaggattatcctcaaaaagctctttcatggtttgctgttggttgctattactactgtatcaagaagtatgatcaagcgcgaagatacttcggcaaagctacaggtttagatggggcatttcctcctgcttggattggtacaggcattgcctatgctgctcaagaggagggtgaccaagcaatggctgcgtttcggacggcagctcggttatttcctggatgccatctgccaactttatacatgggcatgcagtatgtgcgaatgcacaatttcaaacttgcagagcagttcttcacacaagcaaaatccatctgcccatctgatccacttattcacaatgagttgggggtcgttgcatataatatgaaggaggaataccagaaagcagtatcatattatgcaaaggcactcacttttccaaccaaaagtttgagtgcatttgctggtcttgcttacacttatcatcttatggatgattttgaggctgccataaattattaccataaggctctatggttgaaaccagacgaccagttttgcacagacatgctaacatatgctcttgagtccatctgccaaatcactgctcgtagaaagcctggtcgaggtttgctaaccgcaacaggtggtgtcacatgctagggtattattttccttacagacatagtagtagctaattatatgtaaatttgttggtgtacaatatgtaattgctcaagttcatttcagtcactcgaggctgatcgtagtgtaaagccagacattttctgtaccttttaatttatactagaaataggcagcgtccgaggacgctttgtaccagccacctacactatggaaaaactggggagagaccggagttgcaagatcaggttgttcagaggtatttttgcaaatcctaatagaaatgcatttacagaaatagagcatcgtgtcagacaagaaataggttagtgatgctcaggaaattgaagttttcctcttcctgaatattcattctcctgtgtgttagagttcaaaaaaaaaaatacaa

SEQ ID NO: 84444 - DNA, 1346 bp, Zea Mays
tggctcttcaaccaaacactaccttagagaaccattggagttgctcttaccagacatgcactgctgcttcttttgccttcgaaaccatcccgaaccctaaattcgaatgcggaactcaaatttcggtttccctcgcgtcctgcccacatcgtccgcatccgccgagcctagccccaagcggaggagaataggagaggccaccgatccgccgccggagatgagggaggaggcactggagcggctgcgcggggtggtgcgggacagcgccggaggagttgaaagagtggcatcagtgtttgttgatgcttggggatgcaaaagtggatgagcatggaaatgtccttgatcatgatgttggcagtgatatatattttgacaaggacgctgaagatcatgagatcaatatcaaatcagctctatgtttcttacgtggcaaggcgtatgaagcactggataaccgtgatcttgctcgccaatggtacaaggcagctgttaaagccgatcctctgtgttatgaggctattgaatgtcttgttgataattatatgttgacatgtgaggaagaagttgagttattgtcctctctgcaattcggtgaagaagatgggtggctatcagcattctattcatgtttggtcacgaagcatgaaaaagaatatttagttgaagcaaaattcaaggaacttgagcaagaagcttgtagtatttcgtcctcgagttctggtgaaacaatgaaaaataacattgatgttttggtttgcaaagctgaatactaccaccagagtggagagtaccaaaaatgttttaaactcacatcctcgttacttgagagagaccctttccatttaaagtgcacattagttcatttggcaactgcaatggagcttggtcattgcaatgatctttatcttttggcatgcaacttagtgaaggattatcctcaaaaagctctttcatggtttgctgttggttgctattactactgtatcaagaagtatgatcaagcgcgaagatacttcggcaaagctacaggtttagatggggcatttcctcctgcttggattggtacaggcattgcctatgctgctcaagaggagggtgaccaagcaatggctgcgtttcggacggcagctcggttatttcctggatgccatctgccaactttatacatgggcatgcagtatgtgcgaatgcacaatttcaaacttgcagagcagttcttcacacaagcaaaatccatctgcccatctgatccacttattcacaatgagttgggggtcgttgcatataatatgaaggaggttcgcgctccgaggacgcaacctcatccccgtcgcgaaggaacc

SEQ ID NO: 84445 - DNA, 2429 bp, Zea Mays
tcaaaaaaaaaaggttagaaaaaaaatgaaccaaacagtacaaagcctgaccgtgccgcaatcagtactcgttgggtagtctttgggtactctcaatgtctcatacactttgacggaccacagcagccatgctggcatgccgtcgcgagccgctatccgcatgaagcccccttccttctcggtgtccttaaccacggcgtcccagctccacgacgccatcgaccgcctcctatcgctcctacgcgccgacgcctcccacgcccccgccgctcgcgcgattgccgcggccgtcgcctcgctccggccgccctccactctcctgtccaaccgcatcctccatctcctctcctcccacccggccactctcccggacgcgctcgccctcctctcttctctcccaagcaccgatgtatgctcctacaacaccctcgtcgcagcgctcggccgatccccacgcggcctcgcctccgcgcgcgcgctgttcgaccgaatgcctcggagggaccacttctcttggtccgccatcgtctccgcccacgtgcgccacggccagcctcgcgccgcgctcgcgatctaccgccggatgctgcgggagccggggggctccggcgcggacaacgagttcaccgcgtccagcgcgctcgccgcggccacggccgcccggtgcgcgcgcgcggggagggagctgcactgccacgtggtcaggcgagggatcgacgcggatgccgtcgtctggagcgctctcgcagacatgtacgccaagttcgggcgcctggacgacgcgaggagcgtgttcgataggatgcctgttcgggacgtcgtgtcttggacggccatgctggacaggtattttgatgccgggcgcgatggcgaaggcttcaggctgtttgtgcgcatgatgaggagtggcattctacccaatgagttcacatacgccggggtactgcgtgcttgcgcagaattcacctccgagaagctcgggaagcaggtgcatggtcgaatggcaaagagcaggacaggggactcatgctttgcagggagtgcgcttgtgcacatgtactccaagtacggggacatgggaactgcaatgcgtgtctttagggggatgccaaagccggacttggtgtcgtggacggccatgatctctggctatgcgcagaatgggcagccagatgaggcattgcattgcttcgacatgttattgagctctggattcaggcctgatcatgtcaccttcgttggcgttctatctgcatgtgctcatgctggcctggtcgataaaggtctgggcatcttccattcgataaaggacaaatatggtattgagcacactgctgatcattatgcttgtgtaattgatctcctcagccggtcaggcctgtttgagcgagcagaagatatgatcaacacaatgcctgtaaagcctaacaagttcctatgggcgtccttgcttggtggctgccgtattcataagaatgtgcggcttgcatggtgggcagcagaagcactgtttgaaattgaacctgaaaatccagcaacatatgttactctagccaatatttatgcatccgttggtttgtttgatgaagttgagaatatgagacggaccatggaattaaggggcataactaaaatgccagcctcaagttggattgaagttgggacaagagtgcatgtgtttctggttggggataagtcgcatcctcaagctgaagaaatatatgcgcttctgaagaagctgtatgtgaaaatgagggaagaagggtatgtggcagacaccggatttgttctccatgatgtagaagacgagcagaagcagcaggacattggttatcacagcgagcggcttgctgttgcatttggaatcattgccactccgaagggttctcctatcaaggttttcaagaatctgcgcatttgtggggactgtcataccactattaagttaatatcaaagattgtgcaaagagagatcattgtcagggactctaataggttccatcacttcaagaacgggagttgttcttgcagggattattggtgatctgtgctgaatatacaagaaaattgttttgactttttaagactggaaatgactaaggtcaatgtacggaagtactgatattgtggcattatctgggaatttaacttttttgctgcacctatgcaaattgcaacaaaatggcacttgaacctttccttctgcaatttctgcaagtgtttcttttgtcaaatgctaaagaaaggcgacagactcgcaacctgacgaatatctgttacgcaaatcgacattgatagaaagcctgctttgcaatgtttttacttggatccatccacgtatggtatggtgtattactacgaaagaatgtaggtactgtatctggacggagccatttgtccattcacattcagattcaggtaggtaatgg

SEQ ID NO: 84446 - DNA, 852 bp, Zea Mays
cagggttctttggagcagatttctaagccggaatgctggattcactattttggacacgaatccccaactatactttcatctccagcaacagaaactaatagagttgattcgcgtgggaaaaataaatgaagctttggagttcgctcaagaagaacttgcaccgagaggcgaagaaaatcaaacatttctcgaggaaatagaaaaaactgtagcactactggtttttgaagatgtaaaaaattgcccttatggggaactattggatgtttctcaacgtttgaagactgcaagtgaagttaatgctgctattcttacaagccaaagccatgagaaagatccgaagcttccaagcttgttaaagatgttgaaatggacccaaaatcaactggacgaaaaggcggcttatcctcgaatcaacgatttcaccactgccgcgctggaagatccatcgatatgaatctgctgtgaaggaactgagggtatgcaccaagcctgcctggtgcctacacgtggttgccccggatctgtcaatagatcatcgtctgcagcgattgagttcaccccttgcactagtgtttaagatcaatgcaagcaattgatccgaaaacatcacctgtgttctacctgtacatgatgtagaagacatgtttgaaacctttttaagttagtgaaatgttggatttttttcatggacatatattcgtttcaaacctgtggtacttgcaacacgcaaattgtttcagtcatgctttgggccttgaattcacggtcctactgtcagtttgatgcaactgtgcaaagaagctcattttttttcaatgtcagaaccaattagcggctacagatttttag

SEQ ID NO: 84447 - DNA, 832 bp, Zea Mays
cctcgtcatgaacttcctcgtcaccgagggcttcgtcgacgccgccgacaacggagattgacctagcgaccatcactgatcgaatggaggttaagagagcagtacagtcgggtaatgttcaggaggcgatcgagaaaatcaacgaccttaaccccacgcaaacatttctcgaggaaatagaaaaaactgtagcactactggtttttgaagatgtaaaaaattgcccttatggggaactattggatgtttctcaacgtttgaagactgcaagtgaagttaatgctgctattcttacaagccaaagccatgagaaagatccgaagcttccaagcttgttaaagatgttgaaatggacccaaaatcaactggacgaaaaggcggcttatcctcgaatcaacgatttcaccactgccgcgctggaagatccatcgatatgaatctgctgtgaaggaactgagggtatgcaccaagcctgcctggtgcctacacgtggttgccccggatctgtcaatagatcatcgtctgcagcgattgagttcaccccttgcactagtgtttaagatcaatgcaagcaattgatccgaaaacatcacctgtgttctacctgtacatgatgtagaagacatgtttgaaacctttttaagttagtgaaatgttggatttttttcatggacatatattcgtttcaaacctgtggtacttgcaacacgcaaattgtttcagtcatgctttgggccttgaattcacggtcctactgtcagtttgatgcaactgtgcaaagaagctcattttttttcaatgtcagaaccaattagcggctacagatttttag

SEQ ID NO: 84448 - DNA, 1219 bp, Zea Mays
ttgcaagtaacaactactcttctccggactctcggggtttcccgacgtccaccacccatcctcgcttctctcgagtcctcaatccatcctccggctgttccctcccagcgacgaaaccctagcccgtcacctcgacgcctagcccgccaccttgccgcccgtcgctgcaggtttatggcgcctgtgtgatcggatcagcagtccgctccgtctccctcggcccacgcatctgatgttcctctcccgcatcgtactccgcgacctggattccatcgactctccggcctccatggcgtcctcgaagaaggttgtgacccgtgacgagtgggagctgaagctccgcgacgtcaagatccgcaaggaggacatgaaccgcctcgtcatgaacttcctcgtcaccgagggcttcgtcgacgccgccgacaagtttcgcatcgacggagattgacctagcgaccatcactgatcgaatggaggttaagagagcagtacagtcgggtaatgttcaggaggcgatcgagaaaatcaacgaccttaaccccacgcaaacatttctcgaggaaatagaaaaaactgtagcactactggtttttgaagatgtaaaaaattgcccttatggggaactattggatgtttctcaacgtttgaagactgcaagtgaagttaatgctgctattcttacaagccaaagccatgagaaagatccgaagcttccaagcttgttaaagatgttgaaatggacccaaaatcaactggacgaaaaggcggcttatcctcgaatcaacgatttcaccactgccgcgctggaagatccatcgatatgaatctgctgtgaaggaactgagggtatgcaccaagcctgcctggtgcctacacgtggttgccccggatctgtcaatagatcatcgtctgcagcgattgagttcaccccttgcactagtgtttaagatcaatgcaagcaattgatccgaaaacatcacctgtgttctacctgtacatgatgtagaagacatgtttgaaacctttttaagttagtgaaatgttggatttttttcatggacatatattcgtttcaaacctgtggtacttgcaacacgcaaattgtttcagtcatgctttgggccttgaattcacggtcctactgtcagtttgatgcaactgtgcaaagaagctcattttttttcaatgtcagaaccaattagcggctacagatttttag

SEQ ID NO: 84449 - DNA, 1351 bp, Zea Mays
ttgcaagtaacaactactcttctccggactctcggggtttcccgacgtccaccacccatcctcgcttctctcgagtcctcaatccatcctccggctgttccctcccagcgacgaaaccctagcccgtcacctcgacgcctagcccgccaccttgccgcccgtcgctgcaggtttatggcgcctgtgtgatcggatcagcagtccgctccgtctccctcggcccacgcatctgatgttcctctcccgcatcgtactccgcgacctggattccatcgactctccggcctccatggcgtcctcgaagaaggttgtgacccgtgacgagtgggagctgaagctccgcgacgtcaagatccgcaaggaggacatgaaccgcctcgtcatgaacttcctcgtcaccgagggcttcgtcgacgccgccgacaagtttcgcatcgacggagattgacctagcgaccatcactgatcgaatggaggttaagagagcagtacagtcgggtaatgttcaggaggcgatcgagaaaatcaacgaccttaaccccacgattttggacacgaatccccaactatactttcatctccagcaacagaaactaatagagttgattcgcgtgggaaaaataaatgaagctttggagttcgctcaagaagaacttgcaccgagaggcgaagaaaatcaaacatttctcgaggaaatagaaaaaactgtagcactactggtttttgaagatgtaaaaaattgcccttatggggaactattggatgtttctcaacgtttgaagactgcaagtgaagttaatgctgctattcttacaagccaaagccatgagaaagatccgaagcttccaagcttgttaaagatgttgaaatggacccaaaatcaactggacgaaaaggcggcttatcctcgaatcaacgatttcaccactgccgcgctggaagatccatcgatatgaatctgctgtgaaggaactgagggtatgcaccaagcctgcctggtgcctacacgtggttgccccggatctgtcaatagatcatcgtctgcagcgattgagttcaccccttgcactagtgtttaagatcaatgcaagcaattgatccgaaaacatcacctgtgttctacctgtacatgatgtagaagacatgtttgaaacctttttaagttagtgaaatgttggatttttttcatggacatatattcgtttcaaacctgtggtacttgcaacacgcaaattgtttcagtcatgctttgggccttgaattcacggtcctactgtcagtttgatgcaactgtgcaaagaagctcattttttttcaatgtcagaaccaattagcggctacagatttttag

SEQ ID NO: 84450 - DNA, 1347 bp, Zea Mays
gttgcaacttgcaagtaacaactactcttctccggactctcggggtttcccgacgtccaccacccatcctcgcttctctcgagtcctcaatccatcctccggctgttccctcccagcgacgaaaccctagcccgtcacctcgacgcctagcccgccaccttgccgcccgtcgctgcaggtttatggcgcctgtgtgatcggatcagcagtccgctccgtctccctcggcccacgcatctgatgttcctctcccgcatcgtactccgcgacctggattccatcgactctccggcctccatggcgtcctcgaagaaggttgtgacccgtgacgagtgggagctgaagctccgcgacgtcaagatccgcaaggaggacatgaaccgcctcgtcatgaacttcctcgtcaccgagggcttcgtcgacgccgccgacaacggagattgacctagcgaccatcactgatcgaatggaggttaagagagcagtacagtcgggtaatgttcaggaggcgatcgagaaaatcaacgaccttaaccccacgattttggacacgaatccccaactatactttcatctccagcaacagaaactaatagagttgattcgcgtgggaaaaataaatgaagctttggagttcgctcaagaagaacttgcaccgagaggcgaagaaaatcaaacatttctcgaggaaatagaaaaaactgtagcactactggtttttgaagatgtaaaaaattgcccttatggggaactattggatgtttctcaacgtttgaagactgcaagtgaagttaatgctgctattcttacaagccaaagccatgagaaagatccgaagcttccaagcttgttaaagatgttgaaatggacccaaaatcaactggacgaaaaggcggcttatcctcgaatcaacgatttcaccactgccgcgctggaagatccatcgatatgaatctgctgtgaaggaactgagggtatgcaccaagcctgcctggtgcctacacgtggttgccccggatctgtcaatagatcatcgtctgcagcgattgagttcaccccttgcactagtgtttaagatcaatgcaagcaattgatccgaaaacatcacctgtgttctacctgtacatgatgtagaagacatgtttgaaacctttttaagttagtgaaatgttggatttttttcatggacatatattcgtttcaaacctgtggtacttgcaacacgcaaattgtttcagtcatgctttgggccttgaattcacggtcctactgtcagtttgatgcaactgtgcaaagaagctcattttttttcaatgtcagaaccaattagcggctacagatttttag

SEQ ID NO: 84451 - DNA, 723 bp, Zea Mays
cctggggctccacttcttgtccagcaggatgttgctcgacttgatgtcgcggtgcaccaccttcggttccaggccttcgtgcagggtcaaagggctgaccggaccgacgtcgccgtgcagccactgctccaggttcccgttttcgacgaactcgtaaaggagcatcctgtgaacgcagattcatggcattgccagtgagtatcaatcagactatcagcattaagcatttggcagtggctgacagggtgaattcgtcactagtgttagtgtgggtgctcaccgtttagggccttctgcgcagtacccgatgagaccgacaaggtgcttgtgcctcactttgccgatggcttcaacctccaccttgaattccttctcggcctgacccctaaaacaagttatggactcaatcaacatgccgactagtgaagctatcgccagaacattacacttgtagccactgtccattttatctctcgtgttttgttgagggcttgaggtaagaaacatcaatggccgcgtttggttaagcttttggtgggcttctggccgccagaaactggaagcccaaccaaacacctagcttttggtccggcttctggtgaacgcgcggcggcccgcagcggctccagcactggccgccagaatcggtcggctggccgtgccgtgcagaagccgaacggcttctcagctgtaacactgtttaaacttcactgttttagtgat

SEQ ID NO: 84452 - DNA, 727 bp, Zea Mays
gacaccctggggctccacttcttgtccagcaggatgttgctcgacttgatgtcgcggtgcaccaccttcggttccaggccttcgtgcaggtcaaagggctgaccggaccgacgtcgccgtgcagccactgctccaggttcccgttttcgacgaactcgtaaaggagcatcctgtgaacgcagattcatggcattgccagtgagtatcaatcagactatcagcattaagcatttggcagtggctgacagggtgaattcgtcactagtgttagtgtgggtgctcaccgtttagggccttctgcgcagtacccgatgagaccgacaaggtgcttgtgcctcactttgccgatggcttcaacctccaccttgaattccttctcggcctgacccctaaaacaagttatggactcaatcaacatgccgactagtgaagctatcgccagaacattacacttgtagccactgtccattttatctctcgtgttttgttgagggcttgaggtaagaaacatcaatggccgcgtttggttaagcttttggtgggcttctggccgccagaaactggaagcccaaccaaacacctagcttttggtccggcttctggtgaacgcgcggcggcccgcagcggctccagcactggccgccagaatcggtcggctggccgtgccgtgcagaagccgaacggcttctcagctgtaacactgtttaaacttcactgttttagtgat

SEQ ID NO: 84453 - DNA, 1003 bp, Zea Mays
cttgagcaattcttttgaaatcatcagttgccaagccattggttgttgatgggacgtctaaaggtcatgaactatatcttgcatatgacgaggcatccttgtcaatgcttgatccgcctctggttctacaggaattcataaaccatgtagaaatgtgggatctgatttattgcctctacaggcgggatcctctttaaggtgtatatcattggtgaaacaatacaggttgtccgcaggttctctcttcctgatgttaacacatatgacttactaaacaacgttggcatctatcgattgccaagagtttcatgtgctgcagctagtgcggatgatgcagatcttgaccctcttattgcagagcttcctccaaggccacttctagagaaactgggcagggagcttcgtggccggcttggtttgagattgttcaatatagatatgattagagaacttggaaccaaagatcggtactacataattgatatcaactacttcccaggttacggcaaaatgccaggatatgagcgcatgttcacagacttcttactaagtctcgcacaaagcaagtacaaaaggtatgcttccccaccgcgccaatgtacatttgctggagacataagcataagcgggaggcttgaggaagttggcaagtctcagtgtgtgtgttcaaaatcggtggcacatgctggactggagtaggaaataaccaaggaaacgcttggatgcgctgtactcatgttgtaaaatgtttaactgaatgaacaccttcctcgtgatggctccctccatcgtaatttggcaaccatgagaattaattctgcagcttggtagtgaacggtgttttgttgtgtgtatttggtaggtttgaggtctacgcaagtcaggagaccaccaaatagctgttgatgatcggatcatattaatctacatacaatctttctagcagtcatactaatacaaccatcatgggtttgtgctggagctctgtaaattgaaaaatgac

SEQ ID NO: 84454 - DNA, 971 bp, Zea Mays
tgcttgagcaattcttttgaaatcatcagttgccaagccattggttgttgatgggacgtctaaaggtcatgaactatatcttgcatatgacgaggcatccttgtcaatgcttgatccgcctctggttctacaggaattcataaaccatggcgggatcctctttaaggtgtatatcattggtgaaacaatacaggttgtccgcaggttctctcttcctgatgttaacacatatgacttactaaacaacgttggcatctatcgattgccaagagtttcatgtgctgcagctagtgcggatgatgcagatcttgaccctcttattgcagagcttcctccaaggccacttctagagaaactgggcagggagcttcgtggccggcttggtttgagattgttcaatatagatatgattagagaacttggaaccaaagatcggtactacataattgatatcaactacttcccaggttacggcaaaatgccaggatatgagcgcatgttcacagacttcttactaagtctcgcacaaagcaagtacaaaaggtatgcttccccaccgcgccaatgtacatttgctggagacataagcataagcgggaggcttgaggaagttggcaagtctcagtgtgtgtgttcaaaatcggtggcacatgctggactggagtaggaaataaccaaggaaacgcttggatgcgctgtactcatgttgtaaaatgtttaactgaatgaacaccttcctcgtgatggctccctccatcgtaatttggcaaccatgagaattaattctgcagcttggtagtgaacggtgttttgttgtgtgtatttggtaggtttgaggtctacgcaagtcaggagaccaccaaatagctgttgatgatcggatcatattaatctacatacaatctttctagcagtcatactaatacaaccatcatgggtttgtgctggagctctgtaaattgaaaaatgac

SEQ ID NO: 84455 - DNA, 1432 bp, Zea Mays
gtctcaatagacaatagtcaatagctttatattatcctgtcaagttggcggaatgggcctaggccctaggctgcaaatacttgttgatggtatctgggattctagtttggaatattcctttggataactgcatcacatggaaaatgacaacttattgatgggaagaatggaatcagttttgtatctattgatgagtctcttcccctctcagaacaaggcccttttgatgttattttacacaagattactaggaaggagtggcagaaggttctggaggactatcacgaagaacatccagaagttactgtccttgacccaccaaatgctatcgagcatctgaacaatcgacaatcaatgcttgaagaagtagctgatttgaacctgtcaaatttctatggagaagtttgtatcccacgccagctggtcattacgaaagatccatcctctataccaacttctgtagctatggctggactaactttgcccttggttgccaagccattggttgttgatgggacgtctaaaggtcatgaactatatcttgcatatgacgaggcatccttgtcaatgcttgatccgcctctggttctacaggaattcataaaccatggcgggatcctctttaaggtgtatatcattggtgaaacaatacaggttgtccgcaggttctctcttcctgatgttaacacatatgacttactaaacaacgttggcatctatcgattgccaagagtttcatgtgctgcagctagtgcggatgatgcagatcttgaccctcttattgcagagcttcctccaaggccacttctagagaaactgggcagggagcttcgtggccggcttggtttgagattgttcaatatagatatgattagagaacttggaaccaaagatcggtactacataattgatatcaactacttcccaggttacggcaaaatgccaggatatgagcgcatgttcacagacttcttactaagtctcgcacaaagcaagtacaaaaggtatgcttccccaccgcgccaatgtacatttgctggagacataagcataagcgggaggcttgaggaagttggcaagtctcagtgtgtgtgttcaaaatcggtggcacatgctggactggagtaggaaataaccaaggaaacgcttggatgcgctgtactcatgttgtaaaatgtttaactgaatgaacaccttcctcgtgatggctccctccatcgtaatttggcaaccatgagaattaattctgcagcttggtagtgaacggtgttttgttgtgtgtatttggtaggtttgaggtctacgcaagtcaggagaccaccaaatagctgttgatgatcggatcatattaatctacatacaatctttctagcagtcatactaatacaaccatcatgggtttgtgctggagctctgtaaattgaaaaatgac

SEQ ID NO: 84456 - DNA, 3173 bp, Zea Mays
cccagttcctgatggccagaagattttttgcatgaacaggaagaatggaatcagttttgtatctattgatgagtctcttcccctctcagaacaaggcccttttgatgttattttacacaagattactaggaaggagtggcagaaggttctggaggactatcacgaagaacatccagaagttactgtccttgacccaccaaatgctatcgagcatctgaacaatcgacaatcaatgcttgaagaagtagctgatttgaacctgtcaaatttctatggagaagtttgtatcccacgccagctggtcattacgaaagatccatcctctataccaacttctgtagctatggctggactaactttgcccttggttgccaagccattggttgttgatgggacgtctaaaggtcatgaactatatcttgcatatgacgaggcatccttgtcaatgcttgatccgcctctggttctacaggaattcataaaccatggcgggatcctctttaaggtgtatatcattggtgaaacaatacaggttgtccgcaggttctctcttcctgatgttaacacatatgacttactaaacaacgttggcatctatcgattgccaagagtttcatgtgctgcagctagtgcggatgatgcagatcttgaccctcttattgcagagcttcctccaaggccacttctagagaaactgggcagggagcttcgtggccggcttggtttgagattgttcaatatagatatgattagagaacttggaaccaaagatcggtactacataattgatatcaactacttcccaggtgtgtcgttattttgtcatttataccttgggtttgtcctcttcgtttccgttctttatctttgtccatgtaaaacttgttgggccaaacttctgccccagccaagtgtgaggagtatcctaaccacaaatctctggccttctaagccatctctgagtgttcaagaatccagtaggatctcttcgtgaccaaatatcgactgtgtttgggcaaaaatagcctagctacttatgcttggttcatcccaagagccagttgttctttgccataaagaaccttataccagaagttcttttatgctgtgggaactaatttctctacatagttaagcacatggtcgtgaccacgtatgtcgtggataccatttgcgcttccttttcccattactaaaaatattatggtcacaatttgcactttaagttataatgcagcacagtgcttcactgtctgagtctacaacaacaacaacaaagcctttttgtcccaagcacgttggggtaggctagagatgaaatcccatatgaaaacctcagagctcaaccccaaagaaaagaaaagggagataaaggcaaaggagaaccgaaaaacgacgaaacggggaaacacataaaaagaaataaaacccacaagaaccagcaagatctaaaggggcacaagaaaaggtcaaacgattaaggaggaaaagcgaaactacaaatcagggttctggcacgtgaattgcacacttccaccccttcctatccacggcgagctctttatcaatattccactcattcaggtccctcttcacatcctctgtccacgtcaaggttggttgacctctacctctcttcacattctcgggacgcctaattattccgatatgcactggtgcctcttcaggtcttcgttggatatgtccaaaccatctcaaacgatgttgcataagcttctcctcaattggcgccactcctactctctcgtatatcatcattccggactcgatctcttcttgtgtggccacatatacaacgcaacatacgtatctctgccacacttagttgttggacatgtcgtcttttagtgggccaacattctgctccatacaacatagccggccggattgctgtcctgtagaatttgccttttagtttgtgttgcacccgggggtcgcataagacacccgcagcttgccgccacttcaaccatccagctttaattctatgactgacatcctcatcgatgttccctccttctgaagcattgatcctaagtaacgaaaagtgtttttcttgggtaccacttgcccatcaagactaacgtcgccatcctcataccccatggcactgaaatcacacttcatatactctgttttagactactaagcctaaaaccttttgcttccagcgtctgcctccacaattccaacttttgcgaaacaccactcttactctccttaataagtaccacatcatcggcaaaaagcatacaccacggtatatctccttgtatgtcacttgtgacctcatctatcaccaaaacgaaaagataaggtctgaaagccgacccttgatgtagtcctatgttaattggaaagtcatcggtgtctccatcacttgttcggacacttgtcacaacattaatgtacaagggcttcactgtctaagtctaaaagaagaatattgtatcagatacaacattctcctaacagtatcttctcgacacaatttaactcacagtttgcaattattattttttacaatagcgtctcctaccattatcttcttgacacaatttaaccgtgcaggttacggcaaaatgccaggatatgagcgcatgttcacagacttcttactaagtctcgcacaaagcaagtacaaaaggtacttaagcgggacatgaggtgcaaggaagtttgtgaagaccatgctactgacgagatggcatataacggtggcaggtatgcttccccaccgcgccaatgtacatttgctggagacataagcataagcgggaggcttgaggaagttggcaagtctcagtgtgtgtgttcaaaatcggtggcacatgctggactggagtaggaaataaccaaggaaacgcttggatgcgctgtactcatgttgtaaaatgtttaactgaatgaacaccttcctcgtgatggctccctccatcgtaatttggcaaccatgagaattaattctgcagcttggtagtgaacggtgttttgttgtgtgtatttggtaggtttgaggtctacgcaagtcaggagaccaccaaatagctgttgatgatcggatcatattaatctacatacaatctttctagcagtcatactaatacaaccatcatgggtttgtgctggagctctgtaaattgaaaaatgac

SEQ ID NO: 84457 - DNA, 1737 bp, Zea Mays
ttccgctcgtcccgccaatcgccattattaacagctccgcggtccctccctccctcggtcggtcggcgtcggtccctccctccccacccagttagtcctcagcctatcccgtgcccgcgcagagcaccgcctctgctcgacccaccaccctctgtgcagagttaattaaccttgaggtttccgattgcccttcccttccgctcctctcgcccattcgcggcgagattcagcggcaaggatgcgcctgcacgcggaggtgcgggatgagatggaggaggggagcgaggagggggctgtgacggcttcggcggggctgtcgccaccgccactcatcggtgcggcggcgccggttccccggctagtggtggggttcgccctcacgaagaagaaggtgaagagcttcctgcagcccaagctgctcctgctggccaggaagaatggaatcagttttgtatctattgatgagtctcttcccctctcagaacaaggcccttttgatgttattttacacaagattactaggaaggagtggcagaaggttctggaggactatcacgaagaacatccagaagttactgtccttgacccaccaaatgctatcgagcatctgaacaatcgacaatcaatgcttgaagaagtagctgatttgaacctgtcaaatttctatggagaagtttgtatcccacgccagctggtcattacgaaagatccatcctctataccaacttctgtagctatggctggactaactttgcccttggttgccaagccattggttgttgatgggacgtctaaaggtcatgaactatatcttgcatatgacgaggcatccttgtcaatgcttgatccgcctctggttctacaggaattcataaaccatgtagaaatgtgggatctgatttattgcctctacaggcgggatcctctttaaggtgtatatcattggtgaaacaatacaggttgtccgcaggttctctcttcctgatgttaacacatatgacttactaaacaacgttggcatctatcgattgccaagagtttcatgtgctgcagctagtgcggatgatgcagatcttgaccctcttattgcagagcttcctccaaggccacttctagagaaactgggcagggagcttcgtggccggcttggtttgagattgttcaatatagatatgattagagaacttggaaccaaagatcggtactacataattgatatcaactacttcccaggttacggcaaaatgccaggatatgagcgcatgttcacagacttcttactaagtctcgcacaaagcaagtacaaaaggtatgcttccccaccgcgccaatgtacatttgctggagacataagcataagcgggaggcttgaggaagttggcaagtctcagtgtgtgtgttcaaaatcggtggcacatgctggactggagtaggaaataaccaaggaaacgcttggatgcgctgtactcatgttgtaaaatgtttaactgaatgaacaccttcctcgtgatggctccctccatcgtaatttggcaaccatgagaattaattctgcagcttggtagtgaacggtgttttgttgtgtgtatttggtaggtttgaggtctacgcaagtcaggagaccaccaaatagctgttgatgatcggatcatattaatctacatacaatctttctagcagtcatactaatacaaccatcatgggtttgtgctggagctctgtaaattgaaaaatgac

SEQ ID NO: 84458 - DNA, 1493 bp, Zea Mays
ttccgctcgtcccgccaatcgccattattaacagctccgcggtccctccctccctcggtcggtcggcgtcggtccctccctccccacccagttagtcctcagcctatcccgtgcccgcgcagagcaccgcctctgctcgacccaccaccctctgtgcagagttaattaaccttgaggtttccgattgcccttcccttccgctcctctcgcccattcgcggcgagattcagcggcaaggatgcgcctgcacgcggaggtgcgggatgagatggaggaggggagcgaggagggggctgtgacggcttcggcggggctgtcgccaccgccactcatcggtgcggcggcgccggttccccggctagtggtggggttcgccctcacgaagaagaaggtgaagagcttcctgcagcccaagctgctcctgctggccaggaagaatggaatcagttttgtatctattgatgagtctcttcccctctcagaacaaggcccttttgatgttattttacacaagattactaggaaggagtggcagaaggttctggaggactatcacgaagaacatccagaagttactgtccttgacccaccaaatgctatcgagcatctgaacaatcgacaatcaatgcttgaagaagtagctgatttgaacctgtcaaatttctatggagaagtttgtatcccacgccagctggtcattacgaaagatccatcctctataccaacttctgtagctatggctggactaactttgcccttggttgccaagccattggttgttgatgggacgtctaaaggtcatgaactatatcttgcatatgacgaggcatccttgtcaatgcttgatccgcctctggttctacaggaattcataaaccatggcgggatcctctttaaggtgtatatcattggtgaaacaatacaggttgtccgcaggttctctcttcctgatgttaacacatatgacttactaaacaacgttggcatctatcgattgccaagagtttcatgtgctgcagctagtgcggatgatgcagatcttgaccctcttattgcagagcttcctccaaggccacttctagagaaactgggcagggagcttcgtggccggcttggtttgagattgttcaatatagatatgattagagaacttggaaccaaagatcggtactacataattgatatcaactacttcccaggttacggcaaaatgccaggatatgagcgcatgttcacagacttcttactaagtctcgcacaaagcaagtacaaaaggtacttaagcgggacatgaggtgcaaggaagtttgtgaagaccatgctactgacgagatggcatataacggtggcaggtttgaggtctacgcaagtcaggagaccaccaaatagctgttgatgatcggatcatattaatctacatacaatctttctagcagtcatactaatacaaccatcatgggtttgtgctggagctctgtaaattgaaaaatgac

SEQ ID NO: 84459 - DNA, 3489 bp, Zea Mays
ttccgctcgtcccgccaatcgccattattaacagctccgcggtccctccctccctcggtcggtcggcgtcggtccctccctccccacccagttagtcctcagcctatcccgtgcccgcgcagagcaccgcctctgctcgacccaccaccctctgtgcagagttaattaaccttgaggtttccgattgcccttcccttccgctcctctcgcccattcgcggcgagattcagcggcaaggatgcgcctgcacgcggaggtgcgggatgagatggaggaggggagcgaggagggggctgtgacggcttcggcggggctgtcgccaccgccactcatcggtgcggcggcgccggttccccggctagtggtggggttcgccctcacgaagaagaaggtgaagagcttcctgcagcccaagctgctcctgctggccaggaagaatggaatcagttttgtatctattgatgagtctcttcccctctcagaacaaggcccttttgatgttattttacacaagattactaggaaggagtggcagaaggttctggaggactatcacgaagaacatccagaagttactgtccttgacccaccaaatgctatcgagcatctgaacaatcgacaatcaatgcttgaagaagtagctgatttgaacctgtcaaatttctatggagaagtttgtatcccacgccagctggtcattacgaaagatccatcctctataccaacttctgtagctatggctggactaactttgcccttggttgccaagccattggttgttgatgggacgtctaaaggtcatgaactatatcttgcatatgacgaggcatccttgtcaatgcttgatccgcctctggttctacaggaattcataaaccatggcgggatcctctttaaggtgtatatcattggtgaaacaatacaggttgtccgcaggttctctcttcctgatgttaacacatatgacttactaaacaacgttggcatctatcgattgccaagagtttcatgtgctgcagctagtgcggatgatgcagatcttgaccctcttattgcagagcttcctccaaggccacttctagagaaactgggcagggagcttcgtggccggcttggtttgagattgttcaatatagatatgattagagaacttggaaccaaagatcggtactacataattgatatcaactacttcccaggtgtgtcgttattttgtcatttataccttgggtttgtcctcttcgtttccgttctttatctttgtccatgtaaaacttgttgggccaaacttctgccccagccaagtgtgaggagtatcctaaccacaaatctctggccttctaagccatctctgagtgttcaagaatccagtaggatctcttcgtgaccaaatatcgactgtgtttgggcaaaaatagcctagctacttatgcttggttcatcccaagagccagttgttctttgccataaagaaccttataccagaagttcttttatgctgtgggaactaatttctctacatagttaagcacatggtcgtgaccacgtatgtcgtggataccatttgcgcttccttttcccattactaaaaatattatggtcacaatttgcactttaagttataatgcagcacagtgcttcactgtctgagtctacaacaacaacaacaaagcctttttgtcccaagcacgttggggtaggctagagatgaaatcccatatgaaaacctcagagctcaaccccaaagaaaagaaaagggagataaaggcaaaggagaaccgaaaaacgacgaaacggggaaacacataaaaagaaataaaacccacaagaaccagcaagatctaaaggggcacaagaaaaggtcaaacgattaaggaggaaaagcgaaactacaaatcagggttctggcacgtgaattgcacacttccaccccttcctatccacggcgagctctttatcaatattccactcattcaggtccctcttcacatcctctgtccacgtcaaggttggttgacctctacctctcttcacattctcgggacgcctaattattccgatatgcactggtgcctcttcaggtcttcgttggatatgtccaaaccatctcaaacgatgttgcataagcttctcctcaattggcgccactcctactctctcgtatatcatcattccggactcgatctcttcttgtgtggccacatatacaacgcaacatacgtatctctgccacacttagttgttggacatgtcgtcttttagtgggccaacattctgctccatacaacatagccggccggattgctgtcctgtagaatttgccttttagtttgtgttgcacccgggggtcgcataagacacccgcagcttgccgccacttcaaccatccagctttaattctatgactgacatcctcatcgatgttccctccttctgaagcattgatcctaagtaacgaaaagtgtttttcttgggtaccacttgcccatcaagactaacgtcgccatcctcataccccatggcactgaaatcacacttcatatactctgttttagactactaagcctaaaaccttttgcttccagcgtctgcctccacaattccaacttttgcgaaacaccactcttactctccttaataagtaccacatcatcggcaaaaagcatacaccacggtatatctccttgtatgtcacttgtgacctcatctatcaccaaaacgaaaagataaggtctgaaagccgacccttgatgtagtcctatgttaattggaaagtcatcggtgtctccatcacttgttcggacacttgtcacaacattaatgtacaagggcttcactgtctaagtctaaaagaagaatattgtatcagatacaacattctcctaacagtatcttctcgacacaatttaactcacagtttgcaattattattttttacaatagcgtctcctaccattatcttcttgacacaatttaaccgtgcaggttacggcaaaatgccaggatatgagcgcatgttcacagacttcttactaagtctcgcacaaagcaagtacaaaaggtatgcttccccaccgcgccaatgtacatttgctggagacataagcataagcgggaggcttgaggaagttggcaagtctcagtgtgtgtgttcaaaatcggtggcacatgctggactggagtaggaaataaccaaggaaacgcttggatgcgctgtactcatgttgtaaaatgtttaactgaatgaacaccttcctcgtgatggctccctccatcgtaatttggcaaccatgagaattaattctgcagcttggtagtgaacggtgttttgttgtgtgtatttggtaggtttgaggtctacgcaagtcaggagaccaccaaatagctgttgatgatcggatcatattaatctacatacaatctttctagcagtcatactaatacaaccatcatgggtttgtgctggagctctgtaaattgaaaaatgac

SEQ ID NO: 84460 - DNA, 3279 bp, Zea Mays
ttccgctcgtcccgccaatcgccattattaacagctccgcggtccctccctccctcggtcggtcggcgtcggtccctccctccccacccagttagtcctcagcctatcccgtgcccgcgcagagcaccgcctctgctcgacccaccaccctctgtgcagagttaattaaccttgaggtttccgattgcccttcccttccgctcctctcgcccattcgcggcgagattcagcggcaaggatgcgcctgcacgcggaggtgcgggatgagatggaggaggggagcgaggagggggctgtgacggcttcggcggggctgtcgccaccgccactcatcggtgcggcggcgccggttccccggctagtggtggggttcgccctcacgaagaagaaggtgaagagcttcctgcagcccaagctgctcctgctggccaggaagaatggaatcagttttgtatctattgatgagtctcttcccctctcagaacaaggcccttttgatgttattttacacaagattactaggaaggagtggcagaaggttctggaggactatcacgaagaacatccagaagttactgtccttgacccaccaaatgctatcgagcatctgaacaatcgacaatcaatgcttgaagaagtagctgatttgaacctgtcaaatttctatggagaagtttgtatcccacgccagctggtcattacgaaagatccatcctctataccaacttctgtagctatggctggactaactttgcccttggttgccaagccattggttgttgatgggacgtctaaaggtcatgaactatatcttgcatatgacgaggcatccttgtcaatgcttgatccgcctctggttctacaggaattcataaaccatggcgggatcctctttaaggtgtatatcattggtgaaacaatacaggttgtccgcaggttctctcttcctgatgttaacacatatgacttactaaacaacgttggcatctatcgattgccaagagtttcatgtgctgcagctagtgcggatgatgcagatcttgaccctcttattgcagagcttcctccaaggccacttctagagaaactgggcagggagcttcgtggccggcttggtttgagattgttcaatatagatatgattagagaacttggaaccaaagatcggtactacataattgatatcaactacttcccaggtgtgtcgttattttgtcatttataccttgggtttgtcctcttcgtttccgttctttatctttgtccatgtaaaacttgttgggccaaacttctgccccagccaagtgtgaggagtatcctaaccacaaatctctggccttctaagccatctctgagtgttcaagaatccagtaggatctcttcgtgaccaaatatcgactgtgtttgggcaaaaatagcctagctacttatgcttggttcatcccaagagccagttgttctttgccataaagaaccttataccagaagttcttttatgctgtgggaactaatttctctacatagttaagcacatggtcgtgaccacgtatgtcgtggataccatttgcgcttccttttcccattactaaaaatattatggtcacaatttgcactttaagttataatgcagcacagtgcttcactgtctgagtctacaacaacaacaacaaagcctttttgtcccaagcacgttggggtaggctagagatgaaatcccatatgaaaacctcagagctcaaccccaaagaaaagaaaagggagataaaggcaaaggagaaccgaaaaacgacgaaacggggaaacacataaaaagaaataaaacccacaagaaccagcaagatctaaaggggcacaagaaaaggtcaaacgattaaggaggaaaagcgaaactacaaatcagggttctggcacgtgaattgcacacttccaccccttcctatccacggcgagctctttatcaatattccactcattcaggtccctcttcacatcctctgtccacgtcaaggttggttgacctctacctctcttcacattctcgggacgcctaattattccgatatgcactggtgcctcttcaggtcttcgttggatatgtccaaaccatctcaaacgatgttgcataagcttctcctcaattggcgccactcctactctctcgtatatcatcattccggactcgatctcttcttgtgtggccacatatacaacgcaacatacgtatctctgccacacttagttgttggacatgtcgtcttttagtgggccaacattctgctccatacaacatagccggccggattgctgtcctgtagaatttgccttttagtttgtgttgcacccgggggtcgcataagacacccgcagcttgccgccacttcaaccatccagctttaattctatgactgacatcctcatcgatgttccctccttctgaagcattgatcctaagtaacgaaaagtgtttttcttgggtaccacttgcccatcaagactaacgtcgccatcctcataccccatggcactgaaatcacacttcatatactctgttttagactactaagcctaaaaccttttgcttccagcgtctgcctccacaattccaacttttgcgaaacaccactcttactctccttaataagtaccacatcatcggcaaaaagcatacaccacggtatatctccttgtatgtcacttgtgacctcatctatcaccaaaacgaaaagataaggtctgaaagccgacccttgatgtagtcctatgttaattggaaagtcatcggtgtctccatcacttgttcggacacttgtcacaacattaatgtacaagggcttcactgtctaagtctaaaagaagaatattgtatcagatacaacattctcctaacagtatcttctcgacacaatttaactcacagtttgcaattattattttttacaatagcgtctcctaccattatcttcttgacacaatttaaccgtgcaggttacggcaaaatgccaggatatgagcgcatgttcacagacttcttactaagtctcgcacaaagcaagtacaaaaggtacttaagcgggacatgaggtgcaaggaagtttgtgaagaccatgctactgacgagatggcatataacggtggcaggtttgaggtctacgcaagtcaggagaccaccaaatagctgttgatgatcggatcatattaatctacatacaatctttctagcagtcatactaatacaaccatcatgggtttgtgctggagctctgtaaattgaaaaatgac

SEQ ID NO: 84461 - DNA, 1798 bp, Zea Mays
ctcctccctcttccgctcgtcccgccaatcgccattattaacagctccgcggtccctccctccctcggtcggtcggcgtcggtccctccctccccacccagttagtcctcagcctatcccgtgcccgcgcagagcaccgcctctgctcgacccaccaccctctgtgcagagttaattaaccttgaggtttccgattgcccttcccttccgctcctctcgcccattcgcggcgagattcagcggcaaggatgcgcctgcacgcggaggtgcgggatgagatggaggaggggagcgaggagggggctgtgacggcttcggcggggctgtcgccaccgccactcatcggtgcggcggcgccggttccccggctagtggtggggttcgccctcacgaagaagaaggtgaagagcttcctgcagcccaagctgctcctgctggccaggaagaatggaatcagttttgtatctattgatgagtctcttcccctctcagaacaaggcccttttgatgttattttacacaagattactaggaaggagtggcagaaggttctggaggactatcacgaagaacatccagaagttactgtccttgacccaccaaatgctatcgagcatctgaacaatcgacaatcaatgcttgaagaagtagctgatttgaacctgtcaaatttctatggagaagtttgtatcccacgccagctggtcattacgaaagatccatcctctataccaacttctgtagctatggctggactaactttgcccttgggtaattgattccaatcttcaagctgtcaattatttggataaagaacattggaaaatgcttgagcaattcttttgaaatcatcaggttgccaagccattggttgttgatgggacgtctaaaggtcatgaactatatcttgcatatgacgaggcatccttgtcaatgcttgatccgcctctggttctacaggaattcataaaccatggcgggatcctctttaaggtgtatatcattggtgaaacaatacaggttgtccgcaggttctctcttcctgatgttaacacatatgacttactaaacaacgttggcatctatcgattgccaagagtttcatgtgctgcagctagtgcggatgatgcagatcttgaccctcttattgcagagcttcctccaaggccacttctagagaaactgggcagggagcttcgtggccggcttggtttgagattgttcaatatagatatgattagagaacttggaaccaaagatcggtactacataattgatatcaactacttcccaggttacggcaaaatgccaggatatgagcgcatgttcacagacttcttactaagtctcgcacaaagcaagtacaaaaggtatgcttccccaccgcgccaatgtacatttgctggagacataagcataagcgggaggcttgaggaagttggcaagtctcagtgtgtgtgttcaaaatcggtggcacatgctggactggagtaggaaataaccaaggaaacgcttggatgcgctgtactcatgttgtaaaatgtttaactgaatgaacaccttcctcgtgatggctccctccatcgtaatttggcaaccatgagaattaattctgcagcttggtagtgaacggtgttttgttgtgtgtatttggtaggtttgaggtctacgcaagtcaggagaccaccaaatagctgttgatgatcggatcatattaatctacatacaatctttctagcagtcatactaatacaaccatcatgggtttgtgctggagctctgtaaattgaaaaatgac

SEQ ID NO: 84462 - DNA, 1692 bp, Zea Mays
ccgtctacaaataaatacccctccagctctcttcctcctccctcttccgctcgtcccgccaatcgccattattaacagctccgcggtccctccctccctcggtcggtcggcgtcggtccctccctccccacccagttagtcctcagcctatcccgtgcccgcgcagagcaccgcctctgctcgacccaccaccctctgtgcagagttaattaaccttgaggtttccgattgcccttcccttccgctcctctcgcccattcgcggcgagattcagcggcaaggatgcgcctgcacgcggaggtgcgggatgagatggaggaggggagcgaggagggggctgtgacggcttcggcggggctgtcgccaccgccactcatcggtgcggcggcgccggttccccggctagtggtggggttcgccctcacgaagaagaaggtgaagagcttcctgcagcccaagctgctcctgctggccaggaagaatggaatcagttttgtatctattgatgagtctcttcccctctcagaacaaggcccttttgatgttattttacacaagattactaggaaggagtggcagaaggttctggaggactatcacgaagaacatccagaagttactgtccttgacccaccaaatgctatcgagcatctgaacaatcgacaatcaatgcttgaagaagtagctgatttgaacctgtcaaatttctatggagaagtttgtatcccacgccagctggtcattacgaaagatccatcctctataccaacttctgtagctatggctggactaactttgcccttggttgccaagccattggttgttgatgggacgtctaaaggtcatgaactatatcttgcatatgacgaggcatccttgtcaatgcttgatccgcctctggttctacaggaattcataaaccatggttctctcttcctgatgttaacacatatgacttactaaacaacgttggcatctatcgattgccaagagtttcatgtgctgcagctagtgcggatgatgcagatcttgaccctcttattgcagagcttcctccaaggccacttctagagaaactgggcagggagcttcgtggccggcttggtttgagattgttcaatatagatatgattagagaacttggaaccaaagatcggtactacataattgatatcaactacttcccaggttacggcaaaatgccaggatatgagcgcatgttcacagacttcttactaagtctcgcacaaagcaagtacaaaaggtatgcttccccaccgcgccaatgtacatttgctggagacataagcataagcgggaggcttgaggaagttggcaagtctcagtgtgtgtgttcaaaatcggtggcacatgctggactggagtaggaaataaccaaggaaacgcttggatgcgctgtactcatgttgtaaaatgtttaactgaatgaacaccttcctcgtgatggctccctccatcgtaatttggcaaccatgagaattaattctgcagcttggtagtgaacggtgttttgttgtgtgtatttggtaggtttgaggtctacgcaagtcaggagaccaccaaatagctgttgatgatcggatcatattaatctacatacaatctttctagcagtcatactaatacaaccatcatgggtttgtgctggagctctgtaaattgaaaaatgac

SEQ ID NO: 84463 - DNA, 1342 bp, Zea Mays
cttcggttccagtcttccagagcaggccgagtgtttcagcaagagcaatgaagacagttgaccaatattcagaagaatggaatcagttttgtatctattgatgagtctcttcccctctcagaacaaggcccttttgatgttattttacacaagattactaggaaggagtggcagaaggttctggaggactatcacgaagaacatccagaagttactgtccttgacccaccaaatgctatcgagcatctgaacaatcgacaatcaatgcttgaagaagtagctgatttgaacctgtcaaatttctatggagaagtttgtatcccacgccagctggtcattacgaaagatccatcctctataccaacttctgtagctatggctggactaactttgcccttggttgccaagccattggttgttgatgggacgtctaaaggtcatgaactatatcttgcatatgacgaggcatccttgtcaatgcttgatccgcctctggttctacaggaattcataaaccatggcgggatcctctttaaggtgtatatcattggtgaaacaatacaggttgtccgcaggttctctcttcctgatgttaacacatatgacttactaaacaacgttggcatctatcgattgccaagagtttcatgtgctgcagctagtgcggatgatgcagatcttgaccctcttattgcagagcttcctccaaggccacttctagagaaactgggcagggagcttcgtggccggcttggtttgagattgttcaatatagatatgattagagaacttggaaccaaagatcggtactacataattgatatcaactacttcccaggttacggcaaaatgccaggatatgagcgcatgttcacagacttcttactaagtctcgcacaaagcaagtacaaaaggtatgcttccccaccgcgccaatgtacatttgctggagacataagcataagcgggaggcttgaggaagttggcaagtctcagtgtgtgtgttcaaaatcggtggcacatgctggactggagtaggaaataaccaaggaaacgcttggatgcgctgtactcatgttgtaaaatgtttaactgaatgaacaccttcctcgtgatggctccctccatcgtaatttggcaaccatgagaattaattctgcagcttggtagtgaacggtgttttgttgtgtgtatttggtaggtttgaggtctacgcaagtcaggagaccaccaaatagctgttgatgatcggatcatattaatctacatacaatctttctagcagtcatactaatacaaccatcatgggtttgtgctggagctctgtaaattgaaaaatgac

SEQ ID NO: 84464 - DNA, 1125 bp, Zea Mays
ttccgctcgtcccgccaatcgccattattaacagctccgcggtccctccctccctcggtcggtcggcgtcggtccctccctccccacccagttagtcctcagcctatcccgtgcccgcgcagagcaccgcctctgctcgacccaccaccctctgtgcagagttaattaaccttgaggtttccgattgcccttcccttccgctcctctcgcccattcgcggcgagattcagcggcaaggatgcgcctgcacgcggaggtgcgggatgagatggaggaggggagcgaggagggggctgtgacggcttcggcggggctgtcgccaccgccactcatcggtgcggcggcgccggttccccggctagtggtggggttcgccctcacgaagaagaaggtgaagagcttcctgcagcccaagctgctcctgctggccaggaagaatggaatcagttttgtatctattgatgagtctcttcccctctcagaacaaggcccttttgatgttattttacacaagattactaggaaggagtggcagaaggttctggaggactatcacgaagaacatccagaagttactgtccttgacccaccaaatgctatcgagcatctgaacaatcgacaatcaatgcttgaagaagtagctgatttgaacctgtcaaatttctatggagaagtttgtatcccacgccagctggtcattacgaaagatccatcctctataccaacttctgtagctatggctggactaactttgcccttggttgccaagccattggttgttgatgggacgtctaaaggtcatgaactatatcttgcatatgacgaggcatccttgtcaatgcttgatccgcctctggttctacaggaattcataaaccatggcgggatcctctttaaggtgtatatcattggtgaaacaatacaggttgtccgcaggttctctcttcctgatgttaacacatatgacttactaaacaacgttggcatctatcgattgccaagagtttcatgtgctgcagctagtgcggatgatgcagatcttgaccctcttattgcagagcttcctccaaggccacttctagagaaactgggcagggagcttcgtggccggcttttaaaacctgc

SEQ ID NO: 84465 - DNA, 1410 bp, Zea Mays
gctgcagacaggtcagggcgcctgtctgtctctcatgtcgttcgtcatccagcactgtagtctgacgtacgtacgcgcgctcatcatcgctatctgtaatagctagcagaagaccaccagaagcatctcaatccaataataggtgtacagggggtcaatcttaagatcgatatatactaccacttaatcaactactgccctcgctcggacgattattattatactaacctgtgtctgtgtgagacaagaccaaaaaaaaagaagacaaatgaagaagctacgtagaactcctatcgagaagggaaggggagggatgatgagcaagtagaccggccgatcgagagggaccgaattacagcatgcatgcgcaaaaatatacatggatggatggatggacggaccggctattttgactactacctcctcctatcaagcctatgattgatcgatcgatcgatcgattagctgatgggaacactgacaagtaactttaacccctccggatcaagaaataaaatagctagaggatcggaggatcacatgttacttgtgacgtacgcgaggtggatggatcgtcggaggagtgtatacctacgtacgtggtagctagtatctgcggtacggtggtgggcggtgccgctatctgttcgcgcgctgccgccgctgcgtgttgcttgctcatgcatcatgcacgcgcacgtacgccaaggtagatgcgcgtgctggtgcgcagctgcagcgcaggcgcgcgcaagcaaaatcatcattcagcaggcggcggagtgggtgaaggggttgaagaagcggtgggtggctgcctggggcctgtcgggctcggccttgggcccgccgcgcaggcgctcgcaggacgggcagaggctcagcgtggcggccggcatcggcagctgcatctgcatctgcacgtacaacggcggcggcaccggcaccggcaccggcacgccctgcgtcgcggcggcgggcgacgacgacggcgcctgatgtgggtgcgggccggcgagctgcttgagcgcgcggagctcctgtagctcccgctgcagccgccggttctcctcgctcagcgactcgcagcagcgcttcagcagctcgcagtccacctccgtctgcttcagcttcgtcctgcatatgtgcgcgcgcgcacgttatttgatccaaccaaaaccaagcatatcttcagttgcttcgccaacgcgattttctgcttctgctcgaagacaaaaaggacacccgccggcagaacggaaagcaaaaggaggatggtcagaaacaacaacccatctccaactcgcgcgcgataggagaaagataatgaagaattaatatctgcacttctttggtgacatgtatattgaattacatatatgtggttggaatgacgatcagacatgtacg

SEQ ID NO: 84466 - DNA, 1465 bp, Zea Mays
gctgcagacaggtcagggcgcctgtctgtctctcatgtcgttcgtcatccagcactgtagtctgacgtacgtacgcgcgctcatcatcgctatctgtaatagctagcagaagaccaccagaagcatctcaatccaataataggtgtacagggggtcaatcttaagatcgatatatactaccacttaatcaactactgccctcgctcggacgattattattatactaacctgtgtctgtgtgagacaagaccaaaaaaaaagaagacaaatgaagaagctacgtagaactcctatcgagaagggaaggggagggatgatgagcaagtagaccggccgatcgagagggaccgaattacagcatgcatgcgcaaaaatatacatggatggatggatggacggaccggctattttgactactacctcctcctatcaagcctatgattgatcgatcgatcgatcgattagctgatgggaacactgacaagtaactttaacccctccggatcaagaaataaaatagctagaggatcggaggatcacatgttacttgtgacgtacgcgaggtggatggatcgtcggaggagtgtatacctacgtacgtggtagctagtatctgcggtacggtggtgggcggtgccgctatctgttcgcgcgctgccgccgctgcgtgttgcttgctcatgcatcatgcacgcgcacgtacgccaaggtagatgcgcgtgctggtgcgcagctgcagcgcaggcgcgcgcaagcaaaatcatcattcagcaggcggcggagtgggtgaaggggttgaagaagcggtgggtggctgcctggggcctgtcgggctcggccttgggcccgccgcgcaggcgctcgcaggacgggcagaggctcagcgtggcggccggcatcggcagctgcatctgcatctgcacgtacaacggcggcggcaccggcaccggcaccggcacgccctgcgtcgcggcggcgggcgacgacgacggcgcctgatgtgggtgcgggccggcgagctgcttgagcgcgcggagctcctgtagctcccgctgcagccgccggttctcctcgctcagcgactcgcagcagcgcttcagcagctcgcagtccacctccgtctgcttcagcttcgtcctgcatatgtgcgcgcgcgcacgttatttgatccaaccaaaaccaagcatatgtactatcgatcgtatcttcttgtgttgtgtgggctcgctggtttattaatttggcttcagttgcttcgccaacgcgattttctgcttctgctcgaagacaaaaaggacacccgccggcagaacggaaagcaaaaggaggatggtcagaaacaacaacccatctccaactcgcgcgcgataggagaaagataatgaagaattaatatctgcacttctttggtgacatgtatattgaattacatatatgtggttggaatgacgatcagacatgtacg

SEQ ID NO: 84467 - DNA, 1708 bp, Zea Mays
actgctagctgggcgtgaagaacttttttttttggcatgaattgcttgcagacccaagaacaacttaggatggccgccgggtgcatgtcatcgagagggatctgacagaacctgacagaattgtgggcgagctgttgcaacctggaggttacttgaaattaattgagttaggcctccaagattgtgtggaagaaattgatgcccaacgtgtgcttggttacgcattattcaaagatggaagaaacacaaagcttgcttatcccttagagaagttccattctgatgttgctggtaggagctttcacaatgggaggtttatacagaggatgcgtcagaaagctgcgtctttgcccaatgttcaattagaacaaggaactgttacatcacttctcgaagaaaatggtactgttaaaggtgttcaatacaaaaccaagtcaggtgaagaactaaaagcttatgcgcccttgacgattgtatgtgatggctgcttttcaaatctacggcgtgccctttgctctccaaaagttgatgttccatcatgttttattgggctggtattggagaattgccaacttccacatccaaaccatggccatgttatcttggccaatccttcgccaatactattttacccaattagcagcacagaggtgcgctgtttggttgatgtcccaggtcagaaggtgccttccatagctagcggtgaaatggcaaattatctcaaaaccgtcgttgcaccccagaaatctatgactctttcatagcggccattgataagggaagcataagaacaatgccaaacaggagcatgccagcggctccacttcctacccctggcgcacttctgatgggggatgccttcaatatgagacaccctttaactggtggaggaatgactgttgcattatccgacatcgttgtcctacgtaatcttctcaagcctctccgcaatctccacgacgcatcttccctgtgcaagtacctcgaatcgttctatacgctgcggaagccggttgcctccaccataaacacgttggccggtgctctgtacaaggtcttcagcgcctcgcctgatcaagctaggaacgagatgcgccaggcctgttttgattacttgagcctcggaggcgtcttctcgaatgggcctattgccttactctcgggtcttaatcctcggccactgagtttagttgcacacttcttcgctgtcgctatctacggtgttggtcgcttgatgctccctcttccttcgcctaaacggatgtggattggagccaggctgatttctggtgcatgcggcatcatcctcccgatcatcaaagctgaaggcgtgagacagatgttcttccctgccactgtgcccgcatattaccgggctgcgcctacgggagaataagtaaagcgagaaccgattccgggctgctgcagtgctgctgatcccaccatgatctgatggcaactgatgtgtcatggatggcatttttttcctgtgttagtggttgttaggtggtttgttgtgctgctgtcattggaatgaggaacctgtatagtgtgcccctgggtactggtcaaagttgggaaatatgttgggtcctaccgtagccatgtcgattactgccaagctgtatatgattctgtcgaactagtgaaacctctccccatctttaacgcgtatcaatcttgtttgctcccccccccgagtacagca

SEQ ID NO: 84468 - DNA, 2164 bp, Zea Mays
ctcctctccagctctcctcccatataaaacgcggaagaatctcgaagagacgcctcgtcccatcgttcctctctctctgccccgcctacgcctcgccccagacgcatcaaaccgctctcctctccctccctgcccccctcgcaaccctgaagaagcccccacacgcaaggccgcaaacgcgccgcgcaccgcaaggtcccagggagcgacacgaggcggcctcattgcagcatggctgctatggccgccgctggcggcgtcgggctccacctcattggcgctgccacggccacgctcatcgtggcggtccttgttgcggccgtgctggggcgccgccgccgggcccgggcccgggcccaggcgcctccggtggaagggaaacccgcgccggaggcaggctgcgcggtcggtgacggcgcgggtcccgacgtcgggacggacgtcatcatcgtcggcgccggagtggctggatctgcgctggcgtacacgctcggaaaggatggccgccgggtgcatgtcatcgagagggatctgacagaacctgacagaattgtgggcgagctgttgcaacctggaggttacttgaaattaattgagttaggcctccaagttttcgttcaattcagattgtgtggaagaaattgatgcccaacgtgtgcttggttacgcattattcaaagatggaagaaacacaaagcttgcttatcccttagagaagttccattctgatgttgctggtaggagctttcacaatgggaggtttatacagaggatgcgtcagaaagctgcgtctttgcccaatgttcaattagaacaaggaactgttacatcacttctcgaagaaaatggtactgttaaaggtgttcaatacaaaaccaagtcaggtgaagaactaaaagcttatgcgcccttgacgattgtatgtgatggctgcttttcaaatctacggcgtgccctttgctctccaaaagttgatgttccatcatgttttattgggctggtattggagaattgccaacttccacatccaaaccatggccatgttatcttggccaatccttcgccaatactattttacccaattagcagcacagaggtgcgctgtttggttgatgtcccaggtcagaaggtgccttccatagctagcggtgaaatggcaaattatctcaaaaccgtcgttgcaccccagattcctccagaaatctatgactctttcatagcggccattgataagggaagcataagaacaatgccaaacaggagcatgccagcggctccacttcctacccctggcgcacttctgatgggggatgccttcaatatgagacaccctttaactggtggaggaatgactgttgcattatccgacatcgttgtcctacgtaatcttctcaagcctctccgcaatctccacgacgcatcttccctgtgcaagtacctcgaatcgttctatacgctgcggaagccggttgcctccaccataaacacgttggccggtgctctgtacaaggtcttcagcgcctcgcctgatcaagctaggaacgagatgcgccaggcctgttttgattacttgagcctcggaggcgtcttctcgaatgggcctattgccttactctcgggtcttaatcctcggccactgagtttagttgcacacttcttcgctgtcgctatctacggtgttggtcgcttgatgctccctcttccttcgcctaaacggatgtggattggagccaggctgatttctggtgcatgcggcatcatcctcccgatcatcaaagctgaaggcgtgagacagatgttcttccctgccactgtgcccgcatattaccgggctgcgcctacgggagaataagtaaagcgagaaccgattccgggctgctgcagtgctgctgatcccaccatgatctgatggcaactgatgtgtcatggatggcatttttttcctgtgttagtggttgttaggtggtttgttgtgctgctgtcattggaatgaggaacctgtatagtgtgcccctgggtactggtcaaagttgggaaatatgttgggtcctaccgtagccatgtcgattactgccaagctgtatatgattctgtcgaactagtgaaacctctccccatctttaacgcgtatcaatcttgtttgctcccccccccgagtacagca

SEQ ID NO: 84469 - DNA, 2191 bp, Zea Mays
gctaggtcttcagtttgcagcaccaactccaatcgatcttcactcttcacccagaacactctttattctgacctctggatgtgatccagctggtgcatggttgttagtagtactagtaccggcaattctgttccacgactggatttccgcttttgcccttgcgtttgcctacttcaccaggcttacttagccttttcactttggacaatctttatgtaaggctgcaagggttaagttgttccttgttgagccttgcaaggaattgaccgtgtccagctctccatctactccaccctttaaaagtaaagatggttcagttggcagacctggcaagttagaaggtcaccactagtcattcccaaaaatgatcgccacatcgcactgagtccaggtaccagagcaggatgatgtattcccctccacgcaccgatcctgacagagaggatgagcagtgcttcgcaattggagctaacctgctttcttcactagatcatactatgaagtttgatgagcctatcgcctttccaatgaacaatgtaggcatgcaagagagggttcagctctacaattctactggagatgctcaactaagtagaaatgcgaacacagggaagtgttcaaagggtggcaaaaggaagagttctggagggatcaattcatcactgcattctctagacgaagccagggcattgttgcagcgagaagtcagcatggagtgtgctgatgagaacgctgctggagccaagagagaggactacgcgcatgtccgggcaaagcgaggccaagccaccaacagccacagccttgcagaaagatttcgaagggaaaagataaatgtaaggatgaagcttcttcaggaccttgtcccgggttgcaacaagattacaggcaaggccatgatgcttgacgagatcataaactatgtgcaatctctgcagcgtcaggttgagttcctttcgatgaagctctcagcgatcagaccagggttcaaccgtgacctcgaactgcaagatgtaagattgcgagatcctttgcacacaagatgccagctccggttttctcggatacagcctgcgagcgagcgatgtgcatcttaatctgtatatagcatctgaagaatgtttctcgcacaggatcatccctaatcctgcaaatgttcatgtgacaagaaacggccagcaatctgcatttcctcagagaggagttatctggaacgaggaacttcgcagcatcgctccaaatgctttcgcttcagataccgttgctggttcaatggaagtggagtgacgagtcggcagtttaatggtaaatcttgacaggtttatggctaaatgtgccacactttgcctaaagttaaggcctgtttggtttgtgactaaatgtgccacactttgactaaggttagtcgttcgaattgaataactaaacttaggcagaaaagttaggcaaagcgtggcaactgaagtagtgaatcaaacatgtcattagtcatccaaattgaataactaaccttaggcaaaaaagttaggcaaagtgtggcaattgaggtaaggaaccaaatatgccctagtctgttgggttgctactggtcaactggtgtgcctttgtaagttgcattggtggcgcggatgagctagtcaactttggtctttggtgcccacacaccatgtacagttataataactaatcaaaggagcagagcacggtgatttttttctcttcttttttgggcgaacttatggacaaaataatgtgcaatgatcgtctggaatttactaaccaagatgtttttttagtgctactaccgagttgcagaatcaaccccacaggcttgtgcgtttgtgtctctctaaagctgcagcgatggtaaaatcttggtttattcgaattgactagaaagaaaatagttaatagaatgtttgccatttggcagtctgtcatataggcttgtaactctgcctatagaagcagcgagacgagtagtagtatgtcagtgttaacactagacctgagattttttggtgctgggttaggatttaggaaagggcccccatatttcgttctggcataaattttactgcaaacccaggcctggtaatgctgggttaggctaactgcaacgctgcccccttgcatggcacctgtagggggcactctacggccgcagcggtgccccctacaaccccctaag

SEQ ID NO: 84470 - DNA, 3919 bp, Zea Mays
ctctagcaaagggctgctgagtaggacggtggaacatctgatggaagaggaacaggaggaggagcagttctcatcgctggtaacaagaaatcttcgtctattatcagtactttgtatgtactgactgtggcgtgctctttgggaacagtttttgcgttcaggataagtacaggtgcatggtaccttatttagtttttttctttctttctttgctgctaccactgcagtatgattttctgtttgaagatagcagattgctttcatctcttcattgagtactctgtcttttcgaacagtccaagcatttctctctgccccacccattctttttgagatatgtctattaactcgttaagcgacattgtcctagtaccgaatgatttctgcactgcatccgagtgttttttttttgcctctcgatatcttgcttggtcttttgcttcagagaaaagggacacgcaccagcatttcttgaccctttcatcttgccgaacttgcttcctaaatcgcctgtggttcttacatcgtcatgctatagaataagatcctgattagtgagttacgatgataatatttgtaaatccatcatttatggttccagcatcaaattttgatgctgggagggacagttcgcgctgttgagttttgagcaatcatctaccttggtggcttggccccaggaatacaaccagctaacttttccgttttctgattactggatcttagtccctaagccgcttcagcggttcccctttgtgattggaaggccagctgttctctttcttgttctgcggatctgattctatggtctctaaattctcgcatttttgttctgtaggcgtgtgtgtgcaagtaagcaattacctaactttgtttaggctctattcgtttagtccggattggaggccggaaccattccaactcatcaagctaatataaatttgtgaactatttcaatccagaaccaatccagtaaagtattccggaagaaccgaacggacacttaggcgttgtacatttgtactcgcaaatatgagaaaagaaaaggagaaattggagttcttatttgtgcccaatcaccagtaactttattaacttgaatttgcattcatcatctatgcaattgtggaatccatttcaccttcttatgctagaactagtctatgcttcaagtaaatccttgaagagttctttatatccttcagcaagaaaattgcatacttccaggctccagcaagtaaaccgagtacttgatgggcccgtttgattgtctagtaattaaccttatcctgggctggcccatacatacagtgcgtggcattagcatctgatccttgggttcgtcgctaggtcttcagtttgcagcaccaactccaatcgatcttcactcttcacccagaacactctttattctgacctctggatgtgatccagctggtgcatggttgttagtagtactagtaccggcaattctgttccacgactggatttccgcttttgcccttgcgtttgcctacttcaccaggcttacttagccttttcactttggacaatctttatgtaaggctgcaagggttaagttgttccttgttgagccttgcaaggaattgaccgtgtccagctctccatctactccaccctttaaaagtaaagatggttcagttggcagacctggcaagttagaaggtcaccactagtcattcccaaaaatgatcgccacatcgcactgagtccaggtaccagagcaggatgatgtattcccctccacgcaccgatcctgacagagaggatgagcagtgcttcgcaattggagctaacctgctttcttcactagatcatactatgaagtttgatgagcctatcgcctttccaatgaacaatgtaggcatgcaagagagggttcagctctacaattctactggagatgctcaactaagtagaaatgcgaacacagggaagtgttcaaagggtggcaaaaggaagagttctggagggatcaattcatcactgcattctctagacgaagccagggcattgttgcagcgagaagtcagcatggagtgtgctgatgagaacgctgctggagccaagagagaggactacgcgcatgtccgggcaaagcgaggccaagccaccaacagccacagccttgcagaaagatttcgaagggaaaagataaatgtaaggatgaagcttcttcaggaccttgtcccgggttgcaacaagattacaggcaaggccatgatgcttgacgagatcataaactatgtgcaatctctgcagcgtcaggttgagttcctttcgatgaagctctcagcgatcagaccagggttcaaccgtgacctcgaactgcaagatgtaagattgcgaggttcgttcgactcgggctgacaaaagacaaggctgtttgtttcggcttctggcagcttctggccatcaaaagctgctgcggactgccaaacgctcagcttttcagtcagcttctataaaattcgttggagcaaaaaccatccaaaatcaacataaacacacaatcggttgagtcgttgtaatagtaggaatccgtcactttctagatcctgagccctatgaacaactttatcttcctccacacgtaatcgtaatgatactcagattctccccaaagccagattctccccacagccagattttcagaaaagctggttagaaaaaagctgaaccaaacagaccatgcctgtagattaatctttcgtcaatccttgtcacccgcagatcctttgcacacaagatgccagctccggttttctcggatacagcctgcgagcgagcgatgtgcatcttaatctgtatatagcatctgaagaatgtttctcgcacaggatcatccctaatcctgcaaatgttcatgtgacaagaaacggccagcaatctgcatttcctcagagaggagttatctggaacgaggaacttcgcagcatcgctccaaatgctttcgcttcagataccgttgctggttcaatggaagtggagtgacgagtcggcagtttaatggtaaatcttgacaggtttatggctaaatgtgccacactttgcctaaagttaaggcctgtttggtttgtgactaaatgtgccacactttgactaaggttagtcgttcgaattgaataactaaacttaggcagaaaagttaggcaaagcgtggcaactgaagtagtgaatcaaacatgtcattagtcatccaaattgaataactaaccttaggcaaaaaagttaggcaaagtgtggcaattgaggtaaggaaccaaatatgccctagtctgttgggttgctactggtcaactggtgtgcctttgtaagttgcattggtggcgcggatgagctagtcaactttggtctttggtgcccacacaccatgtacagttataataactaatcaaaggagcagagcacggtgatttttttctcttcttttttgggcgaacttatggacaaaataatgtgcaatgatcgtctggaatttactaaccaagatgtttttttagtgctactaccgagttgcagaatcaaccccacaggcttgtgcgtttgtgtctctctaaagctgcagcgatggtaaaatcttggtttattcgaattgactagaaagaaaatagttaatagaatgtttgccatttggcagtctgtcatataggcttgtaactctgcctatagaagcagcgagacgagtagtagtatgtcagtgttaacactagacctgagattttttggtgctgggttaggatttaggaaagggcccccatatttcgttctggcataaattttactgcaaacccaggcctggtaatgctgggttaggctaactgcaacgctgcccccttgcatggcacctgtagggggcactctacggccgcagcggtgccccctacaaccccctaag

SEQ ID NO: 84471 - DNA, 2561 bp, Zea Mays
ccgccgggccttctcatctgttcacttggtacttggtagctctcccatttgtagtggcagcactggactagtcgtgttcaagcgcaccacaaaaggagagcgagctcgagagtaacaagggcttgcgtgtgcatggttgataggggaaatggctaatggcagcaactggctaggcttctccctctccccgcatacggccatggaggtgccctccgtttctgaacccgcttctacccatcacgctccacctccaccttcttccagtaccacgatctcctcttccagtaccaacaacaccatcagttccaacttcctcttctcaccgatggcctctccctatcctggttactactgtgtgggcggcgcgtatggcgatggcaccagtgctgccggcgtctactactcccacttgcctgctatgcccaacaagtccgacgacggcaccctctgcaacatggaaggcatggtgccgtcgtccccaccgaagctagaggacttcttgggtggtggcaatggcggtgggcaagaaacggccacctactacagccaccagcagcagggccaggaagagggggcaagcagggattaccgccagtaccactaccaacaccagcagctcgtcccctacaacttccagcccctgacggaagcagagatgctccaagaaggcgcagcgccaatggaggaggcgatggcggcggccaagaacttcctcctggcgagctacggcgcttgctacagcaacgaggagacgcgccctctgagcctgtcgatgatgagccccgggactcagctgagcagctgcgtgagcgcggccccgcagcagcagcaccagatggccgctactgtagccaccgctgccactgcggccgcagccctggggcgcagtaatggcgatggtgagcagtgcgttgggcggaagaggagcaccgggaagggaggccacaagcagaccgtgcaccgcaagtccatcgacacgtttgggcagagaacctcccggtataggggcgtcaccaggcacaggtggactgggagatacgaagcccacctctgggacaacagctgcaggaaggatgggcagactagaaaaggcagacaagtatatctaggtggttacgacaccgaagacaaggccgcgagggcttatgatctggctgctctgaaatactggggtccagctactcacgtcaatttccccgtagaaaactaccgagatgagctcgaggagatgaaaggcatgacaaggcaagaattcgttgcgcatctgagaaggagaagcagcggattttctcgaggtgcttccatctaccgaggggtgacaaggcaccaccagcaaggaagatggcagtctcggattggaagagtcgctggaaacaaggatctatacctcggcactttcacaactcaagaagaagcagccgaggcgtacgacatagcggccatcaagttccgcggcctgaacgcggtgacgaacttcgacatagcaagatacgacgtggacaagatcatggagagcagcacgctgctggccgtggaggaagcgcgcaaggtcaaggcggtcgaggcagcgagcagtgctcctatgacgcacacgcacagcggtggcaaggagcagctcaacgctaccaccgccgaggagacaagcagcgcgggctggaggatggtactccatggttctccccaccagctggaagccgcgcgttgcccagaagcagctgatctccagagcgcaatcatgaacaacgactctcatcctcgtccatccctgcatggcatcgctggactcgacatcgagtgcgcggtgcatgatcaccacgaccacctcgacgttcctgctggcagcaggacgacggctgctgggagcatcaacttctcgaactcgtcctcgcaggtgacaagcctgggaaactccagggaggggagccccgagaggctgggcttggccatgatgtacggcaagcagccgagcagcgctgtaagcctggcggccaccatgagcccctggacgccggtggcggcgcaaacagtggcacacgtgctgaagcagcagccgaacgtcgtcgtttctcatcgacctgtctttgccgcctgggcggatgcctagctacccgagggagttggagcttagtagccgctcgatcgatcttgctcgccattgctggttttttttttggtagactggagcaagattggcagcaccaggttaggtcaactagctggaatagcaaggctcgttagttagcacgatggctggtgtaatgctatgcatgcactgcagtagaagataggccttaatcagtctacagcttatgcacaatctcagtagtgctgctgctagctggtggtagctagcgttgttttgagccccttttgggtgacagattggttagaatgtagcatggcttcctttgaagaacgttgcatgaaacaaggccgttgcgagagagagagaaggaaaaggttcacgaaatgagatggctcgtctttgtttgtacgggccattcaggtctcgtcagtgggacctgcctttggctatgcgcacagatgaagatcttttgacc

SEQ ID NO: 84472 - DNA, 2564 bp, Zea Mays
ccgccgggccttctcatctgttcacttggtacttggtagctctcccatttgtagtggcagcactggactagtcgtgttcaagcgcaccacaaaaggagagcgagctcgagagtaacaagggcttgcgtgtgcatggttgataggggaaatggctaatggcagcaactggctaggcttctccctctccccgcatacggccatggaggtgccctccgtttctgaacccgcttctacccatcacgctccacctccaccttcttccagtaccacgatctcctcttccagtaccaacaacaccatcagttccaacttcctcttctcaccgatggcctctccctatcctggttactactgtgtgggcggcgcgtatggcgatggcaccagtgctgccggcgtctactactcccacttgcctgctatgcccaacaagtccgacgacggcaccctctgcaacatggaaggcatggtgccgtcgtccccaccgaagctagaggacttcttgggtggtggcaatggcggtgggcaagaaacggccacctactacagccaccagcagcagggccaggaagagggggcaagcagggattaccgccagtaccactaccaacaccagcagctcgtcccctacaacttccagcccctgacggaagcagagatgctccaagaaggcgcagcgccaatggaggaggcgatggcggcggccaagaacttcctcctggcgagctacggcgcttgctacagcaacgaggagacgcgccctctgagcctgtcgatgatgagccccgggactcagctgagcagctgcgtgagcgcggccccgcagcagcagcaccagatggccgctactgtagccaccgctgccactgcggccgcagccctggggcgcagtaatggcgatggtgagcagtgcgttgggcggaagaggagcaccgggaagggaggccacaagcagaccgtgcaccgcaagtccatcgacacgtttgggcagagaacctcccggtataggggcgtcaccagcaggcacaggtggactgggagatacgaagcccacctctgggacaacagctgcaggaaggatgggcagactagaaaaggcagacaagtatatctaggtggttacgacaccgaagacaaggccgcgagggcttatgatctggctgctctgaaatactggggtccagctactcacgtcaatttccccgtagaaaactaccgagatgagctcgaggagatgaaaggcatgacaaggcaagaattcgttgcgcatctgagaaggagaagcagcggattttctcgaggtgcttccatctaccgaggggtgacaaggcaccaccagcaaggaagatggcagtctcggattggaagagtcgctggaaacaaggatctatacctcggcactttcacaactcaagaagaagcagccgaggcgtacgacatagcggccatcaagttccgcggcctgaacgcggtgacgaacttcgacatagcaagatacgacgtggacaagatcatggagagcagcacgctgctggccgtggaggaagcgcgcaaggtcaaggcggtcgaggcagcgagcagtgctcctatgacgcacacgcacagcggtggcaaggagcagctcaacgctaccaccgccgaggagacaagcagcgcgggctggaggatggtactccatggttctccccaccagctggaagccgcgcgttgcccagaagcagctgatctccagagcgcaatcatgaacaacgactctcatcctcgtccatccctgcatggcatcgctggactcgacatcgagtgcgcggtgcatgatcaccacgaccacctcgacgttcctgctggcagcaggacgacggctgctgggagcatcaacttctcgaactcgtcctcgcaggtgacaagcctgggaaactccagggaggggagccccgagaggctgggcttggccatgatgtacggcaagcagccgagcagcgctgtaagcctggcggccaccatgagcccctggacgccggtggcggcgcaaacagtggcacacgtgctgaagcagcagccgaacgtcgtcgtttctcatcgacctgtctttgccgcctgggcggatgcctagctacccgagggagttggagcttagtagccgctcgatcgatcttgctcgccattgctggttttttttttggtagactggagcaagattggcagcaccaggttaggtcaactagctggaatagcaaggctcgttagttagcacgatggctggtgtaatgctatgcatgcactgcagtagaagataggccttaatcagtctacagcttatgcacaatctcagtagtgctgctgctagctggtggtagctagcgttgttttgagccccttttgggtgacagattggttagaatgtagcatggcttcctttgaagaacgttgcatgaaacaaggccgttgcgagagagagagaaggaaaaggttcacgaaatgagatggctcgtctttgtttgtacgggccattcaggtctcgtcagtgggacctgcctttggctatgcgcacagatgaagatcttttgacc

SEQ ID NO: 84473 - DNA, 1753 bp, Zea Mays
tcgcccctgattacaagacgtgcatcggatagtcaattctgacgtccccgtgttgtcactgttcacacggtacatttcatagggaaagagcaggcaaagatcgaacagccgttgctggtgagctgggaaggcgcagttgttcaacagaatccttttcctcgagcagtatcggtggcctgctctaaggcttcagtcgtcgacgtcgatccaagtgtcaggacccatggttctcgctcctgcgctcctcgtcgtggcggcgctcctggcccagccgctcgggagccgttccggcgacgacgccggggccgcgaacctgcacccggtcgtgctcgtgccgggctacggctccaaccagctggaggcgatgctgacggcggcgtacgagcccccggcgcctgcctgtgccggctccgcggaccagggttggttccctctctggccaaaccacacggcgatgcgcgacgctagccaggtcccctgcttcgccgaccagatgagcctcgtctacgacgccggcgccgacgactaccgcaacgccgacggcgtcgctacccggaccccgttcttcggctcggcgcgcgccctcatcgggtgggacaggctggtgcagcagctggaaggcatgggctaccgcgacggcgagaccctccacgccgcgccgtacgacttccgctacgccgtggcgcctcccggccacccgtccgcggtgggggaccgctacttccgcgacctcgggcgcctcatccaggagagccgcctcatccatggccgcccggccatcgtggtcgcgcacagcttcggctgcgcgctcacctaccagctcctcctgtcccgcccgctcccctggcgccgccgctacgtgaagcacgtcgtcctcctgggccccgcgctcggcgggttcgcgcatgggatgcgcctcctcagcgccggcatggactacggcctcccgaacgtcccgcggccggcgatgctccggatggcgcggacccagcagagcgccctgtggcgcctgcccacgccgctcgtcttcggggaccggccgctggcgatgaccagcgccgcggcctactcggcgcgcaacgtgtcggcgttcctcgaggccatcggtttccaggaaggcgtgcggccgtacctgacgcgggtgctgccgatgtgggaggcgctgccgccgccgatggtgccggtcaccagcgtcgtcgggttcggcgtcagcacgcccgagacgtacgtgttcggggccgacgggctcgagggggaggccgaggtgctgtacggcgacggcgacggggagatcaacatggtgagcctggcggctgtcgagagatggtcggaggtggaaggccaggtcctgaaggtcgttaggctgcgcggcgtccatcacgacggtttcttcagcatcgatttcgcgttgaatagcacacttgctgagatatcggaggcaggagaaagcgtcattgaacagatcggcattgtatcgtgtcagcagaaatgcagtgattactgagaatttggtggacgggtcctaaaacgtgtcctgcctcacgattgactgattgagaataaaaatggtaggtgatgctagtgcgaattgtattagtgcaccgcacccttgcgctgagagcaacagagtcaagagaggcatcaaaatggaagatacgaaatgtgttttgtgcagccgacaaactgaaaatggggatcatttatttttaaaatgcaaatatgtcaaaatgatatggcgagaaacggggactcg

SEQ ID NO: 84474 - DNA, 1202 bp, Zea Mays
cgaagacctgaagaggcaccagtgcatatcggaataattaggcgtcccgagaatgtgaagagaggtagaggtcgaccaaccttgacgtggacagaggctgtgaaaagggacctgaaggagtggaatattgataaagagctcgacgtggataggaaggggtggaagtgtgcaattcacgtgccagaaccctgatctgtagtttcgcttttcctccttaattgtttgaccttttcttgtgcccctttagatcttgctggttcttgtgggttttatttctttttatgtgtttccccgtttcgtcgtttttcggttctcctttgcctttgtctcccttttcttttctttgggggttgagctctgaggttttcatatgggtttcatctctagcctaccccaacgtgcttgggacaaaaaggctttgttgttgttgttgttgttgttgtgttgcatgcttatcctaatcaggagaaattaagcatacaccattaagaccagctacccatatgcttctgccaagctgtgcaatatactaaaagtaaaatactagaatcattcacaccactagcaactaattttatgtggtaaatttaaatggttgtctctaatcaagagaaaatagatttgcaaattacaaatatcttattcttgcgaaaaaagatcagtcaatgctaagactaaggtactgaaatatattatatatatgaccgatattgacacaagaacatctcacaggcaattcacttatcaatcctacattatatgcttgtggtttagatataaagactgacatcataacatgtgcgcttggtaatagttaactcaatatgtctaagtctgaatattcgataaacaacaaccttataacccgtgcatgaattgccttccagattttgatacaaggaggtctaccagattatttgaatgaaacatcctctaactagatatatgaaattgcgaccacgctatgtagaagtatagaacagctagtctaaattataatgatgatataaaggagaaaaactaggggatcaagaatatattgttgtatggtcaaggccaaaagaacaatcaagtggaaaacttcatcaaacaaagaatgttaagattgggtctaatcaactacaggaattaggaatggaagaagtaaagatgaagaagcatatatcttaccagaatgcttgtccacatatacatgcaaccag

SEQ ID NO: 84475 - DNA, 933 bp, Zea Mays
aaatgcctttcggtatagtgtcaggagatgtttctccaagcatatgacctctagctcgagcactgcgatctccttgattagctcctcagtcggctgagatggcatggaagaaagaaagaaagaggctatgtgttaagtgaaaactcttgtcttcggaagaaaacatatcatgatgaggaagtgaaacaccacaatatcatgttcacacttgatgcatgaacagcacaaggcttgtaacctagtgctttctcaagagcacggcgcatgacgaattgatcatccagtcgcttttcaaggactcggacctgcagaactagcatgcgtcacggtgggggacgagactccccccacctgattggattgcactggagggcaataacaaatgttttactcaacagcgtttacagcaacatgagggattgtgataggcatgcagcagtgagtaagcaatatctggtgcctaggtatgagctcttttaccatccttgagagcacccaagaggtatcacaaactatattgacattcttatacggacacatggcatttagggaagaaaacacgacaaagtaaatagatggtaaccacctctgaaacaactagctcagacaggtctggaatgaacaataacctatggctaagtgaggatctggtatctgatttcacctcacgcttcaaggagcatggaagctcagaagcactggacggcatcttgctggtgctagtctggtcctcgagttctccggcatccttccgttcaacagatattgtacaagagcccagcagcataacaaaaaaaaaaaaaatctgatcaggatatgtaccagatattttcaagaaactgaagaagcaagtggcggtctcgcattttcagcaaccgcagacgcggagttacctgtcgatactgaccgtggtggcacctcggtgaagacgag

SEQ ID NO: 84476 - DNA, 1198 bp, Zea Mays
cgagctgctctatccgtgctggttctctcgagcgcctctccggtctccactcctccctctctctctgatccttaaacccgattcgccagcttcgtcgtcgccgaccaggccgacgtcgggcccggcgcgctgctgttggactgcctcagcccgcgctaccacggcacccgggcggcggtgagcgcgcatgcaggcacgcacactacgccgtcgtcgacctcgcgctcgacacgctcgccgccgcacgctccttcggagtggaggagctcctgctgctcacccaggtaaccataccagaccaaccaattcaagcgtctccctcctccctcccaactacaatccttgacatgctggtttcttctcgaggtaatcctattcttcctcctctcatctggatgaaagataaataagaaataaataaataaataaaatggacaaaacggttgggaaaacaacatcgatttcttgcttccagtttattttttatgtctgctacttgagggaattgtccatgtttatgatctcgtggcagtttgccattgatgcttgttgctgtagtacatggacaaatctcgaagagggaagcattcgattcgaccaaaggcttaggcaaactgtgccactgtcatcagacggtcagagtgtgtgaagtggagggatgttatcgttccctatggcaagccagtgccatcatcagttacgagctctgaactcctgcacaatcactacaacgtctacaacgcatcccaggtccatcgtatgaactgcagaaaaggatttaccttcctggcaacccacaagtacctgggtttatccttcttaatctgagttattaaaacctgaccgagtttgggcgcctccccgcactccacggagcttcagccagcgcgcgtgcgacccttggcgactgctcaaattgggcaaacttttagaaatgaggtttgtgttttctatcacatttctacaaatggctactactaattgctgtgttatatgacattccactcaattatggcatgtctcggtcgctgcttattcagtgcctcaaaggttaaaacttactgacaatttttttctttccaatttgatatattccttttgttcttttgtttatatatgcttgttaccctggatggaattgtaagctattacactactgctatttacagagaactgttaataatgagacacttggtca

SEQ ID NO: 84477 - DNA, 930 bp, Zea Mays
cgagctgctctatccgtgctggttctctcgagcgcctctccggtctccactcctccctctctctctgatccttaaacccgattcgccagcttcgtcgtcgccgaccaggccgacgtcgggcccggcgcgctgctgttggactgcctcagcccgcgctaccagtccggcggcacccgggcggcggtgagcgcgcatgcaggcacgcacactacgccgtcgtcgacctcgcgctcgacacgctcgccgccgcacgctccttcggagtggaggagctcctgctgctcacccagtacatggacaaatctcgaagagggaagcattcgattcgaccaaaggcttaggcaaactgtgccactgtcatcagacggtcagagtgtgtgaagtggagggatgttatcgttccctatggcaagccagtgccatcatcagttacgagctctgaactcctgcacaatcactacaacgtctacaacgcatcccaggtccatcgtatgaactgcagaaaaggatttaccttcctggcaacccacaagtacctgggtttatccttcttaatctgagttattaaaacctgaccgagtttgggcgcctccccgcactccacggagcttcagccagcgcgcgtgcgacccttggcgactgctcaaattgggcaaacttttagaaatgaggtttgtgttttctatcacatttctacaaatggctactactaattgctgtgttatatgacattccactcaattatggcatgtctcggtcgctgcttattcagtgcctcaaaggttaaaacttactgacaatttttttctttccaatttgatatattccttttgttcttttgtttatatatgcttgttaccctggatggaattgtaagctattacactactgctatttacagagaactgttaataatgagacacttggtca

SEQ ID NO: 84478 - DNA, 1103 bp, Zea Mays
cgagctgctctatccgtgctggttctctcgagcgcctctccggtctccactcctccctctctctctgatccttaaacccgattcgccagcttcgtcgtcgccgaccaggccgacgtcgggcccggcgcgctgctgttggactgcctcagcccgcgctaccagtccggcggcacccgggcggcggtgagcgcgcatgcaggcacgcacactacgccgtcgtcgacctcgcgctcgacacgctcgccgccgcacgctccttcggagtggaggagctcctgctgctcacccaggtaaccataccagaccaaccaattcaagcgtctccctcctccctcccaactacaatccttgacatgctggtttcttctcgaggtaatcctattcttcctcctctcatctggatgaaagataaataagaaataaataaataaataaaatggacaaaacggttgggaaaacaacatcgatttcttgcttccagtttattttttatgtctgctacttgagggaattgtccatgtttatgatctcgtggcagtttgccattgatgcttgttgctgtagtacatggacaaatctcgaagagggaagcattcgattcgaccaaaggcttaggcaaactgtgccactgtcatcagacggtcagagtgtgtgaagtggagggatgttatcgttccctatggcaagccagtgccatcatcagttacgagctctgaactcctgcacaatcactacaacgtctacaacgcatcccaggtccatcgtatgaactgcagaaaaggatttaccttcctggcaacccacaagtacctgggtttatccttcttaatctgagttattaaaacctgaccgagtttgggcgcctccccgcactccacggagcttcagccagcgcgcgtgcgacccttggcgactgctcaaattgggcaaacttttagaaatgagtgcctcaaaggttaaaacttactgacaatttttttctttccaatttgatatattccttttgttcttttgtttatatatgcttgttaccctggatggaattgtaagctattacactactgctatttacagagaactgttaataatgagacacttggtca

SEQ ID NO: 84479 - DNA, 985 bp, Zea Mays
cgtcttgtatcagtccggggttcttattttatgaggtcctaacgtggaagaaattgttcagcatgatccagaatatgcacaagtcaaatctacaaacacattgcttggtccatcagaactgattgagatgtgcttgaggagagaccgagagctctcccttaaagcctttgaagtatttgctttgacaagctcatcgttccgaagttccaacagaggccttctagaggcatgctggatgaatgcaactgaccaagatgattgggtaaagctttcagaggcatccatgtcagaaggttggagtgacgaggtcatcgaagaatctcttcaagcaactgtcctcttcaaagcttccaggttgtgttacagcccggatgctgtggtgtatgacggcacctttgaggatgttctgcctgtgaagaaagaggatgtacatctgagaggtttggagagtaaatgtttgtcagttgaagaagtgttgatgcagcacgaggattttccagatgctggtaaattgatgatgactgcagtgattaggggcaaggaaccaatttttacagccacagaacccgtggagatggactcatgaatacccgttttagatttctatatgatagactgccaccatatcgcagtcatttcattgtaattcatccatcgggtagtttcatcatcgtaaaaatcttgtcttagcgacaaggggtctgtactctgtagttttggttgtttctgttctgcgcagtcacagaaacttgattccgtagcacaagaatcagttcacgccgggttttagcatgagctatatcttctaatggttagtttggaaattagcaggaaatttgctcatttttctcgcagggaatcctggggatttaaatttccaaactagcttttgagtttttttaaggaaaatgccttctgtgttaatcagcttagagtaaagtacatttctggttctggtagaggtgtcaattctgcctataaattt

SEQ ID NO: 84480 - DNA, 1501 bp, Zea Mays
tgcacttggctggcgctcaggacttccacaccctctcaaagcgcataaaaatagtggagccacagaaggagtcaagaaatggtgcggacaagccagatctgaaggaatctatacttagagaggttatttctcctattttagcgacagccaaacgacatgaagggtaccaaacactgtggcagatttgctatgatctagatgattcagtttctttgtctttaaggagttagtcaacagaggagactactctaatctgttaaggctaggtgaagaattccaggaagagcttgcaagctttctgaaagagcggagtgatctgctgtgggttcatgagatatgcttaaaccagttctcatctgcttccgacacccttcatacctatgctctgcgtcgtagtcctgatggagatgccagcttcacaaccagcagaaagccactatcctttgctgaaagaagacgtcttctttatctctctaaaattgctgcaacagcaggtaaggacattgattatgaagtgaaggttgcacggatagaagcggacattcggattctaaaactgcaggaagaaattgttcagcatgatccagaatatgcacaagtcaaatctacaaacacattgcttggtccatcagaactgattgagatgtgcttgaggagagaccgagagctctcccttaaagcctttgaagtatttgctttgacaagctcatcgttccgaagttccaacagaggccttctagaggcatgctggatgaatgcaactgaccaagatgattgggtaaagctttcagaggcatccatgtcagaaggttggagtgacgaggtcatcgaagaatctcttcaagcaactgtcctcttcaaagcttccaggttgtgttacagcccggatgctgtggtgtatgacggcacctttgaggatgttctgcctgtgaagaaagaggatgtacatctgagaggtttggagagtaaatgtttgtcagttgaagaagtgttgatgcagcacgaggattttccagatgctggtaaattgatgatgactgcagtgattaggggcaaggaaccaatttttacagccacagaacccgtggagatggactcatgaatacccgttttagatttctatatgatagactgccaccatatcgcagtcatttcattgtaattcatccatcgggtagtttcatcatcgtaaaaatcttgtcttagcgacaaggggtctgtactctgtagttttggttgtttctgttctgcgcagtcacagaaacttgattccgtagcacaagaatcagttcacgccgggttttagcatgagctatatcttctaatggttagtttggaaattagcaggaaatttgctcatttttctcgcagggaatcctggggatttaaatttccaaactagcttttgagtttttttaaggaaaatgccttctgtgttaatcagcttagagtaaagtacatttctggttctggtagaggtgtcaattctgcctataaattt

SEQ ID NO: 84481 - DNA, 1592 bp, Zea Mays
cttcatcaggcgatcagcagtccaacaacgatcttgcaaaaccagccacatgaagaatttgcacttggctggcgctcaggacttccacaccctctcaaagcgcataaaaatagtggagccacagaaggagtcaagaaatggtgcggacaagccagatctgaaggaatctatacttagagaggttatttctcctattttagcgacagccaaacgacatgaagggtaccaaacactgtggcagatttgctatgatctagatgattcagcatgatagcgtagggcctcatgggggattcagtttctttgtctttaaggagttagtcaacagaggagactactctaatctgttaaggctaggtgaagaattccaggaagagcttgcaagctttctgaaagagcggagtgatctgctgtgggttcatgagatatgcttaaaccagttctcatctgcttccgacacccttcatacctatgctctgcgtcgtagtcctgatggagatgccagcttcacaaccagcagaaagccactatcctttgctgaaagaagacgtcttctttatctctctaaaattgctgcaacagcaggtaaggacattgattatgaagtgaaggttgcacggatagaagcggacattcggattctaaaactgcaggaagaaattgttcagcatgatccagaatatgcacaagtcaaatctacaaacacattgcttggtccatcagaactgattgagatgtgcttgaggagagaccgagagctctcccttaaagcctttgaagtatttgctttgacaagctcatcgttccgaagttccaacagaggccttctagaggcatgctggatgaatgcaactgaccaagatgattgggtaaagctttcagaggcatccatgtcagaaggttggagtgacgaggtcatcgaagaatctcttcaagcaactgtcctcttcaaagcttccaggttgtgttacagcccggatgctgtggtgtatgacggcacctttgaggatgttctgcctgtgaagaaagaggatgtacatctgagaggtttggagagtaaatgtttgtcagttgaagaagtgttgatgcagcacgaggattttccagatgctggtaaattgatgatgactgcagtgattaggggcaaggaaccaatttttacagccacagaacccgtggagatggactcatgaatacccgttttagatttctatatgatagactgccaccatatcgcagtcatttcattgtaattcatccatcgggtagtttcatcatcgtaaaaatcttgtcttagcgacaaggggtctgtactctgtagttttggttgtttctgttctgcgcagtcacagaaacttgattccgtagcacaagaatcagttcacgccgggttttagcatgagctatatcttctaatggttagtttggaaattagcaggaaatttgctcatttttctcgcagggaatcctggggatttaaatttccaaactagcttttgagtttttttaaggaaaatgccttctgtgttaatcagcttagagtaaagtacatttctggttctggtagaggtgtcaattctgcctataaattt

SEQ ID NO: 84482 - DNA, 1649 bp, Zea Mays
cacaaagcaggcaagctgtaggatgggggagtcccctcttcatcaggcgatcagcagtccaacaacgatcttgcaaaaccagccacatgaagaatttgcacttggctggcgctcaggacttccacaccctctcaaagcgcataaaaatagtggagccacagaaggagtcaagaaatggtgcggacaagccagatctgaaggaatctatacttagagaggttatttctcctattttagcgacagccaaacgacatgaagggtaccaaacactgtggcagatttgctatgatctagatgattcaggtctcctccgcagcctaatgcatgatagcgtagggcctcatgggggattcagtttctttgtctttaaggagttagtcaacagaggagactactctaatctgttaaggctaggtgaagaattccaggaagagcttgcaagctttctgaaagagcggagtgatctgctgtgggttcatgagatatgcttaaaccagttctcatctgcttccgacacccttcatacctatgctctgcgtcgtagtcctgatggagatgccagcttcacaaccagcagaaagccactatcctttgctgaaagaagacgtcttctttatctctctaaaattgctgcaacagcaggtaaggacattgattatgaagtgaaggttgcacggatagaagcggacattcggattctaaaactgcaggaagaaattgttcagcatgatccagaatatgcacaagtcaaatctacaaacacattgcttggtccatcagaactgattgagatgtgcttgaggagagaccgagagctctcccttaaagcctttgaagtatttgctttgacaagctcatcgttccgaagttccaacagaggccttctagaggcatgctggatgaatgcaactgaccaagatgattgggtaaagctttcagaggcatccatgtcagaaggttggagtgacgaggtcatcgaagaatctcttcaagcaactgtcctcttcaaagcttccaggttgtgttacagcccggatgctgtggtgtatgacggcacctttgaggatgttctgcctgtgaagaaagaggatgtacatctgagaggtttggagagtaaatgtttgtcagttgaagaagtgttgatgcagcacgaggattttccagatgctggtaaattgatgatgactgcagtgattaggggcaaggaaccaatttttacagccacagaacccgtggagatggactcatgaatacccgttttagatttctatatgatagactgccaccatatcgcagtcatttcattgtaattcatccatcgggtagtttcatcatcgtaaaaatcttgtcttagcgacaaggggtctgtactctgtagttttggttgtttctgttctgcgcagtcacagaaacttgattccgtagcacaagaatcagttcacgccgggttttagcatgagctatatcttctaatggttagtttggaaattagcaggaaatttgctcatttttctcgcagggaatcctggggatttaaatttccaaactagcttttgagtttttttaaggaaaatgccttctgtgttaatcagcttagagtaaagtacatttctggttctggtagaggtgtcaattctgcctataaattt

SEQ ID NO: 84483 - DNA, 2178 bp, Zea Mays
cagcaatgctaactgtcatggagcatggtgaaaagctctctggaatggcacaccttagggagttacaaaacacacttattcagcatggctcaagcacccatttttcacctcagtcgaaaacccaaggtactggtgccctttggaaccttattcagttggttggtgagaaagctcgaagaaacatggttcttttaatggatcgtgataatgctgaagtgttctacagtagggtttctgatatagaggatctattttattgtttatctcatgaacttcaatacatcattagtagagaagaacacccttctgttcagatgcaacgtgcacttgagttagcaaatgcttgtatcaccatagttcaggcagcatcacactacaagaaggatcacaaggaatggtatccatctcctgaaggactgataacatggaacagccaacctgttctacggtctggaatctggaatttggcatccttgattatggagcttttgggagaatcaggagctgcagacatgtcaatgaaatccagtctatggtctcagctggaaggacttacagatattctactggaggcatatatgtgccttttaactgcccaatttgaacgtgggcaggaacatggtgtgctagtgcaagaatattgtgaacgaagagatgaacttctcagatccctctacaaccttgctaaacaaatagtggaggccaaataccaggagtcaagaaatggtgcggacaagccagatctgaaggaatctatacttagagaggttatttctcctattttagcgacagccaaacgacatgaagggtaccaaacactgtggcagatttgctatgatctagatgattcagcatgatagcgtagggcctcatgggggattcagtttctttgtctttaaggagttagtcaacagaggagactactctaatctgttaaggctaggtgaagaattccaggaagagcttgcaagctttctgaaagagcggagtgatctgctgtgggttcatgagatatgcttaaaccagttctcatctgcttccgacacccttcatacctatgctctgcgtcgtagtcctgatggagatgccagcttcacaaccagcagaaagccactatcctttgctgaaagaagacgtcttctttatctctctaaaattgctgcaacagcaggtaaggacattgattatgaagtgaaggttgcacggatagaagcggacattcggattctaaaactgcaggaagaaattgttcagcatgatccagaatatgcacaagtcaaatctacaaacacattgcttggtccatcagaactgattgagatgtgcttgaggagagaccgagagctctcccttaaagcctttgaagtatttgctttgacaagctcatcgttccgaagttccaacagaggccttctagaggcatgctggatgaatgcaactgaccaagatgattgggtaaagctttcagaggcatccatgtcagaaggttggagtgacgaggtcatcgaagaatctcttcaagcaactgtcctcttcaaagcttccaggttgtgttacagcccggatgctgtggtgtatgacggcacctttgaggatgttctgcctgtgaagaaagaggatgtacatctgagaggtttggagagtaaatgtttgtcagttgaagaagtgttgatgcagcacgaggattttccagatgctggtaaattgatgatgactgcagtgattaggggcaaggaaccaatttttacagccacagaacccgtggagatggactcatgaatacccgttttagatttctatatgatagactgccaccatatcgcagtcatttcattgtaattcatccatcgggtagtttcatcatcgtaaaaatcttgtcttagcgacaaggggtctgtactctgtagttttggttgtttctgttctgcgcagtcacagaaacttgattccgtagcacaagaatcagttcacgccgggttttagcatgagctatatcttctaatggttagtttggaaattagcaggaaatttgctcatttttctcgcagggaatcctggggatttaaatttccaaactagcttttgagtttttttaaggaaaatgccttctgtgttaatcagcttagagtaaagtacatttctggttctggtagaggtgtcaattctgcctataaattt

SEQ ID NO: 84484 - DNA, 2292 bp, Zea Mays
tgcagagttggatgatgccataggaccttgttgctggcgaggttgatgtcgacttgctcttggtcatgacgcttgctaatagatggaagaggagcagcaatgctaactgtcatggagcatggtgaaaagctctctggaatggcacaccttagggagttacaaaacacacttattcagcatggctcaagcacccatttttcacctcagtcgaaaacccaaggtactggtgccctttggaaccttattcagttggttggtgagaaagctcgaagaaacatggttcttttaatggatcgtgataatgctgaagtgttctacagtagggtttctgatatagaggatctattttattgtttatctcatgaacttcaatacatcattagtagagaagaacacccttctgttcagatgcaacgtgcacttgagttagcaaatgcttgtatcaccatagttcaggcagcatcacactacaagaaggatcacaaggaatggtatccatctcctgaaggactgataacatggaacagccaacctgttctacggtctggaatctggaatttggcatccttgattatggagcttttgggagaatcaggagctgcagacatgtcaatgaaatccagtctatggtctcagctggaaggacttacagatattctactggaggcatatatgtgccttttaactgcccaatttgaacgtgggcaggaacatggtgtgctagtgcaagaatattgtgaacgaagagatgaacttctcagatccctctacaaccttgctaaacaaatagtggaggccaaataccaggagtcaagaaatggtgcggacaagccagatctgaaggaatctatacttagagaggttatttctcctattttagcgacagccaaacgacatgaagggtaccaaacactgtggcagatttgctatgatctagatgattcaggtctcctccgcagcctaatgcatgatagcgtagggcctcatgggggattcagtttctttgtctttaaggagttagtcaacagaggagactactctaatctgttaaggctaggtgaagaattccaggaagagcttgcaagctttctgaaagagcggagtgatctgctgtgggttcatgagatatgcttaaaccagttctcatctgcttccgacacccttcatacctatgctctgcgtcgtagtcctgatggagatgccagcttcacaaccagcagaaagccactatcctttgctgaaagaagacgtcttctttatctctctaaaattgctgcaacagcaggtaaggacattgattatgaagtgaaggttgcacggatagaagcggacattcggattctaaaactgcaggaagaaattgttcagcatgatccagaatatgcacaagtcaaatctacaaacacattgcttggtccatcagaactgattgagatgtgcttgaggagagaccgagagctctcccttaaagcctttgaagtatttgctttgacaagctcatcgttccgaagttccaacagaggccttctagaggcatgctggatgaatgcaactgaccaagatgattgggtaaagctttcagaggcatccatgtcagaaggttggagtgacgaggtcatcgaagaatctcttcaagcaactgtcctcttcaaagcttccaggttgtgttacagcccggatgctgtggtgtatgacggcacctttgaggatgttctgcctgtgaagaaagaggatgtacatctgagaggtttggagagtaaatgtttgtcagttgaagaagtgttgatgcagcacgaggattttccagatgctggtaaattgatgatgactgcagtgattaggggcaaggaaccaatttttacagccacagaacccgtggagatggactcatgaatacccgttttagatttctatatgatagactgccaccatatcgcagtcatttcattgtaattcatccatcgggtagtttcatcatcgtaaaaatcttgtcttagcgacaaggggtctgtactctgtagttttggttgtttctgttctgcgcagtcacagaaacttgattccgtagcacaagaatcagttcacgccgggttttagcatgagctatatcttctaatggttagtttggaaattagcaggaaatttgctcatttttctcgcagggaatcctggggatttaaatttccaaactagcttttgagtttttttaaggaaaatgccttctgtgttaatcagcttagagtaaagtacatttctggttctggtagaggtgtcaattctgcctataaattt

SEQ ID NO: 84485 - DNA, 2346 bp, Zea Mays
atgacttcttgagtcatggatgtcgtgaggaagccaaggacctgctgctgaagcacgacccatcggatgtactttgggttgacgtcgatcatcttgccatcttattttgacggagatcttctcaccgggcgcttcaaccatgccatccaagcaatgctaactgtcatggagcatggtgaaaagctctctggaatggcacaccttagggagttacaaaacacacttattcagcatggctcaagcacccatttttcacctcagtcgaaaacccaaggtactggtgccctttggaaccttattcagttggttggtgagaaagctcgaagaaacatggttcttttaatggatcgtgataatgctgaagtgttctacagtagggtttctgatatagaggatctattttattgtttatctcatgaacttcaatacatcattagtagagaagaacacccttctgttcagatgcaacgtgcacttgagttagcaaatgcttgtatcaccatagttcaggcagcatcacactacaagaaggatcacaaggaatggtatccatctcctgaaggactgataacatggaacagccaacctgttctacggtctggaatctggaatttggcatccttgattatggagcttttgggagaatcaggagctgcagacatgtcaatgaaatccagtctatggtctcagctggaaggacttacagatattctactggaggcatatatgtgccttttaactgcccaatttgaacgtgggcaggaacatggtgtgctagtgcaagaatattgtgaacgaagagatgaacttctcagatccctctacaaccttgctaaacaaatagtggaggccaaataccaggagtcaagaaatggtgcggacaagccagatctgaaggaatctatacttagagaggttatttctcctattttagcgacagccaaacgacatgaagggtaccaaacactgtggcagatttgctatgatctagatgattcaggtctcctccgcagcctaatgcatgatagcgtagggcctcatgggggattcagtttctttgtctttaaggagttagtcaacagaggagactactctaatctgttaaggctaggtgaagaattccaggaagagcttgcaagctttctgaaagagcggagtgatctgctgtgggttcatgagatatgcttaaaccagttctcatctgcttccgacacccttcatacctatgctctgcgtcgtagtcctgatggagatgccagcttcacaaccagcagaaagccactatcctttgctgaaagaagacgtcttctttatctctctaaaattgctgcaacagcaggtaaggacattgattatgaagtgaaggttgcacggatagaagcggacattcggattctaaaactgcaggaagaaattgttcagcatgatccagaatatgcacaagtcaaatctacaaacacattgcttggtccatcagaactgattgagatgtgcttgaggagagaccgagagctctcccttaaagcctttgaagtatttgctttgacaagctcatcgttccgaagttccaacagaggccttctagaggcatgctggatgaatgcaactgaccaagatgattgggtaaagctttcagaggcatccatgtcagaaggttggagtgacgaggtcatcgaagaatctcttcaagcaactgtcctcttcaaagcttccaggttgtgttacagcccggatgctgtggtgtatgacggcacctttgaggatgttctgcctgtgaagaaagaggatgtacatctgagaggtttggagagtaaatgtttgtcagttgaagaagtgttgatgcagcacgaggattttccagatgctggtaaattgatgatgactgcagtgattaggggcaaggaaccaatttttacagccacagaacccgtggagatggactcatgaatacccgttttagatttctatatgatagactgccaccatatcgcagtcatttcattgtaattcatccatcgggtagtttcatcatcgtaaaaatcttgtcttagcgacaaggggtctgtactctgtagttttggttgtttctgttctgcgcagtcacagaaacttgattccgtagcacaagaatcagttcacgccgggttttagcatgagctatatcttctaatggttagtttggaaattagcaggaaatttgctcatttttctcgcagggaatcctggggatttaaatttccaaactagcttttgagtttttttaaggaaaatgccttctgtgttaatcagcttagagtaaagtacatttctggttctggtagaggtgtcaattctgcctataaattt

SEQ ID NO: 84486 - DNA, 2409 bp, Zea Mays
gtcttctgcagttctgaccacacctcatggggtgttttgtagatggcaacctgatccatgacttcttgagtcatggatgtcgtgaggaagccaaggacctgctgctgaagcacgacccatcggatgtactttgggttgacgtcgatcatcttgccatcttattttgacggagatcttctcaccgggcgcttcaaccatgccatccaaggagcagcaatgctaactgtcatggagcatggtgaaaagctctctggaatggcacaccttagggagttacaaaacacacttattcagcatggctcaagcacccatttttcacctcagtcgaaaacccaaggtactggtgccctttggaaccttattcagttggttggtgagaaagctcgaagaaacatggttcttttaatggatcgtgataatgctgaagtgttctacagtagggtttctgatatagaggatctattttattgtttatctcatgaacttcaatacatcattagtagagaagaacacccttctgttcagatgcaacgtgcacttgagttagcaaatgcttgtatcaccatagttcaggcagcatcacactacaagaaggatcacaaggaatggtatccatctcctgaaggactgataacatggaacagccaacctgttctacggtctggaatctggaatttggcatccttgattatggagcttttgggagaatcaggagctgcagacatgtcaatgaaatccagtctatggtctcagctggaaggacttacagatattctactggaggcatatatgtgccttttaactgcccaatttgaacgtgggcaggaacatggtgtgctagtgcaagaatattgtgaacgaagagatgaacttctcagatccctctacaaccttgctaaacaaatagtggaggccaaataccaggagtcaagaaatggtgcggacaagccagatctgaaggaatctatacttagagaggttatttctcctattttagcgacagccaaacgacatgaagggtaccaaacactgtggcagatttgctatgatctagatgattcaggtctcctccgcagcctaatgcatgatagcgtagggcctcatgggggattcagtttctttgtctttaaggagttagtcaacagaggagactactctaatctgttaaggctaggtgaagaattccaggaagagcttgcaagctttctgaaagagcggagtgatctgctgtgggttcatgagatatgcttaaaccagttctcatctgcttccgacacccttcatacctatgctctgcgtcgtagtcctgatggagatgccagcttcacaaccagcagaaagccactatcctttgctgaaagaagacgtcttctttatctctctaaaattgctgcaacagcaggtaaggacattgattatgaagtgaaggttgcacggatagaagcggacattcggattctaaaactgcaggaagaaattgttcagcatgatccagaatatgcacaagtcaaatctacaaacacattgcttggtccatcagaactgattgagatgtgcttgaggagagaccgagagctctcccttaaagcctttgaagtatttgctttgacaagctcatcgttccgaagttccaacagaggccttctagaggcatgctggatgaatgcaactgaccaagatgattgggtaaagctttcagaggcatccatgtcagaaggttggagtgacgaggtcatcgaagaatctcttcaagcaactgtcctcttcaaagcttccaggttgtgttacagcccggatgctgtggtgtatgacggcacctttgaggatgttctgcctgtgaagaaagaggatgtacatctgagaggtttggagagtaaatgtttgtcagttgaagaagtgttgatgcagcacgaggattttccagatgctggtaaattgatgatgactgcagtgattaggggcaaggaaccaatttttacagccacagaacccgtggagatggactcatgaatacccgttttagatttctatatgatagactgccaccatatcgcagtcatttcattgtaattcatccatcgggtagtttcatcatcgtaaaaatcttgtcttagcgacaaggggtctgtactctgtagttttggttgtttctgttctgcgcagtcacagaaacttgattccgtagcacaagaatcagttcacgccgggttttagcatgagctatatcttctaatggttagtttggaaattagcaggaaatttgctcatttttctcgcagggaatcctggggatttaaatttccaaactagcttttgagtttttttaaggaaaatgccttctgtgttaatcagcttagagtaaagtacatttctggttctggtagaggtgtcaattctgcctataaattt

SEQ ID NO: 84487 - DNA, 2242 bp, Zea Mays
atgggaagagaggaagagaaagacaaaacctgacatgggaagagcagcaatgctaactgtcatggagcatggtgaaaagctctctggaatggcacaccttagggagttacaaaacacacttattcagcatggctcaagcacccatttttcacctcagtcgaaaacccaaggtactggtgccctttggaaccttattcagttggttggtgagaaagctcgaagaaacatggttcttttaatggatcgtgataatgctgaagtgttctacagtagggtttctgatatagaggatctattttattgtttatctcatgaacttcaatacatcattagtagagaagaacacccttctgttcagatgcaacgtgcacttgagttagcaaatgcttgtatcaccatagttcaggcagcatcacactacaagaaggatcacaaggaatggtatccatctcctgaaggactgataacatggaacagccaacctgttctacggtctggaatctggaatttggcatccttgattatggagcttttgggagaatcaggagctgcagacatgtcaatgaaatccagtctatggtctcagctggaaggacttacagatattctactggaggcatatatgtgccttttaactgcccaatttgaacgtgggcaggaacatggtgtgctagtgcaagaatattgtgaacgaagagatgaacttctcagatccctctacaaccttgctaaacaaatagtggaggccaaataccaggagtcaagaaatggtgcggacaagccagatctgaaggaatctatacttagagaggttatttctcctattttagcgacagccaaacgacatgaagggtaccaaacactgtggcagatttgctatgatctagatgattcaggtctcctccgcagcctaatgcatgatagcgtagggcctcatgggggattcagtttctttgtctttaaggagttagtcaacagaggagactactctaatctgttaaggctaggtgaagaattccaggaagagcttgcaagctttctgaaagagcggagtgatctgctgtgggttcatgagatatgcttaaaccagttctcatctgcttccgacacccttcatacctatgctctgcgtcgtagtcctgatggagatgccagcttcacaaccagcagaaagccactatcctttgctgaaagaagacgtcttctttatctctctaaaattgctgcaacagcaggtaaggacattgattatgaagtgaaggttgcacggatagaagcggacattcggattctaaaactgcaggaagaaattgttcagcatgatccagaatatgcacaagtcaaatctacaaacacattgcttggtccatcagaactgattgagatgtgcttgaggagagaccgagagctctcccttaaagcctttgaagtatttgctttgacaagctcatcgttccgaagttccaacagaggccttctagaggcatgctggatgaatgcaactgaccaagatgattgggtaaagctttcagaggcatccatgtcagaaggttggagtgacgaggtcatcgaagaatctcttcaagcaactgtcctcttcaaagcttccaggttgtgttacagcccggatgctgtggtgtatgacggcacctttgaggatgttctgcctgtgaagaaagaggatgtacatctgagaggtttggagagtaaatgtttgtcagttgaagaagtgttgatgcagcacgaggattttccagatgctggtaaattgatgatgactgcagtgattaggggcaaggaaccaatttttacagccacagaacccgtggagatggactcatgaatacccgttttagatttctatatgatagactgccaccatatcgcagtcatttcattgtaattcatccatcgggtagtttcatcatcgtaaaaatcttgtcttagcgacaaggggtctgtactctgtagttttggttgtttctgttctgcgcagtcacagaaacttgattccgtagcacaagaatcagttcacgccgggttttagcatgagctatatcttctaatggttagtttggaaattagcaggaaatttgctcatttttctcgcagggaatcctggggatttaaatttccaaactagcttttgagtttttttaaggaaaatgccttctgtgttaatcagcttagagtaaagtacatttctggttctggtagaggtgtcaattctgcctataaattt

SEQ ID NO: 84488 - DNA, 2626 bp, Zea Mays
agcgaaaatactctagtactaaaaccctaacccaccccccaccgcccaccggagagagcgctgatagccagaagtctggtcggagaaggcaacgtcctagcagactagccatcgcgctccgccgccgaagatgttctctccggcaatcaggaggccccacctccctaaccgcagggacatggcggaggaattccaatcacctcctcctgctgctcccgcccattccctatcgcctcgcggattcgccgtgcccgaccgccctgccaccggcactccggccccatggaactcctccctcctcactaggatttcgacgtcgaaacgagctgacaggactggtgattcggaccagatccaaccagtgcacgtagcagattttcccagagttgttcggaatgcccaagccagcctgaagaatttctctggagcagcaatgctaactgtcatggagcatggtgaaaagctctctggaatggcacaccttagggagttacaaaacacacttattcagcatggctcaagcacccatttttcacctcagtcgaaaacccaaggtactggtgccctttggaaccttattcagttggttggtgagaaagctcgaagaaacatggttcttttaatggatcgtgataatgctgaagtgttctacagtagggtttctgatatagaggatctattttattgtttatctcatgaacttcaatacatcattagtagagaagaacacccttctgttcagatgcaacgtgcacttgagttagcaaatgcttgtatcaccatagttcaggcagcatcacactacaagaaggatcacaaggaatggtatccatctcctgaaggactgataacatggaacagccaacctgttctacggtctggaatctggaatttggcatccttgattatggagcttttgggagaatcaggagctgcagacatgtcaatgaaatccagtctatggtctcagctggaaggacttacagatattctactggaggcatatatgtgccttttaactgcccaatttgaacgtgggcaggaacatggtgtgctagtgcaagaatattgtgaacgaagagatgaacttctcagatccctctacaaccttgctaaacaaatagtggaggccaaataccaggagtcaagaaatggtgcggacaagccagatctgaaggaatctatacttagagaggttatttctcctattttagcgacagccaaacgacatgaagggtaccaaacactgtggcagatttgctatgatctagatgattcaggtctcctccgcagcctaatgcatgatagcgtagggcctcatgggggattcagtttctttgtctttaaggagttagtcaacagaggagactactctaatctgttaaggctaggtgaagaattccaggaagagcttgcaagctttctgaaagagcggagtgatctgctgtgggttcatgagatatgcttaaaccagttctcatctgcttccgacacccttcatacctatgctctgcgtcgtagtcctgatggagatgccagcttcacaaccagcagaaagccactatcctttgctgaaagaagacgtcttctttatctctctaaaattgctgcaacagcaggtaaggacattgattatgaagtgaaggttgcacggatagaagcggacattcggattctaaaactgcaggaagaaattgttcagcatgatccagaatatgcacaagtcaaatctacaaacacattgcttggtccatcagaactgattgagatgtgcttgaggagagaccgagagctctcccttaaagcctttgaagtatttgctttgacaagctcatcgttccgaagttccaacagaggccttctagaggcatgctggatgaatgcaactgaccaagatgattgggtaaagctttcagaggcatccatgtcagaaggttggagtgacgaggtcatcgaagaatctcttcaagcaactgtcctcttcaaagcttccaggttgtgttacagcccggatgctgtggtgtatgacggcacctttgaggatgttctgcctgtgaagaaagaggatgtacatctgagaggtttggagagtaaatgtttgtcagttgaagaagtgttgatgcagcacgaggattttccagatgctggtaaattgatgatgactgcagtgattaggggcaaggaaccaatttttacagccacagaacccgtggagatggactcatgaatacccgttttagatttctatatgatagactgccaccatatcgcagtcatttcattgtaattcatccatcgggtagtttcatcatcgtaaaaatcttgtcttagcgacaaggggtctgtactctgtagttttggttgtttctgttctgcgcagtcacagaaacttgattccgtagcacaagaatcagttcacgccgggttttagcatgagctatatcttctaatggttagtttggaaattagcaggaaatttgctcatttttctcgcagggaatcctggggatttaaatttccaaactagcttttgagtttttttaaggaaaatgccttctgtgttaatcagcttagagtaaagtacatttctggttctggtagaggtgtcaattctgcctataaattt

SEQ ID NO: 84489 - DNA, 773 bp, Zea Mays
caatgctaactgtcatggagcatggtgaaaagctctctggaatggcacaccttagggagttacaaaacacacttattcagcatggctcaagcacccatttttcacctcagtcgaaaacccaaggtactggtgccctttggaaccttattcagttggttggtgagaaagctcgaagaaacatggttcttttaatggatcgtgataatgctgaagtgttctacagtagggtttctgatatagaggatctattttattgtttatctcatgaacttcaatacatcattagtagagaagaacacccttctgttcagatgcaacgtgcacttgagttagcaaatgcttgtatcaccatagttcaggcagcatcacactacaagaaggatcacaaggaatggtatccatctcctgaaggactgataacatggaacagccaacctgttctacggtctggaatctggaatttggcatccttgattatggagcttttgggagaatcaggagctgcagacatgtcaatgaaatccagtctatggtctcagctggaaggacttacagatattctactggaggcatatatgtgccttttaactgcccaatttgaacgtgggcaggaacatggtgtgctagtgcaagaatattgtgaacgaagagatgaacttctcagatccctctacaaccttgctaaacaaatagtggaggccaaataccaggagagctgtgtatcatttcataaatagaagaaaaggacaggacaacagcccacacactctaag

SEQ ID NO: 84490 - DNA, 1246 bp, Zea Mays
caagaagcggtccatcaatccaattcccatgaacattgtaactggctggagcttcatcagacgtgaatgctgcattttgaataataaagagtcattccttgcaactgaactctaatttttttaacaaatttataaaaaaatgaatacacataaatttcaaatttgcatcacgtgattttgagtggtgagatcattgtagcagagtacgaggggaaatataactgttgtgcttaatcacaattcaaaccttcagatggaaaaatggtgatgatggtgttttcaggagttctcttaaatctcataaaaataccaagcacatcagaaagctcaaattgggaataaatatgaaatgaagggtatatacagagttacagatagaaacttgcatatttagatactgaatattcaagcacctgattgctacaagatatgattccagccagacataccagcactgtgccgatgagataggggttcagatgcgaaacaagaaattgggagaaacattgttgagtaactgaaccagctgcttctcccttgcttattaaacaggccatgtaccattaatattaatcatattataggggattggaaatccaacaaaggttgcacgcataaaaacttgcttcttactggcgttgcggcgatgttttggtcgatttggctttgccgtaatgatgtggtgtttaatcataaatctataccgtcaattatacagactatcttcagggacacacactggttcagattttggagactattgcagaaagaagaaacacagcagcaaatcctcgtcgtgtgccagtctttggaggatgtggccatggagttctttgcgagtcacaggtggcggttccatgcaagaattaaagaggcttagtgctcgtgttttattttactccatatcattatttggttgaaggttgtttgaactacaaattgttgcaggttgatgtaataattgagttataaggttgtatgcatgcaaatgcaaaagggcgaaacaatgtttccatttccaaaaaaagcatgagtacttgctattgaaacatactcctaactctgttggctgccaaaaccagtgatcaaagtatacaataactagcatgactactgacaaacaaaaagatacactacgacatccatcagcataacatagctattgtgaaatctactaatcaactggtgttaacaacaaaatgttcagtagtagatatctaccccagtgcaaaataagaaagagaac

SEQ ID NO: 84491 - DNA, 1118 bp, Zea Mays
gaaaaagttaaatattggaaacgaaaaagttaaagtggaaaacggttccttcagaagcccctcacaggaagaacagagtgctctgtataattttctctatccaagcaaagacttacttccagatgataaggagatgagtatatttgatcatctggaggagcttcgcgagaggattttcatctcagttttggctgttggggctgcgatactaggctgttttgctttttcaaaagatctggttctttttctagaggcaccagtgactgttcagggtgttcggtttttgcagctctcgcctggggaatttttctttacaacattaaaggtttaacaagggatgagcggaaatttctcgggcctattgtgttgggttcttctgttctattctacctaggcattttcttctcctacacggttctcagccctgctgcgttgaacttctttgtgaattatgcagatggggcagtggaatcgttgtggtcaatagaccagtacttcgaattcatacttgtgctgatgtttagcacagggttgtcctttcaggtccctgttatccagcttctgctaggacaacttggattggtttctagtgaccaaatgctttcgatctggagatatgttgttgttggcgctgtcgtcgctgctgctgtgcttacaccttcgacggatccgttgacacaaatgttgttggctggtcctttgcttggtttgtacttgggtggcgcatggatggtcaagctaactgggcgataagtgagtggttcatgcaaggcaatgatgctccgggaagcaagagcgccactgtaacctagtcttgtaaaaatgaattcactctgttcatcagatgatattgttaccatttctctttctgaagttcatgagcagtagaaaatagaggaaacggttagttagtttcatctacagatcttgaagtaacaaatgaatgcgttgtggtacagcccgaattaatcattgttgaatagactataagatgcaagttccgcggcggcgtgggtgagatggtcaaaaaaaaaactgcctaggaggaacttgtttgatcttacgtgttttcaaatttggttttagtgaaaggccatcaaatagtcaatagtattcat

SEQ ID NO: 84492 - DNA, 1948 bp, Zea Mays
ataatatcgtgacatcgtctgtccgccaccgggtatctctttctccgggtagtgcaccagcggaacggcgaggtgcagtcgtgcagacgggaacggggatgggaagcacaggggcgctgctttggcacccgtcgccgcaggtgcactccggtggcgtcctcttccgccagagccggcgcatcgtacgccagcgcaacttgcctctattatcgctagctgacgcggcgcttgagcccgagcgccgccgcgggcagcgcctccgctgcgctgccggcgacggggacggcgggccccgggaggctcagaaggagtctccgagcggcatcggcgcagcactcgaggatccgtctccaggacctcctggataactgcgccatttgttatattaagaaggtaaaagaaacatggtctgcagaaaaagttaaatattggaaacgaaaaagttaaagtggaaaacggttccttcagaagcccctcacaggaagaacagagtgctctgtataattttctctatccaagcaaagacttacttccagatgataaggagatgagtatatttgatcatctggaggagcttcgcgagaggattttcatctcagttttggctgttggggctgcgatactaggctgttttgctttttcaaaagatctggttctttttctagaggcaccagtgactgttcagggtgttcggtttttgcagctctcgcctggggaatttttctttacaacattaaaggtgagactccagaaatctggagcgaacattctagcatttaaaatttggcttacaatattcttatcatttctattttctactactctccatccttttctctattcaattcagaataatccatgccaaattgccaatcttatatccaactagcattttttgctatgtgacgtttgattgcatgaggaaatcatccacataattcaattctacattctgattgctacagcaatgtacaatgcacttgaacaagccctttcttacttcatggttctagcgatgtgtaatcaatccggaggtaattgtggttccacatggtgtgcagcgggtgcatcagtgcatgtatctgaggttgtgtgactttttatcatatttgtccaaactacatccgctggtagtcctaaagaccaaacagatggaaatcttctcagttctcacacatgattggaaagcttaactgcaaagtccatatacctaggtttcaggttattgtggccttttacttggaagtcctatcattttatatgagatcattgcatttgttatcccagatggggcagtggaatcgttgtggtcaatagaccagtacttcgaattcatacttgtgctgatgtttagcacagggttgtcctttcaggtccctgttatccagcttctgctaggacaacttggattggtttctagtgaccaaatgctttcgatctggagatatgttgttgttggcgctgtcgtcgctgctgctgtgcttacaccttcgacggatccgttgacacaaatgttgttggctggtcctttgcttggtttgtacttgggtggcgcatggatggtcaagctaactgggcgataagtgagtggttcatgcaaggcaatgatgctccgggaagcaagagcgccactgtaacctagtcttgtaaaaatgaattcactctgttcatcagatgatattgttaccatttctctttctgaagttcatgagcagtagaaaatagaggaaacggttagttagtttcatctacagatcttgaagtaacaaatgaatgcgttgtggtacagcccgaattaatcattgttgaatagactataagatgcaagttccgcggcggcgtgggtgagatggtcaaaaaaaaaactgcctaggaggaacttgtttgatcttacgtgttttcaaatttggttttagtgaaaggccatcaaatagtcaatagtattcat

SEQ ID NO: 84493 - DNA, 1969 bp, Zea Mays
ataatatcgtgacatcgtctgtccgccaccgggtatctctttctccgggtagtgcaccagcggaacggcgaggtgcagtcgtgcagacgggaacggggatgggaagcacaggggcgctgctttggcacccgtcgccgcaggtgcactccggtggcgtcctcttccgccagagccggcgcatcgtacgccagcgcaacttgcctctattatcgctagctgacgcggcgcttgagcccgagcgccgccgcgggcagcgcctccgctgcgctgccggcgacggggacggcgggccccgggaggctcagaaggagtctccgagcggcatcggcgcagcactcgaggatccgtctccaggacctcctgtggaaaacggttccttcagaagcccctcacaggaagaacagagtgctctgtataattttctctatccaagcaaagacttacttccagatgataaggagatgagtatatttgatcatctggaggagcttcgcgagaggattttcatctcagttttggctgttggggctgcgatactaggctgttttgctttttcaaaagatctggttctttttctagaggcaccagtgactgttcagggtgttcggtttttgcagctctcgcctggggaatttttctttacaacattaaaggttctataagcttgttggcccaccatcaagacagaccttttggtagctttatcttgtgtttgggaccgaaagtttaggaacatgggtttgcttaattcagcctatattactcttctgcctaaagtggagaatgtttctcatgtcaaggattttcgtccaatcagacttatgcatagttttgtgaagattgtgaccaagttgttagctaataggctggcaagccggttacagcttatggtctcccccaaccagactgctttcataaaaaaaatggttcatacttgacaacttcatactagttcaacaaacgaccaaattcctgcaccaacagcgagagacatgtatcctcttcaaattagacatttctaaggcgttcaactctgtgccttgggccttccttctcgaagttttgaggaaaacagttcaaccaaacaattcaggtgtacccaacatccagctccagctctagaaagtttctaggcttagaaatacctagctccaggaaatccacatattttattgacggtggagctctgcacagcaggcctatattaccattcgcatgcaatttccatactctaggtttcaggttattgtggccttttacttggaagtcctatcattttatatgagatcattgcatttgttatcccagatggggcagtggaatcgttgtggtcaatagaccagtacttcgaattcatacttgtgctgatgtttagcacagggttgtcctttcaggtccctgttatccagcttctgctaggacaacttggattggtttctagtgaccaaatgctttcgatctggagatatgttgttgttggcgctgtcgtcgctgctgctgtgcttacaccttcgacggatccgttgacacaaatgttgttggctggtcctttgcttggtttgtacttgggtggcgcatggatggtcaagctaactgggcgataagtgagtggttcatgcaaggcaatgatgctccgggaagcaagagcgccactgtaacctagtcttgtaaaaatgaattcactctgttcatcagatgatattgttaccatttctctttctgaagttcatgagcagtagaaaatagaggaaacggttagttagtttcatctacagatcttgaagtaacaaatgaatgcgttgtggtacagcccgaattaatcattgttgaatagactataagatgcaagttccgcggcggcgtgggtgagatggtcaaaaaaaaaactgcctaggaggaacttgtttgatcttacgtgttttcaaatttggttttagtgaaaggccatcaaatagtcaatagtattcat

SEQ ID NO: 84494 - DNA, 1994 bp, Zea Mays
ataatatcgtgacatcgtctgtccgccaccgggtatctctttctccgggtagtgcaccagcggaacggcgaggtgcagtcgtgcagacgggaacggggatgggaagcacaggggcgctgctttggcacccgtcgccgcaggtgcactccggtggcgtcctcttccgccagagccggcgcatcgtacgccagcgcaacttgcctctattatcgctagctgacgcggcgcttgagcccgagcgccgccgcgggcagcgcctccgctgcgctgccggcgacggggacggcgggccccgggaggctcagaaggagtctccgagcggcatcggcgcagcactcgaggatccgtctccaggacctcctgtggaaaacggttccttcagaagcccctcacaggaagaacagagtgctctgtataattttctctatccaagcaaagacttacttccagatgataaggagatgagtatatttgatcatctggaggagcttcgcgagaggattttcatctcagttttggctgttggggctgcgatactaggctgttttgctttttcaaaagatctggttctttttctagaggcaccagtgactgttcagggtgttcggtttttgcagctctcgcctggggaatttttctttacaacattaaaggtgagactccagaaatctggagcgaacattctagcatttaaaatttggcttacaatattcttatcatttctattttctactactctccatccttttctctattcaattcagaataatccatgccaaattgccaatcttatatccaactagcattttttgctatgtgacgtttgattgcatgaggaaatcatccacataattcaattctacattctgattgctacagcaatgtacaatgcacttgaacaagccctttcttacttcatggttctagcgatgtgtaatcaatccggaggtaattgtggttccacatggtgtgcagcgggtgcatcagtgcatgtatctgaggttgtgtgactttttatcatatttgtccaaactacatccgctggtagtcctaaagaccaaacagatggaaatcttctcagttctcacacatgattggaaagcttaactgcaaagtccatatacctaggtttcaggttattgtggccttttacttggaagtcctatcattttatatgagatcattgcatttgttatcccaggtttaacaagggatgagcggaaatttctcgggcctattgtgttgggttcttctgttctattctacctaggcattttcttctcctacacggttctcagccctgctgcgttgaacttctttgtgaattatgcagatggggcagtggaatcgttgtggtcaatagaccagtacttcgaattcatacttgtgctgatgtttagcacagggttgtcctttcaggtccctgttatccagcttctgctaggacaacttggattggtttctagtgaccaaatgctttcgatctggagatatgttgttgttggcgctgtcgtcgctgctgctgtgcttacaccttcgacggatccgttgacacaaatgttgttggctggtcctttgcttggtttgtacttgggtggcgcatggatggtcaagctaactgggcgataagtgagtggttcatgcaaggcaatgatgctccgggaagcaagagcgccactgtaacctagtcttgtaaaaatgaattcactctgttcatcagatgatattgttaccatttctctttctgaagttcatgagcagtagaaaatagaggaaacggttagttagtttcatctacagatcttgaagtaacaaatgaatgcgttgtggtacagcccgaattaatcattgttgaatagactataagatgcaagttccgcggcggcgtgggtgagatggtcaaaaaaaaaactgcctaggaggaacttgtttgatcttacgtgttttcaaatttggttttagtgaaaggccatcaaatagtcaatagtattcat

SEQ ID NO: 84495 - DNA, 1473 bp, Zea Mays
ataatatcgtgacatcgtctgtccgccaccgggtatctctttctccgggtagtgcaccagcggaacggcgaggtgcagtcgtgcagacgggaacggggatgggaagcacaggggcgctgctttggcacccgtcgccgcaggtgcactccggtggcgtcctcttccgccagagccggcgcatcgtacgccagcgcaacttgcctctattatcgctagctgacgcggcgcttgagcccgagcgccgccgcgggcagcgcctccgctgcgctgccggcgacggggacggcgggccccgggaggctcagaaggagtctccgagcggcatcggcgcagcactcgaggatccgtctccaggacctcctggataactgcgccatttgttatattaagaaggtaaaagaaacatggtctgcagaaaaagttaaatattggaaacgaaaaagttaaagtggaaaacggttccttcagaagcccctcacaggaagaacagagtgctctgtataattttctctatccaagcaaagacttacttccagatgataaggagatgagtatatttgatcatctggaggagcttcgcgagaggattttcatctcagttttggctgttggggctgcgatactaggctgttttgctttttcaaaagatctggttctttttctagaggcaccagtgactgttcagggtgttcggtttttgcagctctcgcctggggaatttttctttacaacattaaaggtttcaggttattgtggccttttacttggaagtcctatcattttatatgagatcattgcatttgttatcccagatggggcagtggaatcgttgtggtcaatagaccagtacttcgaattcatacttgtgctgatgtttagcacagggttgtcctttcaggtccctgttatccagcttctgctaggacaacttggattggtttctagtgaccaaatgctttcgatctggagatatgttgttgttggcgctgtcgtcgctgctgctgtgcttacaccttcgacggatccgttgacacaaatgttgttggctggtcctttgcttggtttgtacttgggtggcgcatggatggtcaagctaactgggcgataagtgagtggttcatgcaaggcaatgatgctccgggaagcaagagcgccactgtaacctagtcttgtaaaaatgaattcactctgttcatcagatgatattgttaccatttctctttctgaagttcatgagcagtagaaaatagaggaaacggttagttagtttcatctacagatcttgaagtaacaaatgaatgcgttgtggtacagcccgaattaatcattgttgaatagactataagatgcaagttccgcggcggcgtgggtgagatggtcaaaaaaaaaactgcctaggaggaacttgtttgatcttacgtgttttcaaatttggttttagtgaaaggccatcaaatagtcaatagtattcat

SEQ ID NO: 84496 - DNA, 2242 bp, Zea Mays
ataatatcgtgacatcgtctgtccgccaccgggtatctctttctccgggtagtgcaccagcggaacggcgaggtgcagtcgtgcagacgggaacggggatgggaagcacaggggcgctgctttggcacccgtcgccgcaggtgcactccggtggcgtcctcttccgccagagccggcgcatcgtacgccagcgcaacttgcctctattatcgctagctgacgcggcgcttgagcccgagcgccgccgcgggcagcgcctccgctgcgctgccggcgacggggacggcgggccccgggaggctcagaaggagtctccgagcggcatcggcgcagcactcgaggatccgtctccaggacctcctgtggaaaacggttccttcagaagcccctcacaggaagaacagagtgctctgtataattttctctatccaagcaaagacttacttccagatgataaggagatgagtatatttgatcatctggaggagcttcgcgagaggattttcatctcagttttggctgttggggctgcgatactaggctgttttgctttttcaaaagatctggttctttttctagaggcaccagtgactgttcagggtgttcggtttttgcagctctcgcctggggaatttttctttacaacattaaagcaatgtacaatgcacttgaacaagccctttcttacttcatggttctagcgatgtgtaatcaatccggaggttctataagcttgttggcccaccatcaagacagaccttttggtagctttatcttgtgtttgggaccgaaagtttaggaacatgggtttgcttaattcagcctatattactcttctgcctaaagtggagaatgtttctcatgtcaaggattttcgtccaatcagacttatgcatagttttgtgaagattgtgaccaagttgttagctaataggctggcaagccggttacagcttatggtctcccccaaccagactgctttcataaaaaaaatggttcatacttgacaacttcatactagttcaacaaacgaccaaattcctgcaccaacagcgagagacatgtatcctcttcaaattagacatttctaaggcgttcaactctgtgccttgggccttccttctcgaagttttgaggaaaacagttcaaccaaacaattcaggtgtacccaacatccagctccagctctagaaagtttctaggcttagaaatacctagctccaggaaatccacatattttattgacggtggagctctgcacagcaggcctatattaccattcgcatgcaatttccatactctaggtcagctttacttcacagtagtcattacaaaattaaactgttaattatctcattatcttcaatcccatgcaggtttcaggttattgtggccttttacttggaagtcctatcattttatatgagatcattgcatttgttatcccaggtttaacaagggatgagcggaaatttctcgggcctattgtgttgggttcttctgttctattctacctaggcattttcttctcctacacggttctcagccctgctgcgttgaacttctttgtgaattatgcagatggggcagtggaatcgttgtggtcaatagaccagtacttcgaattcatacttgtgctgatgtttagcacagggttgtcctttcaggtccctgttatccagcttctgctaggacaacttggattggtttctagtgaccaaatgctttcgatctggagatatgttgttgttggcgctgtcgtcgctgctgctgtgcttacaccttcgacggatccgttgacacaaatgttgttggctggtcctttgcttggtttgtacttgggtggcgcatggatggtcaagctaactgggcgataagtgagtggttcatgcaaggcaatgatgctccgggaagcaagagcgccactgtaacctagtcttgtaaaaatgaattcactctgttcatcagatgatattgttaccatttctctttctgaagttcatgagcagtagaaaatagaggaaacggttagttagtttcatctacagatcttgaagtaacaaatgaatgcgttgtggtacagcccgaattaatcattgttgaatagactataagatgcaagttccgcggcggcgtgggtgagatggtcaaaaaaaaaactgcctaggaggaacttgtttgatcttacgtgttttcaaatttggttttagtgaaaggccatcaaatagtcaatagtattcat

SEQ ID NO: 84497 - DNA, 2541 bp, Zea Mays
ataatatcgtgacatcgtctgtccgccaccgggtatctctttctccgggtagtgcaccagcggaacggcgaggtgcagtcgtgcagacgggaacggggatgggaagcacaggggcgctgctttggcacccgtcgccgcaggtgcactccggtggcgtcctcttccgccagagccggcgcatcgtacgccagcgcaacttgcctctattatcgctagctgacgcggcgcttgagcccgagcgccgccgcgggcagcgcctccgctgcgctgccggcgacggggacggcgggccccgggaggctcagaaggagtctccgagcggcatcggcgcagcactcgaggatccgtctccaggacctcctgtggaaaacggttccttcagaagcccctcacaggaagaacagagtgctctgtataattttctctatccaagcaaagacttacttccagatgataaggagatgagtatatttgatcatctggaggagcttcgcgagaggattttcatctcagttttggctgttggggctgcgatactaggctgttttgctttttcaaaagatctggttctttttctagaggcaccagtgactgttcagggtgttcggtttttgcagctctcgcctggggaatttttctttacaacattaaagcaatgtacaatgcacttgaacaagccctttcttacttcatggttctagcgatgtgtaatcaatccggaggtaattgtggttccacatggtgtgcagcgggtgcatcagtgcatgtatctgaggttgtgtgactttttatcatatttgtccaaactacatccgctggtagtcctaaagaccaaacagatggaaatcttctcagttctcacacatgattggaaagcttaactgcaaagtccatatacctagaaaatttgaataccattgcacatatttgctgagctagtgcgggaaaatctctcactacttagtgaggtgaagcaaggttagtgtggaagggaagggggtgttagattaaatttattaaaggatactgggatcattggtggaatctaatttgtcaatcagttagtcatgtcatctgctgaaggtagagaggttacggtggaccttgatgcacttggggtccctactcatgatttgaatgctttggacgctcctttttcagatgaagtgtttgaaacaatcaaaaccctcccatctgacaaatcccctgatggattcactggcaggttctataagcttgttggcccaccatcaagacagaccttttggtagctttatcttgtgtttgggaccgaaagtttaggaacatgggtttgcttaattcagcctatattactcttctgcctaaagtggagaatgtttctcatgtcaaggattttcgtccaatcagacttatgcatagttttgtgaagattgtgaccaagttgttagctaataggctggcaagccggttacagcttatggtctcccccaaccagactgctttcataaaaaaaatggttcatacttgacaacttcatactagttcaacaaacgaccaaattcctgcaccaacagcgagagacatgtatcctcttcaaattagacatttctaaggcgttcaactctgtgccttgggccttccttctcgaagttttgaggaaaacagttcaaccaaacaattcaggtgtacccaacatccagctccagctctagaaagtttctaggcttagaaatacctagctccaggaaatccacatattttattgacggtggagctctgcacagcaggcctatattaccattcgcatgcaatttccatactctaggtttcaggttattgtggccttttacttggaagtcctatcattttatatgagatcattgcatttgttatcccagatggggcagtggaatcgttgtggtcaatagaccagtacttcgaattcatacttgtgctgatgtttagcacagggttgtcctttcaggtccctgttatccagcttctgctaggacaacttggattggtttctagtgaccaaatgctttcgatctggagatatgttgttgttggcgctgtcgtcgctgctgctgtgcttacaccttcgacggatccgttgacacaaatgttgttggctggtcctttgcttggtttgtacttgggtggcgcatggatggtcaagctaactgggcgataagtgagtggttcatgcaaggcaatgatgctccgggaagcaagagcgccactgtaacctagtcttgtaaaaatgaattcactctgttcatcagatgatattgttaccatttctctttctgaagttcatgagcagtagaaaatagaggaaacggttagttagtttcatctacagatcttgaagtaacaaatgaatgcgttgtggtacagcccgaattaatcattgttgaatagactataagatgcaagttccgcggcggcgtgggtgagatggtcaaaaaaaaaactgcctaggaggaacttgtttgatcttacgtgttttcaaatttggttttagtgaaaggccatcaaatagtcaatagtattcat

SEQ ID NO: 84498 - DNA, 2124 bp, Zea Mays
ataatatcgtgacatcgtctgtccgccaccgggtatctctttctccgggtagtgcaccagcggaacggcgaggtgcagtcgtgcagacgggaacggggatgggaagcacaggggcgctgctttggcacccgtcgccgcaggtgcactccggtggcgtcctcttccgccagagccggcgcatcgtacgccagcgcaacttgcctctattatcgctagctgacgcggcgcttgagcccgagcgccgccgcgggcagcgcctccgctgcgctgccggcgacggggacggcgggccccgggaggctcagaaggagtctccgagcggcatcggcgcagcactcgaggatccgtctccaggacctcctggataactgcgccatttgttatattaagaaggtaaaagaaacatggtctgcagaaaaagttaaatattggaaacgaaaaagttaaagtggaaaacggttccttcagaagcccctcacaggaagaacagagtgctctgtataattttctctatccaagcaaagacttacttccagatgataaggagatgagtatatttgatcatctggaggagcttcgcgagaggattttcatctcagttttggctgttggggctgcgatactaggctgttttgctttttcaaaagatctggttctttttctagaggcaccagtgactgttcagggtgttcggtttttgcagctctcgcctggggaatttttctttacaacattaaagcaatgtacaatgcacttgaacaagccctttcttacttcatggttctagcgatgtgtaatcaatccggaggttctataagcttgttggcccaccatcaagacagaccttttggtagctttatcttgtgtttgggaccgaaagtttaggaacatgggtttgcttaattcagcctatattactcttctgcctaaagtggagaatgtttctcatgtcaaggattttcgtccaatcagacttatgcatagttttgtgaagattgtgaccaagttgttagctaataggctggcaagccggttacagcttatggtctcccccaaccagactgctttcataaaaaaaatggttcatacttgacaacttcatactagttcaacaaacgaccaaattcctgcaccaacagcgagagacatgtatcctcttcaaattagacatttctaaggcgttcaactctgtgccttgggccttccttctcgaagttttgaggaaaacagttcaaccaaacaattcaggtgtacccaacatccagctccagctctagaaagtttctaggcttagaaatacctagctccaggaaatccacatattttattgacggtggagctctgcacagcaggcctatattaccattcgcatgcaatttccatactctaggtttcaggttattgtggccttttacttggaagtcctatcattttatatgagatcattgcatttgttatcccagatggggcagtggaatcgttgtggtcaatagaccagtacttcgaattcatacttgtgctgatgtttagcacagggttgtcctttcaggtccctgttatccagcttctgctaggacaacttggattggtttctagtgaccaaatgctttcgatctggagatatgttgttgttggcgctgtcgtcgctgctgctgtgcttacaccttcgacggatccgttgacacaaatgttgttggctggtcctttgcttggtttgtacttgggtggcgcatggatggtcaagctaactgggcgataagtgagtggttcatgcaaggcaatgatgctccgggaagcaagagcgccactgtaacctagtcttgtaaaaatgaattcactctgttcatcagatgatattgttaccatttctctttctgaagttcatgagcagtagaaaatagaggaaacggttagttagtttcatctacagatcttgaagtaacaaatgaatgcgttgtggtacagcccgaattaatcattgttgaatagactataagatgcaagttccgcggcggcgtgggtgagatggtcaaaaaaaaaactgcctaggaggaacttgtttgatcttacgtgttttcaaatttggttttagtgaaaggccatcaaatagtcaatagtattcat

SEQ ID NO: 84499 - DNA, 539 bp, Zea Mays
tcctcgacacatctttggaatctcggggagcagacttggtggcagggtgttcgtcttctccagcgttgcactaccaccgatttgtcgtcgcctcattcaagttcgtctcttctggctcagtatacgaggatgtactctgtcgatggcggttgacgtagccgacgtccttcccgacaaatctagcgggcggggagtcgatgggtcacgaatccaggactcagtgtcgtcctctgccgcccgaagaagagctccaaactagagaggcgggggagagcagaagagatggcagcgcgggctgaggcgacaggagatgggggtgaatccgccatggcaggggtgcacctattgcaagggcgaggtgcagggcacaactgctacacgcgcaatagcggaggcaacgtctgggggcgagagacacgactggttagggttaggggctaatggcttctgctgctgcctccacacctccatgtcctggccttttaggctgattccggctgggtcgtagcatgccaaagcccaggctggctagactgtct

SEQ ID NO: 84500 - DNA, 2372 bp, Zea Mays
ctttttcgttacaacgaatttggcctgaattacggcgtgttctcgacctgtttagtatgcataggatagcaacaaaaaatgcaagcacggtgtaactaactgtaaattcaaaatactatgttgatatgaccattctggaccctggatggctatgtaactaactcttgttttggtaagttgtaagcatggcatggagtagaagccaatctcccaaaatgtagaagctggtccctaggctacgtcttcatcctccactatgcaggtgacaatatcgaggctgccacaaccacacaaccataataatgttcagttggacatagacacacaacgagtgtgtcatgtttcatgcccattaatggtgttccattaggaatgaaaataattagtcatcatcttaaaataacttgaaagatcctagacaatattttcaacctctgtcctgtttgaaatcaagttgtagtaatcagcaggctggagctcataaaagttgtcatctttcactgcaagaacgatgctttaatgtcactgtagaactagaataaatacaaggcagatttggtaaagacaaaaaaatgacatttaggtaccatgatctgcactaggcaactttctggattgtagagcaaagttcttacttgaaaaaaacttgaatctcatgtccaagttcatctgactccctcatcaaaaagatcactcaacagtcgtcctggaacagggcatccatcatttcaaacataaatctgttcacgtatagttagccccatgaagttagcagatattaaggccttagaaaattctgatgaatactaaagtgacaaaaccatgacacactaatataaataggaaatggttcaaggcttcaagcaggttttacatgatagatttagtactgtgactgttaattttcagaatttaacacaaggtgaacttactagtaactgcaacaactttcattgagcaaaccatggcaccatgctaacacaaacgtccgcatctcaatcaatttgacaaagttaccatcaatactggtgcactaggacctcaattgtagtagcaatttctacacatgtcataccattctttaaagacaccattgatttgagaggctatgatgcaacactcactactcttagtagcaatttcaacatgtttcagacaaatgatgaaaaacttagtactcttggtagtaatttcaacatattttagataaatctttaaaagacacaacattgggatttgagaggcatcatagcagttgcataccaaaaataagagtgtcaaaaccgtgtgtacctacatcatagtaaaactaaagctacacaatgttcttcacttgccaaccatacagtacaacattattcgaagtagacaacttggatctagaagcataaagataataatagtaaaatgaaacagaaccaacagagagaaatcacccaaagcagcaaacaaacctgctcataccaatcaattcctcaaatggctgcgccattgctcctcctcgccagcttggtccatttcgtgtggaatgaacctagacactagactgcatagagacataattatagcggtgttaagaaacagtgagacacaatgattcttttttttggatatataagcctcattcaatcttgtaattagacatctgtctgtctgtccgagtaaccatgaatttagtctgaactgaatttcagagtccatacttattgaccattaatttatgaaccagacaaggcaaaatattagcaaaaaaatatacaggtaagtgtataacattttgctcatactaatcctacatacacaggggcggagccatggggtgggcaaagggggccgtggccccacctcaatttttttgtcttcttatatatatgttgaatatgatgagaattgggaaaaaatagtaagtacatgaaggcaaaaatgcagcacacatccaccatcctgcccaacaatccaactccacaaatctctaaaacaacccaattccgcttctgttttgttatcgttatatccgatcgacacaaggtagaagcgctcgacttcatcgtcgccatccccttgttgtactcgccctaactttgtcgtctgccccttctgtgttgtcccaatgtcgctgccacacctagctccccttctgcgctcaccagctctgtcgcccgtccatccccttttgcttgcgctcacacacccgcacaattcagtcgttcagccatcgcaacattgacgcgtagttttttcttgttcatatttttctctttttcatttctattgttcgatcactagattctatatacaatgttacatttggtttatagtattatctaaatgtcttatgattttgtttggtcccacatgaaattatgtcctac

SEQ ID NO: 84501 - DNA, 2450 bp, Zea Mays
cagaattttagcataatttgtcaatctttttcgttacaacgaatttggcctgaattacggcgtgttctcgacctgtttagtatgcataggatagcaacaaaaaatgcaagcacggtgtaactaactgtaaattcaaaatactatgttgatatgaccattctggaccctggatggctatgtaactaactcttgttttggtaagttgtaagcatggcatggagtagaagccaatctcccaaaatgtagaagctggtccctaggctacgtcttcatcctccactatgcaggtgacaatatcgaggctgccacaaccacacaaccataataatgttcagttggacatagacacacaacgagtgtgtcatgtttcatgcccattaatggtgttccattaggaatgaaaataattagtcatcatcttaaaataacttgaaagatcctagacaatattttcaacctctgtcctgtttgaaatcaagttgtagtaatcagcaggctggagctcataaaagttgtcatctttcactgcaagaacgatgctttaatgtcactgtagaactagaataaatacaaggcagatttggtaaagacaaaaaaatgacatttaggtaccatgatctgcactaggcaactttctggattgtagagcaaagttcttacttgaaaaaaacttgaatctcatgtccaagttcatctgactcctcaaaatgtgtcagagattcattttttgattcttcatcaatagcctccttaccctcatcaaaaagatcactcaacagtcgtcctggaacagggcatccatcatttcaaacataaatctgttcacgtatagttagccccatgaagttagcagatattaaggccttagaaaattctgatgaatactaaagtgacaaaaccatgacacactaatataaataggaaatggttcaaggcttcaagcaggttttacatgatagatttagtactgtgactgttaattttcagaatttaacacaaggtgaacttactagtaactgcaacaactttcattgagcaaaccatggcaccatgctaacacaaacgtccgcatctcaatcaatttgacaaagttaccatcaatactggtgcactaggacctcaattgtagtagcaatttctacacatgtcataccattctttaaagacaccattgatttgagaggctatgatgcaacactcactactcttagtagcaatttcaacatgtttcagacaaatgatgaaaaacttagtactcttggtagtaatttcaacatattttagataaatctttaaaagacacaacattgggatttgagaggcatcatagcagttgcataccaaaaataagagtgtcaaaaccgtgtgtacctacatcatagtaaaactaaagctacacaatgttcttcacttgccaaccatacagtacaacattattcgaagtagacaacttggatctagaagcataaagataataatagtaaaatgaaacagaaccaacagagagaaatcacccaaagcagcaaacaaacctgctcataccaatcaattcctcaaatggctgcgccattgctcctcctcgccagcttggtccatttcgtgtggaatgaacctagacactagactgcatagagacataattatagcggtgttaagaaacagtgagacacaatgattcttttttttggatatataagcctcattcaatcttgtaattagacatctgtctgtctgtccgagtaaccatgaatttagtctgaactgaatttcagagtccatacttattgaccattaatttatgaaccagacaaggcaaaatattagcaaaaaaatatacaggtaagtgtataacattttgctcatactaatcctacatacacaggggcggagccatggggtgggcaaagggggccgtggccccacctcaatttttttgtcttcttatatatatgttgaatatgatgagaattgggaaaaaatagtaagtacatgaaggcaaaaatgcagcacacatccaccatcctgcccaacaatccaactccacaaatctctaaaacaacccaattccgcttctgttttgttatcgttatatccgatcgacacaaggtagaagcgctcgacttcatcgtcgccatccccttgttgtactcgccctaactttgtcgtctgccccttctgtgttgtcccaatgtcgctgccacacctagctccccttctgcgctcaccagctctgtcgcccgtccatccccttttgcttgcgctcacacacccgcacaattcagtcgttcagccatcgcaacattgacgcgtagttttttcttgttcatatttttctctttttcatttctattgttcgatcactagattctatatacaatgttacatttggtttatagtattatctaaatgtcttatgattttgtttggtcccacatgaaattatgtcctac

SEQ ID NO: 84502 - DNA, 2001 bp, Zea Mays
cgtaaattgtcagaattttagcataatttgtcaatctttttcgttacaacgaatttggcctgaattacggcgtgttctcgacctgtttagtatgcataggatagcaacaaaaaatgcaagcacggtgtaactaactgtaaattcaaaatactatgttgatatgaccattctggaccctggatggctatgtaactaactcttgttttggtaagttgtaagcatggcatggagtagaagccaatctcccaaaatgtagaagctggtccctaggctacgtcttcatcctccactatgcaggtgacaatatcgaggctgccacaaccacacaaccataataatgttcagttggacatagacacacaacgagtgtgtcatgtttcatgcccattaatggtgttccattaggaatgaaaataattagtcatcatcttaaaataacttgaaagatcctagacaatattttcaacctctgtcctgtttgaaatcaagttgtagtaatcagcaggctggagctcataaaagttgtcatctttcactgcaagaacgatgctttaatgtcactgtagaactagaataaatacaaggcagatttggtaaagacaaaaaaatgacatttaggtaccatgatctgcactaggcaactttctggattgtagagcaaagttcttacttgaaaaaaacttgaatctcatgtccaagttcatctgactcctgggattttccaaagaaaacacatttacacgttgtattgcatcaacctatccgactggtggagaattcagaatacaacggtttaataaaaaaggaagtatgatcattattcccaaaacatgaacagtttcaaaaccaatagtatttggatgtgggaaaaatcacatccgttgcttgcaataattatttgtatgcatccacaattcagtcaaattctaattatcacatgtaggctaatttccaacactaaactacctcaaaatgtgtcagagattcattttttgattcttcatcaatagcctccttaccctcatcaaaaagatcactcaacagtcgtcctggaacagggcatccatcatttcaaacataaatctgctcataccaatcaattcctcaaatggctgcgccattgctcctcctcgccagcttggtccatttcgtgtggaatgaacctagacactagactgcatagagacataattatagcggtgttaagaaacagtgagacacaatgattcttttttttggatatataagcctcattcaatcttgtaattagacatctgtctgtctgtccgagtaaccatgaatttagtctgaactgaatttcagagtccatacttattgaccattaatttatgaaccagacaaggcaaaatattagcaaaaaaatatacaggtaagtgtataacattttgctcatactaatcctacatacacaggggcggagccatggggtgggcaaagggggccgtggccccacctcaatttttttgtcttcttatatatatgttgaatatgatgagaattgggaaaaaatagtaagtacatgaaggcaaaaatgcagcacacatccaccatcctgcccaacaatccaactccacaaatctctaaaacaacccaattccgcttctgttttgttatcgttatatccgatcgacacaaggtagaagcgctcgacttcatcgtcgccatccccttgttgtactcgccctaactttgtcgtctgccccttctgtgttgtcccaatgtcgctgccacacctagctccccttctgcgctcaccagctctgtcgcccgtccatccccttttgcttgcgctcacacacccgcacaattcagtcgttcagccatcgcaacattgacgcgtagttttttcttgttcatatttttctctttttcatttctattgttcgatcactagattctatatacaatgttacatttggtttatagtattatctaaatgtcttatgattttgtttggtcccacatgaaattatgtcctac

SEQ ID NO: 84503 - DNA, 2650 bp, Zea Mays
agacaaccaagatgaattttagcgtaaattgtcagaattttagcataatttgtcaatctttttcgttacaacgaatttggcctgaattacggcgtgttctcgacctgtttagtatgcataggatagcaacaaaaaatgcaagcacggtgtaactaactgtaaattcaaaatactatgttgatatgaccattctggaccctggatggctatgtaactaactcttgttttggtaagttgtaagcatggcatggagtagaagccaatctcccaaaatgtagaagctggtccctaggctacgtcttcatcctccactatgcaggtgacaatatcgaggctgccacaaccacacaaccataataatgttcagttggacatagacacacaacgagtgtgtcatgtttcatgcccattaatggtgttccattaggaatgaaaataattagtcatcatcttaaaataacttgaaagatcctagacaatattttcaacctctgtcctgtttgaaatcaagttgtagtaatcagcaggctggagctcataaaagttgtcatctttcacatgatctgcactaggcaactttctggattgtagagcaaagttcttacttgaaaaaaacttgaatctcatgtccaagttcatctgactcctgggattttccaaagaaaacacatttacacgttgtattgcatcaacctatccgactggtggagaattcagaatacaacggtttaataaaaaaggaagtatgatcattattcccaaaacatgaacagtttcaaaaccaatagtatttggatgtgggaaaaatcacatccgttgcttgcaataattatttgtatgcatccacaattcagtcaaattctaattatcacatgtaggctaatttccaacactaaactacctcaaaatgtgtcagagattcattttttgattcttcatcaatagcctccttaccctcatcaaaaagatcactcaacagtcgtcctggaacagggcatccatcatttcaaacataaatctgttcacgtatagttagccccatgaagttagcagatattaaggccttagaaaattctgatgaatactaaagtgacaaaaccatgacacactaatataaataggaaatggttcaaggcttcaagcaggttttacatgatagatttagtactgtgactgttaattttcagaatttaacacaaggtgaacttactagtaactgcaacaactttcattgagcaaaccatggcaccatgctaacacaaacgtccgcatctcaatcaatttgacaaagttaccatcaatactggtgcactaggacctcaattgtagtagcaatttctacacatgtcataccattctttaaagacaccattgatttgagaggctatgatgcaacactcactactcttagtagcaatttcaacatgtttcagacaaatgatgaaaaacttagtactcttggtagtaatttcaacatattttagataaatctttaaaagacacaacattgggatttgagaggcatcatagcagttgcataccaaaaataagagtgtcaaaaccgtgtgtacctacatcatagtaaaactaaagctacacaatgttcttcacttgccaaccatacagtacaacattattcgaagtagacaacttggatctagaagcataaagataataatagtaaaatgaaacagaaccaacagagagaaatcacccaaagcagcaaacaaacctgctcataccaatcaattcctcaaatggctgcgccattgctcctcctcgccagcttggtccatttcgtgtggaatgaacctagacactagactgcatagagacataattatagcggtgttaagaaacagtgagacacaatgattcttttttttggatatataagcctcattcaatcttgtaattagacatctgtctgtctgtccgagtaaccatgaatttagtctgaactgaatttcagagtccatacttattgaccattaatttatgaaccagacaaggcaaaatattagcaaaaaaatatacaggtaagtgtataacattttgctcatactaatcctacatacacaggggcggagccatggggtgggcaaagggggccgtggccccacctcaatttttttgtcttcttatatatatgttgaatatgatgagaattgggaaaaaatagtaagtacatgaaggcaaaaatgcagcacacatccaccatcctgcccaacaatccaactccacaaatctctaaaacaacccaattccgcttctgttttgttatcgttatatccgatcgacacaaggtagaagcgctcgacttcatcgtcgccatccccttgttgtactcgccctaactttgtcgtctgccccttctgtgttgtcccaatgtcgctgccacacctagctccccttctgcgctcaccagctctgtcgcccgtccatccccttttgcttgcgctcacacacccgcacaattcagtcgttcagccatcgcaacattgacgcgtagttttttcttgttcatatttttctctttttcatttctattgttcgatcactagattctatatacaatgttacatttggtttatagtattatctaaatgtcttatgattttgtttggtcccacatgaaattatgtcctac

SEQ ID NO: 84504 - DNA, 173 bp, Zea Mays
ttgttgggttcaaataaaaggtcgaatgcagttttcagtttcaggcacacgatgatgataaagaaaatgtacccaatggtaatacaaatttgcaagtcaaggaaacacacaatgacgaagacgatggaactggatctgatgggtttgaactgatagatgtgaaggaaaaattt

SEQ ID NO: 84505 - DNA, 5256 bp, Zea Mays
cggaggactggacggaggtggatgcccgaaagtacggtcaccctttatgtttggatgaaattgtgttcaattgtatgtctcttgcaaaggcattcatctctgttcaaagaggatatcttggttgttcctgagacaaaggtaagtaggtaactgaaagtacggattgctcctgttaacatcgttgttcagatagtgtgcagatgtagaagcgcatgttttacattagatatagtgagtagtgtgcaattgaataagctcgtgagaaccatgttcttatcctgtaaagaaagtgtgatcatcttctctgttgtggtcttgactggttttagtcaattgctgtgaggtgtatttaggtgtagctgctctgtgtattcatgtatagctgctctgttcttttgcgtgttgatctgaatttgtacatatgtagatttagtgaaaagcttgttgctattttcaaacaaatatttatgtatcatatcacatcacaaatatttatgttggccatacatacaagtgcagtagctagtacgtgaaaaccatgggtttagatcttgaaataaaactaacatcactcacgtgttaggtgtcatccaagagcaactaggccactgcacggatagatgctagtagcagctgtgcctcagcgttcacatccacaggcccaacaaccacccacgagtcgtatcgggcatccacctctgtccagtcctccgccgccatatacctcagcctcgcatttcgtaaccctaactaccaccacctcctccggcggcctctcggcgacagcagagaccttaaggaaggatgggccacaggaagagaaagacgggcgaccgtcatggaagggtcaagccatcagtggagctggaaggaagcgaagatccggatcagattcagatgggggatctagagatcgtgtgcggcggtgacggcgatccgctgatgcaagaaacagaacatctcgacccgacgaggatcgtcagcgatgagttgtatgaaggccaggtctgatctgcctaccttgtggcatgccactgggattggtctaggaattccatgccctacgtcgtgtacaagatgggcgtcgccacttcctttccttcgcgggtgaagcggaagagcctgcaccgagttacccgtctgaccaccgttgctggcggtatgaccttcacgtccctacggtcagtgcaccgcgcgtggatcattagggtcgggggtgatccgggtgacaccgtcatcttcgacaccaagacgaagaaggtcattcacgggccgactctcaattctacaaagtggtgccctgtcctaacaacaatgggggacaaggtttatgctctgtgcaagactctctgctggttcacagaccccgatttcccaccctggttcgaggtactcgatctttccaaagccaaagttgtcattgttgacgaccgctcccacctggagggatgctcctggattgagctaccacatccaccttgcttcccttggaagattaccccatttgtttataccatgctgccagttgtacttatcacgtcttatgtggtggtcgacacctacatactggtatcattcaatcaactttggggcacatatgcatttgacaccaattcagtcgagtggcacaaaattgacaccaaggggctaccattcgttggtcgcgccaccccacatggctctttattccttggcttgtcagagggaaatggatccatcaatgcttattgcatcagtgtcactactactgacaatgatcgtgctcctaacttatccatcactatgctcccggtgaaatacatggataatgaaattgatgcagggccctgcttcttttccttggaggatggatgcttttgttcgttcagtttttcgcttgataaatgcagttggactcttcatcccaagaagctcgaattgtttccaaaggagacacatttaaacctgagaacatatcagacagagaatctttcatccctggaggttccagaggaaacattgttggctgtgaagccgaagattgcagtccacagccattgggagtagaccttcaagatttagtgttcatcccatgggttcagtcaatttgcttccgtccttctagtatatgtcccactgatacctttctttcagaaatatgatccttaataaccttgtagttgcaaatataaatgtcatttacttttctgcattcatgttcgtttcttgctgtttctacatttcagaggatattttctttgcactggaatattacgggcactggaataagttttttttgcttgttctgtcaatctgccctctcatatccatacattaattgccttaaaatttatgtagaaaatctttcatcctattaattagagtcaagcctattcttttatcttagatcttagaaaattcaccatataggtgccttggaatatatttctacaagtattgggtgtgctgataatgagggtagttgctaagcatgttaaggagatgaaaaatagcctgatttattgacaaatgtcttatacgttactgtagagaacaattgttttgctacttttttctctgcttgcatttatatataattgtagagaacaattgcttcgctacttcagtgtggaaggtgttgatgggttgtttggtagggttgaatgatttgcctttaggctatcattgttttaagtcttacccttacccctgttttcatgcataagtcattttaggcttgttagcaagatttttttaaaataggatcacccagcttttagagaaagcaatatgttttttatattaggatgttaagaagcaattagaaagtagatcaatgtttttattgctgttcatttagacccatattgaaaaagttccattattgttgcgagtaaagcaagatgtttttaatctatggaattaaaactcaagctaattggttcattgctcaggaggagctaattagtttaaatgagcaaattagcttgcataaaaattgtatgtttcaaaacatggagtagcaacccttcttcacagatttggaagtagtgccatccttatttttacactggtttttggcccttagaccatcttcagtaggccgtgtaaagtattgttttgtaatgtagattatactgtttgcagagtgaagtttaaaatagatggtgaaatagagagtgagatagagtctactggaggtagtcttaagaccattctcaataagagttccatgatcattacataggatgtcatgttagtgtttttgatgatgtggcagtgtattaatgatgagagatgtgaaatgagtttcatggagataaaatctcgtgtacactgtttccaaggtgtttgtgttttgcatgtgacctaggaaacaacaatgatgaaactatctgagggcctgtttgggaatgctgttttaaaatattgtagtttacacatgatccaaccagggcaaggggaaggtttatggtgcactcaggtcaaatctcagaatcccatgactctagaagattacagagcccagccaggttcttgtcagagaggtatcacaaattcgcaatcctagttgtacactgccttaaaattcaaactttatccggattcaaattcaattttccattatagtcaatgtatataatttatcttctaagaatcatgccatttccctttcgcatataaatgctaattatagatattcatattcatgtatggaaatcaactgcagagttgcaagttcttccgtgtgagatgtctttcgtgtccaataagggtgcaccaacaaaaatgttatcttatatttataagaaaatgttcttaaaacgtataaaatcatgcatattcatctcataatgttatataatctgcaatggctatctgacagaacaatttgactctgcaagacaaggttgatctgtttagacaggtgccatgcacatacacagtacatgaataagatatgcctgtctcggacaaaaaagagctccgcgggtaaggagtgaatgcaactttggcatctcatgagatggcaagaaataaatacctcatgaaaacccatgcttaaaaaaaacaaatcacaaccctgggaacagctttcccgaggcattattatgattaataagaagcctcagccacaagggcagagaaaaaccctgaacccctgcttaaaccatcagcaagtagatatatttgagttacttattctgttattcatttatcaactgtatatatcagtatgccaacaagactgggggcatttcttcttggcaggggcataggagcacttagctcataacctggctggtttcaggcaggaggctgaggcatttgtttactttaaaagtagtattattattgtaaataaatacaattcatattattagcatggattccaatatgtaacctggaccaatagcttccgtggtagaatgtcagctaaactgacatgatctaaatacttcagtgcattgtgcatactaatggcaaccggtttaaaatgtttgattacaggtactctgttttaccatctatttgtaaacaggaaaaaccatctatttggaaataagaaaaacgatctatttggaaataagaaaaacgatctatttggaaacaggaaaattagtttgtaaagttctcgtttctcagacatgattatagccaccttgaatccttataaaaaggtctgacagagaaaaatcatagacaccggttcgatgtgaactaccaaacttaagcagttaagctgttcgctcttgaaaaccaaacaggtctaacacggtaacacccccgtaacactgatcaggagcaagaggttcagttaacacccaaatggttcggcacgttgattgacatatggcgttgactaatgtcgatctaggtgcactgaagaagaaccaaatcgtaccatgctacacgggtggatagattgaatcagtgggggcaccgcggcagcacataaatccacgactaactcaattggggaggaagaaagatttgggtttgatttgcgaacaaaccaactatttgaagatggaattccgttcaagcaaagctaggattacttaccagcagaagaagagaccaatccacgccagcccggcagagaggtggaagacgagtcggagaaggattcctccggcgtgttcggaagagaggagtcgacgagcggggttggggcggaggcgccgcaggatttgggaattcgggggcgcaggcgtggagcgctgatgtcaatggacaagaaatggtgtgagcactacttcccccaatcacaac

SEQ ID NO: 84506 - DNA, 1323 bp, Zea Mays
cttccctgtgctggcgacggcgaggttcagaggattaggcggctggcaccaggcgtggattgcggcgggatttagatgcgcgtcggggctcagtcttatacccagggccaatgccaaccacccgaccaagatccatggagatccccagggcagaatttaggctggatttgttggcacgccccgattcctacggtgaggacgacgcccctgacccgcccacagtcagaagaggagcgccattgacacgagaacaccgcaagggaagggcgctggcgagcaggcctcgatcatcattggcaccaatgcgcgtgggcgcgaagactgggctggcacggtgatgtggtcggttgggcagaatcggcccacaggcgtccacacaggcgctgttctgcccgccgcgagcacgccgcgatttctccacgcgcagcccccgcaatccgctgcctttccatccgcgcccgcaatcctttccatccacggctgcaatccgccgcgccaaatccaccgccacgcccctgcgcccgcaacgcccgcccctgcgccaaatcctccttggacgcgccccgacggctggcgcaaccctgctcgtgccacgacttgcgtagaatggaaggtatgtggcgcaactcctccttgattgagcggagaatggaaggtcaccgtacggcattggtcgagaggaggaggttgaggatggatgcccgcaacgccactgcgccaaccccgtgaaatccgcaacgcccgcccctgcgccaatggaaggtctgttgccaaatcccgcggatggaaggtggcggatgggaggtggcacgcaccttccatccccgcggtgcgcaccttcatcctccgcgaccgcccgcggatctccaaagcagcacggcgcacgtgttgagggcgtggggaggaggtgcgcggccgccatcaacgctctcctacccatctggtccgcgatcctcgctcaccttccatcgacgacgccgcatcgacctcggcaacctctgcccacctacaagaacaaccgattcaaccactgctccctataactctccccattgctgcagattcaaccactgctcccctacatccgcgccctcaataggtttggttggtgcaaggtgattcttcactgtgacggcaacgccaacagcgagctgggagggcgtcttacaatcacagtatggaagcctgctgcctttcccgaagctatgttccgagtgctgtcgtcaaaaaatatctgaaacatagattattagaaccttacatggcttcaacggagggcttgcagacttgcagaggatgggtgatatgggtctgaacccatcg

SEQ ID NO: 84507 - DNA, 4655 bp, Zea Mays
tggcaccaggcgtggattgcggcgggatttagatgcgcgtcggggctcagtcttatacccagggccaatgccaaccacccgaccaagatccatggagatccccagggcagaatttaggctggatttgttggcacgccccgattcctacggtgaggacgacgcccctgacccgcccacagtcagaagaggagcgccattgacacgagaacaccgcaagggaagggcgctggcgagcaggcctcgatcatcattggcaccaatgcgcgtgggcgcgaagactgggctggcacggtgatgtggtcggttgggcagaatcggcccacagtgtaggcgtccacacaggcgctgttctgcccgccgcgagcacgccgcgatttctccacgcgcagcccccgcaatccgctgcctttccatccgcgcccgcaatcctttccatccacggctgcaatccgccgcgccaaatccaccgccacgcccctgcgcccgcaacgcccgcccctgcgccaaatcctccttggacgcgccccgacggctggcgcaaccctgctcgtgccacgacttgcgtagaatggaaggtatgtggcgcaactcctccttgattgagcggagaatggaaggtcaccgtacggcattggtcgagaggaggaggttgaggatggatgcccgcaacgccactgcgccaaccccgtgaaatccgcaacgcccgcccctgcgccaatggaaggtctgttgccaaatcccgcggatggaaggtggcggatgggaggtggcacgcaccttccatccccgcggtgcgcaccttcatcctccgcgaccgcccgcggatctccaaagcagcacggcgcacgtgttgagggcgtggggaggaggtgcgcggccgccatcaacgctctcctacccatctggtccgcgatcctcgctcaccttccatcgacgacgccgcatcgacctcggcaacctctgcccacctacaagaacaaccgattcaaccactgctccctataactctccccattgctgcagattcaaccactgctcccctacatccgcgccctcaataggtttggttggtgcaaggtgattcttcactgtgacggcaacgccaacagcgagctgggaggtacagagttcatgcccataccatttaggttattcttagcctgcccataccagtttgatttcatttttcgtccatgtttcagttgatatgcttgtgtgtattggtggtttgtattggggtataaagtttatatgcattctaccggtatatatcggttgatgctaatatttagataaaatattagtggggaggtattagacactctatctgtagattcgaaggccttgtggccccaaactcataaatataaggtttaagctataaatggtactacatgatgcagtgcacatcttcatctatatggggtctcaaggctatagatccttgctctccttcctttaaaataatatacttgtacatacataccagtacaccacaaacatatcatcagacaaattaattacttgactttttgaaaatataaatcaaccttgataacataactggacaattaaagaaaacaaaattgtttgtgttgttggtagagagtttggatttctaaaagctttgcaccaatcgtcattcccatgacccttccacatgtgcttataccatttaggttattcttagcctgcccataccagtttgatttcatttttcgtctatgtttcagttgatatgcttgtgtgtattggtggtttgtattggggtataaagtttatatgcattctaccggtatatatcggttgatgctaatatttagataaaatgatagtggggaggtattagacactctatccgtagattcgaaggccttatggcctcagactcataaatataaggtttaagctataaatggtactacatgatgcagtgcacatcttcatctatatggggtctcaaggctatagatccttgctctccctcctttaaaataagatacttgtacatacacaccagtacaccacaaacatgtcatcagacaaattaattacttgactttttgaaaatataaatcaaccttgataacataactggacaattaaagaaaacaaaactgtttgtgttgttggtagagagtttggatttctaaaagctttgcaccaatcgtcattcccatgacccttccacatgtgcttataccatttaggttattcttagcctgcccataccagtttgatttcatttttcgtctatgtttcagttgatatgcttgtgtgtattggtggtttgtattggggtataaagtttatatgcattctaccggtatatatcggttgatgctaatatttagataaaatgatagtggggaggtattagacactctatccgtagattcgaaggccttatggccccagactcataaatataaggtttaagctataaatggtactacatgatgcagtgcacatcttcatctatatggggtctcaaggctatagatccttgctctccctcctttaaaataagatacttgtacatacacaccagtacaccacaaacatgtcatcagacaaattaattacttgactttttgaaaaatataaatcaaccttgataacatcactggacaattaaagaaaacaaaattgtttgtgttgttggtagagagtttggatttctaaaagctttgcaccaatcgtcattcccatgacccttccacatgtgcttacattaatatacagattattgtaatctgcttcaatccccctactagaagctaaaagaacaaatctagagcaaaataagggcttattagcaatctctaactccagctttattaccgacacactttctgccaagcaccctgaaagctgatgcgaaagtatgatttacgttctatttaaattttaaatattaaattatgttaaatgctacaaaggttttgatggaaccggtcgtattgaaccgtgaaagagccgcaacggaccgcctaaaaaggatgcctatgtaagttattatataaaaatacagtattgtctatcaaagttatgaccgttatatttagtcgtatgtttaatatagcttcaggttgttcgacgactaccgtgatgaagatttttatgggctaccgcggaaatacagtattgtcgctcgggtagaagttaaattcccgattgaaccacgttttcgtgacagacaacatttcgttttatctgacatcaatgtaagccaacaattctttaagtttcattttcaaagttacacgatcttcataccatcgcctcttctcctactgaaatactattagggagccaagatcgaggccataacatatatgtatgagacagtcaaacatttcgataatttgctccatgaaaagcatgtttacaagatgcataatgtaaaattcagccttcatccgggtgaatttaattttcgtcatctaaatggttccatggaattgtatcttgaccaacaaactatcgtggagccatacacggttccaattcaaatggcgccattcccaaaacaaatacttttgaaccttgctgatgttgccgagttgccaaacaggactttagtcgacattatggctattgtagtccactttgatacaattcatcgcacaatgtggggccctttcagaaagattgttataatggatgctaggggatatttacatatcattaaagtttggggtgacctactaaacaaaaatgcactccgctgggtgttggctaaggaggattatggcataataattggtactatgtttagacggttcagaagacaagagtgcctcgagtcttcggatcataccgcaatacacttcaatctgttccatcacaacacccatcattttggaccaattcaaaaagctttggtggcgcggaacaaccgtcagtttgttgttacatttcttgaagaacaaaggcgtagatagattctacaaattcgcaaagagcaataattgggactatgtttaagcgtgttattgatcaaccaaaagcaacatgaggcaaacttgaatgtctatgaattttgtttgtaatacctatgacatgggtttaataagagatattttgtgaaatttttgatcgtgcaaatgattaataaatatgttgtgcgaaaaattgaattcccataataatctgtatgggttacacatatttagataatgcaaacagcctccaaatatgtaatgtattatattatgagaaaaaatataaactttgtattttgtctaacatgcgctaggggtgcctgagggaaaggcgtcggcatcagggtcggatgaggcatgtaggttggagtcgatgtcatcagcttcatctggtgttctaaactctccttctccaatttcagcttctgcttctcatcacgaagctcatccttctcggcctggaatttaaagaaacaacaactgattcatacatattggagatcacaggggagaggtcagaaaagaagtaactttgtgtccttaaaaaatccagatccagtggagtagttaaggcctagcagtcacattgaacagtacaatatactgtaatcaacagcctgatcaaatcattaggcatcattaaaccatcatttacatagacaggttcgatgggcacaatattaacattgtcttcctggggcttcttag

SEQ ID NO: 84508 - DNA, 2098 bp, Zea Mays
ctggcaccaggcgtggattgcggcgggatttagatgcgcgtcggggctcagtcttatacccagggccaatgccaaccacccgaccaagatccatggagatccccagggcagaatttaggctggatttgttggcacgccccgattcctacggtgaggacgacgcccctgacccgcccacagtcagaagaggagcgccattgacacgagaacaccgcaagggaagggcgctggcgagcaggcctcgatcatcattggcaccaatgcgcgtgggcgcgaagactgggctggcacggtgatgtggtcggttgggcagaatcggcccacaggtttggttggtgcaaggtgattcttcactgtgacggcaacgccaacagcgagctgggaggttttgatggaaccggtcgtattgaaccgtgaaagagccgcaacggaccgcctaaaaaggatgcctatgtaagttattatataaaaatacagtattgtctatcaaagttatgaccgttatatttagtcgtatgtttaatatagcttcaggttgttcgacgactaccgtgatgaagatttttatgggctaccgcggaaatacagtattgtcgctcgggtagaagttaaattcccgattgaaccacgttttcgtgacagacaacatttcgttttatctgacatcaatgtaagccaacaattctttaagtttcattttcaaagttacacgatcttcataccatcgcctcttctcctactgaaatactattagggagccaagatcgaggccataacatatatgtatgagacagtcaaacatttcgataatttgctccatgaaaagcatgtttacaagatgcataatgtaaaattcagccttcatccgggtgaatttaattttcgtcatctaaatggttccatggaattgtatcttgaccaacaaactatcgtggagccatacacggttccaattcaaatggcgccattcccaaaacaaatacttttgaaccttgctgatgttgccgagttgccaaacaggactttagtcgacattatggctattgtagtccactttgatacaattcatcgcacaatgtggggccctttcagaaagattgttataatggatgctaggggatatttacatatcattaaagtttggggtgacctactaaacaaaaatgcactccgctgggtgttggctaaggaggattatggcataataattggtactatgtttagacggttcagaagacaagagtgcctcgagtcttcggatcataccgcaatacacttcaatctgttccatcacaacacccatcattttggaccaattcaaaaagctttggtggcgcggaacaaccgtcagtttgttgttacatttcttgaagaacaaaggcgtagatagattctacaaattcgcaaagagcaataattgggactatgtttaagcgtgttattgatcaaccaaaagcaacatgaggcaaacttgaatgtctatgaattttgtttgtaatacctatgacatgggtttaataagagatattttgtgaaatttttgatcgtgcaaatgattaataaatatgttgtgcgaaaaattgaattcccataataatctgtatgggttacacatatttagataatgcaaacagcctccaaatatgtaatgtattatattatgagaaaaaatataaactttgtattttgtctaacatgcgctaggggtgcctgagggaaaggcgtcggcatcagggtcggatgaggcatgtaggttggagtcgatgtcatcagcttcatctggtgttctaaactctccttctccaatttcagcttctgcttctcatcacgaagctcatccttctcggcctggaatttaaagaaacaacaactgattcatacatattggagatcacaggggagaggtcagaaaagaagtaactttgtgtccttaaaaaatccagatccagtggagtagttaaggcctagcagtcacattgaacagtacaatatactgtaatcaacagcctgatcaaatcattaggcatcattaaaccatcatttacatagacaggttcgatgggcacaatattaacattgtcttcctggggcttcttag

SEQ ID NO: 84509 - DNA, 3948 bp, Zea Mays
cgacggcgaggttcagaggattaggcggctggcaccaggcgtggattgcggcgggatttagatgcgcgtcggggctcagtcttatacccagggccaatgccaaccacccgaccaagatccatggagatccccagggcagaatttaggctggatttgttggcacgccccgattcctacggtgaggacgacgcccctgacccgcccacagtcagaagaggagcgccattgacacgagaacaccgcaagggaagggcgctggcgagcaggcctcgatcatcattggcaccaatgcgcgtgggcgcgaagactgggctggcacggtgatgtggtcggttgggcagaatcggcccacaggtttggttggtgcaaggtgattcttcactgtgacggcaacgccaacagcgagctgggaggtacagagttcatgcccataccatttaggttattcttagcctgcccataccagtttgatttcatttttcgtccatgtttcagttgatatgcttgtgtgtattggtggtttgtattggggtataaagtttatatgcattctaccggtatatatcggttgatgctaatatttagataaaatattagtggggaggtattagacactctatctgtagattcgaaggccttgtggccccaaactcataaatataaggtttaagctataaatggtactacatgatgcagtgcacatcttcatctatatggggtctcaaggctatagatccttgctctccttcctttaaaataatatacttgtacatacataccagtacaccacaaacatatcatcagacaaattaattacttgactttttgaaaatataaatcaaccttgataacataactggacaattaaagaaaacaaaattgtttgtgttgttggtagagagtttggatttctaaaagctttgcaccaatcgtcattcccatgacccttccacatgtgcttataccatttaggttattcttagcctgcccataccagtttgatttcatttttcgtctatgtttcagttgatatgcttgtgtgtattggtggtttgtattggggtataaagtttatatgcattctaccggtatatatcggttgatgctaatatttagataaaatgatagtggggaggtattagacactctatccgtagattcgaaggccttatggcctcagactcataaatataaggtttaagctataaatggtactacatgatgcagtgcacatcttcatctatatggggtctcaaggctatagatccttgctctccctcctttaaaataagatacttgtacatacacaccagtacaccacaaacatgtcatcagacaaattaattacttgactttttgaaaatataaatcaaccttgataacataactggacaattaaagaaaacaaaactgtttgtgttgttggtagagagtttggatttctaaaagctttgcaccaatcgtcattcccatgacccttccacatgtgcttataccatttaggttattcttagcctgcccataccagtttgatttcatttttcgtctatgtttcagttgatatgcttgtgtgtattggtggtttgtattggggtataaagtttatatgcattctaccggtatatatcggttgatgctaatatttagataaaatgatagtggggaggtattagacactctatccgtagattcgaaggccttatggccccagactcataaatataaggtttaagctataaatggtactacatgatgcagtgcacatcttcatctatatggggtctcaaggctatagatccttgctctccctcctttaaaataagatacttgtacatacacaccagtacaccacaaacatgtcatcagacaaattaattacttgactttttgaaaaatataaatcaaccttgataacatcactggacaattaaagaaaacaaaattgtttgtgttgttggtagagagtttggatttctaaaagctttgcaccaatcgtcattcccatgacccttccacatgtgcttacattaatatacagattattgtaatctgcttcaatccccctactagaagctaaaagaacaaatctagagcaaaataagggcttattagcaatctctaactccagctttattaccgacacactttctgccaagcaccctgaaagctgatgcgaaagtatgatttacgttctatttaaattttaaatattaaattatgttaaatgctacaaaggttttgatggaaccggtcgtattgaaccgtgaaagagccgcaacggaccgcctaaaaaggatgcctatgtaagttattatataaaaatacagtattgtctatcaaagttatgaccgttatatttagtcgtatgtttaatatagcttcaggttgttcgacgactaccgtgatgaagatttttatgggctaccgcggaaatacagtattgtcgctcgggtagaagttaaattcccgattgaaccacgttttcgtgacagacaacatttcgttttatctgacatcaatgtaagccaacaattctttaagtttcattttcaaagttacacgatcttcataccatcgcctcttctcctactgaaatactattagggagccaagatcgaggccataacatatatgtatgagacagtcaaacatttcgataatttgctccatgaaaagcatgtttacaagatgcataatgtaaaattcagccttcatccgggtgaatttaattttcgtcatctaaatggttccatggaattgtatcttgaccaacaaactatcgtggagccatacacggttccaattcaaatggcgccattcccaaaacaaatacttttgaaccttgctgatgttgccgagttgccaaacaggactttagtcgacattatggctattgtagtccactttgatacaattcatcgcacaatgtggggccctttcagaaagattgttataatggatgctaggggatatttacatatcattaaagtttggggtgacctactaaacaaaaatgcactccgctgggtgttggctaaggaggattatggcataataattggtactatgtttagacggttcagaagacaagagtgcctcgagtcttcggatcataccgcaatacacttcaatctgttccatcacaacacccatcattttggaccaattcaaaaagctttggtggcgcggaacaaccgtcagtttgttgttacatttcttgaagaacaaaggcgtagatagattctacaaattcgcaaagagcaataattgggactatgtttaagcgtgttattgatcaaccaaaagcaacatgaggcaaacttgaatgtctatgaattttgtttgtaatacctatgacatgggtttaataagagatattttgtgaaatttttgatcgtgcaaatgattaataaatatgttgtgcgaaaaattgaattcccataataatctgtatgggttacacatatttagataatgcaaacagcctccaaatatgtaatgtattatattatgagaaaaaatataaactttgtattttgtctaacatgcgctaggggtgcctgagggaaaggcgtcggcatcagggtcggatgaggcatgtaggttggagtcgatgtcatcagcttcatctggtgttctaaactctccttctccaatttcagcttctgcttctcatcacgaagctcatccttctcggcctggaatttaaagaaacaacaactgattcatacatattggagatcacaggggagaggtcagaaaagaagtaactttgtgtccttaaaaaatccagatccagtggagtagttaaggcctagcagtcacattgaacagtacaatatactgtaatcaacagcctgatcaaatcattaggcatcattaaaccatcatttacatagacaggttcgatgggcacaatattaacattgtcttcctggggcttcttag

SEQ ID NO: 84510 - DNA, 4701 bp, Zea Mays
gacgggtccttccctgtgctggcgacggcgaggttcagaggattaggcggctggcaccaggcgtggattgcggcgggatttagatgcgcgtcggggctcagtcttatacccagggccaatgccaaccacccgaccaagatccatggagatccccagggcagaatttaggctggatttgttggcacgccccgattcctacggtgaggacgacgcccctgacccgcccacagtcagaagaggagcgccattgacacgagaacaccgcaagggaagggcgctggcgagcaggcctcgatcatcattggcaccaatgcgcgtgggcgcgaagactgggctggcacggtgatgtggtcggttgggcagaatcggcccacaggcgtccacacaggcgctgttctgcccgccgcgagcacgccgcgatttctccacgcgcagcccccgcaatccgctgcctttccatccgcgcccgcaatcctttccatccacggctgcaatccgccgcgccaaatccaccgccacgcccctgcgcccgcaacgcccgcccctgcgccaaatcctccttggacgcgccccgacggctggcgcaaccctgctcgtgccacgacttgcgtagaatggaaggtatgtggcgcaactcctccttgattgagcggagaatggaaggtcaccgtacggcattggtcgagaggaggaggttgaggatggatgcccgcaacgccactgcgccaaccccgtgaaatccgcaacgcccgcccctgcgccaatggaaggtctgttgccaaatcccgcggatggaaggtggcggatgggaggtggcacgcaccttccatccccgcggtgcgcaccttcatcctccgcgaccgcccgcggatctccaaagcagcacggcgcacgtgttgagggcgtggggaggaggtgcgcggccgccatcaacgctctcctacccatctggtccgcgatcctcgctcaccttccatcgacgacgccgcatcgacctcggcaacctctgcccacctacaagaacaaccgattcaaccactgctccctataactctccccattgctgcagattcaaccactgctcccctacatccgcgccctcaataggtttggttggtgcaaggtgattcttcactgtgacggcaacgccaacagcgagctgggaggtacagagttcatgcccataccatttaggttattcttagcctgcccataccagtttgatttcatttttcgtccatgtttcagttgatatgcttgtgtgtattggtggtttgtattggggtataaagtttatatgcattctaccggtatatatcggttgatgctaatatttagataaaatattagtggggaggtattagacactctatctgtagattcgaaggccttgtggccccaaactcataaatataaggtttaagctataaatggtactacatgatgcagtgcacatcttcatctatatggggtctcaaggctatagatccttgctctccttcctttaaaataatatacttgtacatacataccagtacaccacaaacatatcatcagacaaattaattacttgactttttgaaaatataaatcaaccttgataacataactggacaattaaagaaaacaaaattgtttgtgttgttggtagagagtttggatttctaaaagctttgcaccaatcgtcattcccatgacccttccacatgtgcttataccatttaggttattcttagcctgcccataccagtttgatttcatttttcgtctatgtttcagttgatatgcttgtgtgtattggtggtttgtattggggtataaagtttatatgcattctaccggtatatatcggttgatgctaatatttagataaaatgatagtggggaggtattagacactctatccgtagattcgaaggccttatggcctcagactcataaatataaggtttaagctataaatggtactacatgatgcagtgcacatcttcatctatatggggtctcaaggctatagatccttgctctccctcctttaaaataagatacttgtacatacacaccagtacaccacaaacatgtcatcagacaaattaattacttgactttttgaaaatataaatcaaccttgataacataactggacaattaaagaaaacaaaactgtttgtgttgttggtagagagtttggatttctaaaagctttgcaccaatcgtcattcccatgacccttccacatgtgcttataccatttaggttattcttagcctgcccataccagtttgatttcatttttcgtctatgtttcagttgatatgcttgtgtgtattggtggtttgtattggggtataaagtttatatgcattctaccggtatatatcggttgatgctaatatttagataaaatgatagtggggaggtattagacactctatccgtagattcgaaggccttatggccccagactcataaatataaggtttaagctataaatggtactacatgatgcagtgcacatcttcatctatatggggtctcaaggctatagatccttgctctccctcctttaaaataagatacttgtacatacacaccagtacaccacaaacatgtcatcagacaaattaattacttgactttttgaaaaatataaatcaaccttgataacatcactggacaattaaagaaaacaaaattgtttgtgttgttggtagagagtttggatttctaaaagctttgcaccaatcgtcattcccatgacccttccacatgtgcttacattaatatacagattattgtaatctgcttcaatccccctactagaagctaaaagaacaaatctagagcaaaataagggcttattagcaatctctaactccagctttattaccgacacactttctgccaagcaccctgaaagctgatgcgaaagtatgatttacgttctatttaaattttaaatattaaattatgttaaatgctacaaaggttttgatggaaccggtcgtattgaaccgtgaaagagccgcaacggaccgcctaaaaaggatgcctatgtaagttattatataaaaatacagtattgtctatcaaagttatgaccgttatatttagtcgtatgtttaatatagcttcaggttgttcgacgactaccgtgatgaagatttttatgggctaccgcggaaatacagtattgtcgctcgggtagaagttaaattcccgattgaaccacgttttcgtgacagacaacatttcgttttatctgacatcaatgtaagccaacaattctttaagtttcattttcaaagttacacgatcttcataccatcgcctcttctcctactgaaatactattagggagccaagatcgaggccataacatatatgtatgagacagtcaaacatttcgataatttgctccatgaaaagcatgtttacaagatgcataatgtaaaattcagccttcatccgggtgaatttaattttcgtcatctaaatggttccatggaattgtatcttgaccaacaaactatcgtggagccatacacggttccaattcaaatggcgccattcccaaaacaaatacttttgaaccttgctgatgttgccgagttgccaaacaggactttagtcgacattatggctattgtagtccactttgatacaattcatcgcacaatgtggggccctttcagaaagattgttataatggatgctaggggatatttacatatcattaaagtttggggtgacctactaaacaaaaatgcactccgctgggtgttggctaaggaggattatggcataataattggtactatgtttagacggttcagaagacaagagtgcctcgagtcttcggatcataccgcaatacacttcaatctgttccatcacaacacccatcattttggaccaattcaaaaagctttggtggcgcggaacaaccgtcagtttgttgttacatttcttgaagaacaaaggcgtagatagattctacaaattcgcaaagagcaataattgggactatgtttaagcgtgttattgatcaaccaaaagcaacatgaggcaaacttgaatgtctatgaattttgtttgtaatacctatgacatgggtttaataagagatattttgtgaaatttttgatcgtgcaaatgattaataaatatgttgtgcgaaaaattgaattcccataataatctgtatgggttacacatatttagataatgcaaacagcctccaaatatgtaatgtattatattatgagaaaaaatataaactttgtattttgtctaacatgcgctaggggtgcctgagggaaaggcgtcggcatcagggtcggatgaggcatgtaggttggagtcgatgtcatcagcttcatctggtgttctaaactctccttctccaatttcagcttctgcttctcatcacgaagctcatccttctcggcctggaatttaaagaaacaacaactgattcatacatattggagatcacaggggagaggtcagaaaagaagtaactttgtgtccttaaaaaatccagatccagtggagtagttaaggcctagcagtcacattgaacagtacaatatactgtaatcaacagcctgatcaaatcattaggcatcattaaaccatcatttacatagacaggttcgatgggcacaatattaacattgtcttcctggggcttcttag

SEQ ID NO: 84511 - DNA, 3163 bp, Zea Mays
gggatcgaggatcgacgggacacggctcgctaggcgaatagggatccaatttctggtgaatcttccgtacttctaattcctgaaatatgagaagattctttttctttgggtcctccgctgcaaatgctggcgacgaaaacgggacaccgggcagtgatagcgggactacgcataaaaagacactggtggcagatgtgggcaacgaaagttctggttcctgcagcacaaggttgtcaagatccagaagccgtggtcaaaagcggaataaggaggaaccagccaatccgaagcagctcaggaggtccatgtcattctcgtctccggccacaaacacttgcttagacgaacgatgctttagtttctctggtgatgttccatgcactttgtatgatggatttgatgcacctcagaatgtcaaagatgttgcccccaacatatggtcaccagaaggaaatccagttttgagagaatatgcaataaatatcccaaaagatcattcttccatggaaaacgattctcctcgttcaagatgttgttcatgctcggcagggcactctcctgttagctctcccattgctcttcgatgcaggtcaacaagactaagcaatctattaagcaagaatgaagtactagatcgatacattgatagagggcatgaagatgcaatggtaaatgagaaacagaggcagtatccctccgccgcatctatggtttctactttgggaaggccacctcgaccccaatcaacagtaccatccataccaaaatcaatgaaagggaatacagagtgctacccagatgtagacataaaagaagactgcctttggcaagttgctcaagagggtacaagagataactgcaagattacaactatgtgcgatgcaggtagaaaccacgtaagcatgccagatgcttttgagagagacagtgctacatctgttgtagatatttgtgaagatttgcaagaagtgagacctccaaatgttatttgcccctccgcttgggagcaagaaaccaatgacatgttgctgcaaagagctaaagaagttgagtcaaggttcattgttcattgtggagatgaatatgaattcaacattatcagagataagcgaatgagctcaaatgacatgtttcagttgatccagcagttgacagaagataggaaacagttaacgcatgaactgtcttcacatataagagcacacgttgcagaaagatctgctgccaaacagcaatacaaacaatcaaagaaagaactagataccagaactaggaggttggagaaggagaagagtgaaagacaaactacactggagagagagatggacagaaggtcacatgattggtctgtcaaactatcaagatttcaatctgaagaagagagactacatgaacgggtgagagaacttgcagagcagaatgtgtcatttcaaagagaagttgcctttcttgaagcaaataaggctgaagcttcaaccaaagttgctagtttggaattgcaaaacaacaaattaaatgacgatctagagaaacttagaaacgagcatgagaagctccataattcctcagtagataaggatgctcgttttgctgaggttgttgaggaaagggaccacaccagggaatacttgaaggacaaggagggagagaacaaagcattgcacaaagtgattgccagactacaaacaacatgtaatgaacaggaaagagcaatcacaagtctaagacagggatgcaaagctcaattagacaagaaatttgttgagtgtgacagtgataaaatgaggaaattgcgaatggaactgattagactgacaggggtggagcaaaagttgagatgtgaaattcgttcttgtcatcttgaagttgggtccctcagacaagagaacattgcactcttaaatcgtttacaagttgttggaaatggagcacccttctcaattcgccttgaccaagagcttcaggctagagtggacaacctgcaggtgcaaggcttgtcattgcttaataagaccagccaactttgcaccaaattgttggatttgatgaaacacaagaaacttgaaaatgagtctttcagtggcaatgatgtgttgatagtcagtaattacacttttgagtaccaaagcatcaaaggaggaattgaaagtttgaagcgaagtttgaagacaataaattctgtactgaatgaaaagcaaagtgtaaaagaaaaatctggtgagactgcagctagaggtagttcttccagggagcaaacggatgattttggactcaagctgaaagaagaggctatgctcagtagagtattaaaggaggcactcttgtcaaaggaacttgacaatgggcaattggagtctgatctgtcatcttcacttcgtatccaagatgttatgagaaatgagacccagagagttcaggatgaactttcttgcatcacccacaaggctaagcagttagagcttcaggtatccaagaaggatgaagcgatcaatgagctccaacaggacttgcaggaatctgccaaggagcttgcgtctctacgcggaacactgaaaacagtgactgaggagagggacctttcctggcaggaatccaagcagctcagacgaaacatcaacatcatgcagaacgaggtcgtgtcactgaagaagaagattgaagccttggacgaagacatactcctcaaggaagggcagataacaatactgcaggatagcatcgacaagccgttcgacatcatttgcagccctaggtccatgagagagtttgacatggagtgaagagtgcggcgaagaacattgtccttttcagatatgatgtgcatttcgtgaaagacagagaggtgcttgtgaatacgtcggcgttcatacgattccgcagtgtcttcgtgcggtatatcgtagtggcttgttttggaactcattgctcggtttacaccatttgtaaagcgtgcataacttgagatatgatatgggtagtccttgtccaattaccatcacttgccccaaaggttgtttcgtgtgctgtcatgttcttgatgaatgttggagcagtggatgcatgctgtcaagttttttttgtcattgcaattttttttgtagttcaatttttttttctaaatggaggggtagtgcccgccgtctcgcagttccgcctgctttcg

SEQ ID NO: 84512 - DNA, 3005 bp, Zea Mays
cacaccgcagcccgacttcgcctcacctcgccacgcttgggattcccgcagggatccaatttctggtgaatcttccgtacttctaattcctgaaatatgagaagattctttttctttgggtcctccgctgcaaatgctggcgacgaaaacgggacaccgggcagtgatagcgggactacgcataaaaagacactggtggcagatgtgggcaacgaaagttctggttcctgcagcacaaggttgtcaagatccagaagccgtggtcaaaagcggaataaggaggaaccagccaatccgaagcagctcaggaggtccatgtcattctcgtctccggccacaaacacttgcttagacgaacgatgctttagtttctctggtgatgttccatgcactttgtatgatggatttgatgcacctcagaatgtcaaagatgttgcgtcaacaagactaagcaatctattaagcaagaatgaagtactagatcgatacattgatagagggcatgaagatgcaatggtaaatgagaaacagaggcagtatccctccgccgcatctatggtttctactttgggaaggccacctcgaccccaatcaacagtaccatccataccaaaatcaatgaaagggaatacagagtgctacccagatgtagacataaaagaagactgcctttggcaagttgctcaagagggtacaagagataactgcaagattacaactatgtgcgatgcaggtagaaaccacgtaagcatgccagatgcttttgagagagacagtgctacatctgttgtagatatttgtgaagatttgcaagaagtgagacctccaaatgttatttgcccctccgcttgtcctatttcaggggagcaagaaaccaatgacatgttgctgcaaagagctaaagaagttgagtcaaggttcattgttcattgtggagatgaatatgaattcaacattatcagagataagcgaatgagctcaaatgacatgtttcagttgatccagcagttgacagaagataggaaacagttaacgcatgaactgtcttcacatataagagcacacgttgcagaaagatctgctgccaaacagcaatacaaacaatcaaagaaagaactagataccagaactaggaggttggagaaggagaagagtgaaagacaaactacactggagagagagatggacagaaggtcacatgattggtctgtcaaactatcaagatttcaatctgaagaagagagactacatgaacgggtgagagaacttgcagagcagaatgtgtcatttcaaagagaagttgcctttcttgaagcaaataaggctgaagcttcaaccaaagttgctagtttggaattgcaaaacaacaaattaaatgacgatctagagaaacttagaaacgagcatgagaagctccataattcctcagtagataaggatgctcgttttgctgaggttgttgaggaaagggaccacaccagggaatacttgaaggacaaggagggagagaacaaagcattgcacaaagtgattgccagactacaaacaacatgtaatgaacaggaaagagcaatcacaagtctaagacagggatgcaaagctcaattagacaagaaatttgttgagtgtgacagtgataaaatgaggaaattgcgaatggaactgattagactgacaggggtggagcaaaagttgagatgtgaaattcgttcttgtcatcttgaagttgggtccctcagacaagagaacattgcactcttaaatcgtttacaagttgttggaaatggagcacccttctcaattcgccttgaccaagagcttcaggctagagtggacaacctgcaggtgcaaggcttgtcattgcttaataagaccagccaactttgcaccaaattgttggatttgatgaaacacaagaaacttgaaaatgagtctttcagtggcaatgatgtgttgatagtcagtaattacacttttgagtaccaaagcatcaaaggaggaattgaaagtttgaagcgaagtttgaagacaataaattctgtactgaatgaaaagcaaagtgtaaaagaaaaatctggtgagactgcagctagaggtagttcttccagggagcaaacgctgaaagaagaggctatgctcagtagagtattaaaggaggcactcttgtcaaaggaacttgacaatgggcaattggagtctgatctgtcatcttcacttcgtatccaagatgttatgagaaatgagacccagagagttcaggatgaactttcttgcatcacccacaaggctaagcagttagagcttcaggtatccaagaaggatgaagcgatcaatgagctccaacaggacttgcaggaatctgccaaggagcttgcgtctctacgcggaacactgaaaacagtgactgaggagagggacctttcctggcaggaatccaagcagctcagacgaaacatcaacatcatgcagaacgaggtcgtgtcactgaagaagaagattgaagccttggacgaagacatactcctcaaggaagggcagataacaatactgcaggatagcatcgacaagccgttcgacatcatttgcagccctaggtccatgagagagtttgacatggagtgaagagtgcggcgaagaacattgtccttttcagatatgatgtgcatttcgtgaaagacagagaggtgcttgtgaatacgtcggcgttcatacgattccgcagtgtcttcgtgcggtatatcgtagtggcttgttttggaactcattgctcggtttacaccatttgtaaagcgtgcataacttgagatatgatatgggtagtccttgtccaattaccatcacttgccccaaaggttgtttcgtgtgctgtcatgttcttgatgaatgttggagcagtggatgcatgctgtcaagttttttttgtcattgcaattttttttgtagttcaatttttttttctaaatggaggggtagtgcccgccgtctcgcagttccgcctgctttcg

SEQ ID NO: 84513 - DNA, 3060 bp, Zea Mays
cgttactttgccctcacatccatattccataccacaccacaccgcagcccgacttcgcctcacctcgccacgcttgggattcccgcagggatccaatttctggtgaatcttccgtacttctaattcctgaaatatgagaagattctttttctttgggtcctccgctgcaaatgctggcgacgaaaacgggacaccgggcagtgatagcgggactacgcataaaaagacactggtggcagatgtgggcaacgaaagttctggttcctgcagcacaaggttgtcaagatccagaagccgtggtcaaaagcggaataaggaggaaccagccaatccgaagcagctcaggaggtccatgtcattctcgtctccggccacaaacacttgcttagacgaacgatgctttagtttctctggtgatgttccatgcactttgtatgatggatttgatgcacctcagaatgtcaaagatgttgcgtcaacaagactaagcaatctattaagcaagaatgaagtactagatcgatacattgatagagggcatgaagatgcaatggtaaatgagaaacagaggcagtatccctccgccgcatctatggtttctactttgggaaggccacctcgaccccaatcaacagtaccatccataccaaaatcaatgaaagggaatacagagtgctacccagatgtagacataaaagaagactgcctttggcaagttgctcaagagggtacaagagataactgcaagattacaactatgtgcgatgcaggtagaaaccacgtaagcatgccagatgcttttgagagagacagtgctacatctgttgtagatatttgtgaagatttgcaagaagtgagacctccaaatgttatttgcccctccgcttgtcctatttcaggggagcaagaaaccaatgacatgttgctgcaaagagctaaagaagttgagtcaaggttcattgttcattgtggagatgaatatgaattcaacattatcagagataagcgaatgagctcaaatgacatgtttcagttgatccagcagttgacagaagataggaaacagttaacgcatgaactgtcttcacatataagagcacacgttgcagaaagatctgctgccaaacagcaatacaaacaatcaaagaaagaactagataccagaactaggaggttggagaaggagaagagtgaaagacaaactacactggagagagagatggacagaaggtcacatgattggtctgtcaaactatcaagatttcaatctgaagaagagagactacatgaacgggtgagagaacttgcagagcagaatgtgtcatttcaaagagaagttgcctttcttgaagcaaataaggctgaagcttcaaccaaagttgctagtttggaattgcaaaacaacaaattaaatgacgatctagagaaacttagaaacgagcatgagaagctccataattcctcagtagataaggatgctcgttttgctgaggttgttgaggaaagggaccacaccagggaatacttgaaggacaaggagggagagaacaaagcattgcacaaagtgattgccagactacaaacaacatgtaatgaacaggaaagagcaatcacaagtctaagacagggatgcaaagctcaattagacaagaaatttgttgagtgtgacagtgataaaatgaggaaattgcgaatggaactgattagactgacaggggtggagcaaaagttgagatgtgaaattcgttcttgtcatcttgaagttgggtccctcagacaagagaacattgcactcttaaatcgtttacaagttgttggaaatggagcacccttctcaattcgccttgaccaagagcttcaggctagagtggacaacctgcaggtgcaaggcttgtcattgcttaataagaccagccaactttgcaccaaattgttggatttgatgaaacacaagaaacttgaaaatgagtctttcagtggcaatgatgtgttgatagtcagtaattacacttttgagtaccaaagcatcaaaggaggaattgaaagtttgaagcgaagtttgaagacaataaattctgtactgaatgaaaagcaaagtgtaaaagaaaaatctggtgagactgcagctagaggtagttcttccagggagcaaacggatgattttggactcaagctgaaagaagaggctatgctcagtagagtattaaaggaggcactcttgtcaaaggaacttgacaatgggcaattggagtctgatctgtcatcttcacttcgtatccaagatgttatgagaaatgagacccagagagttcaggatgaactttcttgcatcacccacaaggctaagcagttagagcttcaggtatccaagaaggatgaagcgatcaatgagctccaacaggacttgcaggaatctgccaaggagcttgcgtctctacgcggaacactgaaaacagtgactgaggagagggacctttcctggcaggaatccaagcagctcagacgaaacatcaacatcatgcagaacgaggtcgtgtcactgaagaagaagattgaagccttggacgaagacatactcctcaaggaagggcagataacaatactgcaggatagcatcgacaagccgttcgacatcatttgcagccctaggtccatgagagagtttgacatggagtgaagagtgcggcgaagaacattgtccttttcagatatgatgtgcatttcgtgaaagacagagaggtgcttgtgaatacgtcggcgttcatacgattccgcagtgtcttcgtgcggtatatcgtagtggcttgttttggaactcattgctcggtttacaccatttgtaaagcgtgcataacttgagatatgatatgggtagtccttgtccaattaccatcacttgccccaaaggttgtttcgtgtgctgtcatgttcttgatgaatgttggagcagtggatgcatgctgtcaagttttttttgtcattgcaattttttttgtagttcaatttttttttctaaatggaggggtagtgcccgccgtctcgcagttccgcctgctttcg

SEQ ID NO: 84514 - DNA, 3084 bp, Zea Mays
cgttactttgccctcacatccatattccataccacaccacaccgcagcccgacttcgcctcacctcgccacgcttgggattcccgcagggatccaatttctggtgaatcttccgtacttctaattcctgaaatatgagaagattctttttctttgggtcctccgctgcaaatgctggcgacgaaaacgggacaccgggcagtgatagcgggactacgcataaaaagacactggtggcagatgtgggcaacgaaagttctggttcctgcagcacaaggttgtcaagatccagaagccgtggtcaaaagcggaataaggaggaaccagccaatccgaagcagctcaggagccccaacatatggtcaccagaaggaaatccagttttgagagaatatgcaataaatatcccaaaagatcattcttccatggaaaacgattctcctcgttcaagatgttgttcatgctcggcagggcactctcctgttagctctcccattgctcttcgatgcaggtcaacaagactaagcaatctattaagcaagaatgaagtactagatcgatacattgatagagggcatgaagatgcaatggtaaatgagaaacagaggcagtatccctccgccgcatctatggtttctactttgggaaggccacctcgaccccaatcaacagtaccatccataccaaaatcaatgaaagggaatacagagtgctacccagatgtagacataaaagaagactgcctttggcaagttgctcaagagggtacaagagataactgcaagattacaactatgtgcgatgcaggtagaaaccacgtaagcatgccagatgcttttgagagagacagtgctacatctgttgtagatatttgtgaagatttgcaagaagtgagacctccaaatgttatttgcccctccgcttgggagcaagaaaccaatgacatgttgctgcaaagagctaaagaagttgagtcaaggttcattgttcattgtggagatgaatatgaattcaacattatcagagataagcgaatgagctcaaatgacatgtttcagttgatccagcagttgacagaagataggaaacagttaacgcatgaactgtcttcacatataagagcacacgttgcagaaagatctgctgccaaacagcaatacaaacaatcaaagaaagaactagataccagaactaggaggttggagaaggagaagagtgaaagacaaactacactggagagagagatggacagaaggtcacatgattggtctgtcaaactatcaagatttcaatctgaagaagagagactacatgaacgggtgagagaacttgcagagcagaatgtgtcatttcaaagagaagttgcctttcttgaagcaaataaggctgaagcttcaaccaaagttgctagtttggaattgcaaaacaacaaattaaatgacgatctagagaaacttagaaacgagcatgagaagctccataattcctcagtagataaggatgctcgttttgctgaggttgttgaggaaagggaccacaccagggaatacttgaaggacaaggagggagagaacaaagcattgcacaaagtgattgccagactacaaacaacatgtaatgaacaggaaagagcaatcacaagtctaagacagggatgcaaagctcaattagacaagaaatttgttgagtgtgacagtgataaaatgaggaaattgcgaatggaactgattagactgacaggggtggagcaaaagttgagatgtgaaattcgttcttgtcatcttgaagttgggtccctcagacaagagaacattgcactcttaaatcgtttacaagttgttggaaatggagcacccttctcaattcgccttgaccaagagcttcaggctagagtggacaacctgcaggtgcaaggcttgtcattgcttaataagaccagccaactttgcaccaaattgttggatttgatgaaacacaagaaacttgaaaatgagtctttcagtggcaatgatgtgttgatagtcagtaattacacttttgagtaccaaagcatcaaaggaggaattgaaagtttgaagcgaagtttgaagacaataaattctgtactgaatgaaaagcaaagtgtaaaagaaaaatctggtgagactgcagctagaggtagttcttccagggagcaaacggatgattttggactcaagctgaaagaagaggctatgctcagtagagtattaaaggaggcactcttgtcaaaggaacttgacaatgggcaattggagtctgatctgtcatcttcacttcgtatccaagatgttatgagaaatgagacccagagagttcaggatgaactttcttgcatcacccacaaggctaagcagttagagcttcaggtatccaagaaggatgaagcgatcaatgagctccaacaggacttgcaggaatctgccaaggagcttgcgtctctacgcggaacactgaaaacagtgactgaggagagggacctttcctggcaggaatccaagcagctcagacgaaacatcaacatcatgcagaacgaggtcgtgtcactgaagaagaagattgaagccttggacgaagacatactcctcaaggaagggcagataacaatactgcaggatagcatcgacaagccgttcgacatcatttgcagccctaggtccatgagagagtttgacatggagtgaagagtgcggcgaagaacattgtccttttcagatatgatgtgcatttcgtgaaagacagagaggtgcttgtgaatacgtcggcgttcatacgattccgcagtgtcttcgtgcggtatatcgtagtggcttgttttggaactcattgctcggtttacaccatttgtaaagcgtgcataacttgagatatgatatgggtagtccttgtccaattaccatcacttgccccaaaggttgtttcgtgtgctgtcatgttcttgatgaatgttggagcagtggatgcatgctgtcaagttttttttgtcattgcaattttttttgtagttcaatttttttttctaaatggaggggtagtgcccgccgtctcgcagttccgcctgctttcg

SEQ ID NO: 84515 - DNA, 3048 bp, Zea Mays
cgttactttgccctcacatccatattccataccacaccacaccgcagcccgacttcgcctcacctcgccacgcttgggattcccgcagggatccaatttctggtgaatcttccgtacttctaattcctgaaatatgagaagattctttttctttgggtcctccgctgcaaatgctggcgacgaaaacgggacaccgggcagtgatagcgggactacgcataaaaagacactggtggcagatgtgggcaacgaaagttctggttcctgcagcacaaggttgtcaagatccagaagccgtggtcaaaagcggaataaggaggaaccagccaatccgaagcagctcaggaggtccatgtcattctcgtctccggccacaaacacttgcttagacgaacgatgctttagtttctctggtgatgttccatgcactttgtatgatggatttgatgcacctcagaatgtcaaagatgttgcgtcaacaagactaagcaatctattaagcaagaatgaagtactagatcgatacattgatagagggcatgaagatgcaatggtaaatgagaaacagaggcagtatccctccgccgcatctatggtttctactttgggaaggccacctcgaccccaatcaacagtaccatccataccaaaatcaatgaaagggaatacagagtgctacccagatgtagacataaaagaagactgcctttggcaagttgctcaagagggtacaagagataactgcaagattacaactatgtgcgatgcaggtagaaaccacgtaagcatgccagatgcttttgagagagacagtgctacatctgttgtagatatttgtgaagatttgcaagaagtgagacctccaaatgttatttgcccctccgcttgggagcaagaaaccaatgacatgttgctgcaaagagctaaagaagttgagtcaaggttcattgttcattgtggagatgaatatgaattcaacattatcagagataagcgaatgagctcaaatgacatgtttcagttgatccagcagttgacagaagataggaaacagttaacgcatgaactgtcttcacatataagagcacacgttgcagaaagatctgctgccaaacagcaatacaaacaatcaaagaaagaactagataccagaactaggaggttggagaaggagaagagtgaaagacaaactacactggagagagagatggacagaaggtcacatgattggtctgtcaaactatcaagatttcaatctgaagaagagagactacatgaacgggtgagagaacttgcagagcagaatgtgtcatttcaaagagaagttgcctttcttgaagcaaataaggctgaagcttcaaccaaagttgctagtttggaattgcaaaacaacaaattaaatgacgatctagagaaacttagaaacgagcatgagaagctccataattcctcagtagataaggatgctcgttttgctgaggttgttgaggaaagggaccacaccagggaatacttgaaggacaaggagggagagaacaaagcattgcacaaagtgattgccagactacaaacaacatgtaatgaacaggaaagagcaatcacaagtctaagacagggatgcaaagctcaattagacaagaaatttgttgagtgtgacagtgataaaatgaggaaattgcgaatggaactgattagactgacaggggtggagcaaaagttgagatgtgaaattcgttcttgtcatcttgaagttgggtccctcagacaagagaacattgcactcttaaatcgtttacaagttgttggaaatggagcacccttctcaattcgccttgaccaagagcttcaggctagagtggacaacctgcaggtgcaaggcttgtcattgcttaataagaccagccaactttgcaccaaattgttggatttgatgaaacacaagaaacttgaaaatgagtctttcagtggcaatgatgtgttgatagtcagtaattacacttttgagtaccaaagcatcaaaggaggaattgaaagtttgaagcgaagtttgaagacaataaattctgtactgaatgaaaagcaaagtgtaaaagaaaaatctggtgagactgcagctagaggtagttcttccagggagcaaacggatgattttggactcaagctgaaagaagaggctatgctcagtagagtattaaaggaggcactcttgtcaaaggaacttgacaatgggcaattggagtctgatctgtcatcttcacttcgtatccaagatgttatgagaaatgagacccagagagttcaggatgaactttcttgcatcacccacaaggctaagcagttagagcttcaggtatccaagaaggatgaagcgatcaatgagctccaacaggacttgcaggaatctgccaaggagcttgcgtctctacgcggaacactgaaaacagtgactgaggagagggacctttcctggcaggaatccaagcagctcagacgaaacatcaacatcatgcagaacgaggtcgtgtcactgaagaagaagattgaagccttggacgaagacatactcctcaaggaagggcagataacaatactgcaggatagcatcgacaagccgttcgacatcatttgcagccctaggtccatgagagagtttgacatggagtgaagagtgcggcgaagaacattgtccttttcagatatgatgtgcatttcgtgaaagacagagaggtgcttgtgaatacgtcggcgttcatacgattccgcagtgtcttcgtgcggtatatcgtagtggcttgttttggaactcattgctcggtttacaccatttgtaaagcgtgcataacttgagatatgatatgggtagtccttgtccaattaccatcacttgccccaaaggttgtttcgtgtgctgtcatgttcttgatgaatgttggagcagtggatgcatgctgtcaagttttttttgtcattgcaattttttttgtagttcaatttttttttctaaatggaggggtagtgcccgccgtctcgcagttccgcctgctttcg

SEQ ID NO: 84516 - DNA, 3210 bp, Zea Mays
cgttactttgccctcacatccatattccataccacaccacaccgcagcccgacttcgcctcacctcgccacgcttgggattcccgcagggatccaatttctggtgaatcttccgtacttctaattcctgaaatatgagaagattctttttctttgggtcctccgctgcaaatgctggcgacgaaaacgggacaccgggcagtgatagcgggactacgcataaaaagacactggtggcagatgtgggcaacgaaagttctggttcctgcagcacaaggttgtcaagatccagaagccgtggtcaaaagcggaataaggaggaaccagccaatccgaagcagctcaggaggtccatgtcattctcgtctccggccacaaacacttgcttagacgaacgatgctttagtttctctggtgatgttccatgcactttgtatgatggatttgatgcacctcagaatgtcaaagatgttgcccccaacatatggtcaccagaaggaaatccagttttgagagaatatgcaataaatatcccaaaagatcattcttccatggaaaacgattctcctcgttcaagatgttgttcatgctcggcagggcactctcctgttagctctcccattgctcttcgatgcaggtcaacaagactaagcaatctattaagcaagaatgaagtactagatcgatacattgatagagggcatgaagatgcaatggtaaatgagaaacagaggcagtatccctccgccgcatctatggtttctactttgggaaggccacctcgaccccaatcaacagtaccatccataccaaaatcaatgaaagggaatacagagtgctacccagatgtagacataaaagaagactgcctttggcaagttgctcaagagggtacaagagataactgcaagattacaactatgtgcgatgcaggtagaaaccacgtaagcatgccagatgcttttgagagagacagtgctacatctgttgtagatatttgtgaagatttgcaagaagtgagacctccaaatgttatttgcccctccgcttgggagcaagaaaccaatgacatgttgctgcaaagagctaaagaagttgagtcaaggttcattgttcattgtggagatgaatatgaattcaacattatcagagataagcgaatgagctcaaatgacatgtttcagttgatccagcagttgacagaagataggaaacagttaacgcatgaactgtcttcacatataagagcacacgttgcagaaagatctgctgccaaacagcaatacaaacaatcaaagaaagaactagataccagaactaggaggttggagaaggagaagagtgaaagacaaactacactggagagagagatggacagaaggtcacatgattggtctgtcaaactatcaagatttcaatctgaagaagagagactacatgaacgggtgagagaacttgcagagcagaatgtgtcatttcaaagagaagttgcctttcttgaagcaaataaggctgaagcttcaaccaaagttgctagtttggaattgcaaaacaacaaattaaatgacgatctagagaaacttagaaacgagcatgagaagctccataattcctcagtagataaggatgctcgttttgctgaggttgttgaggaaagggaccacaccagggaatacttgaaggacaaggagggagagaacaaagcattgcacaaagtgattgccagactacaaacaacatgtaatgaacaggaaagagcaatcacaagtctaagacagggatgcaaagctcaattagacaagaaatttgttgagtgtgacagtgataaaatgaggaaattgcgaatggaactgattagactgacaggggtggagcaaaagttgagatgtgaaattcgttcttgtcatcttgaagttgggtccctcagacaagagaacattgcactcttaaatcgtttacaagttgttggaaatggagcacccttctcaattcgccttgaccaagagcttcaggctagagtggacaacctgcaggtgcaaggcttgtcattgcttaataagaccagccaactttgcaccaaattgttggatttgatgaaacacaagaaacttgaaaatgagtctttcagtggcaatgatgtgttgatagtcagtaattacacttttgagtaccaaagcatcaaaggaggaattgaaagtttgaagcgaagtttgaagacaataaattctgtactgaatgaaaagcaaagtgtaaaagaaaaatctggtgagactgcagctagaggtagttcttccagggagcaaacggatgattttggactcaagctgaaagaagaggctatgctcagtagagtattaaaggaggcactcttgtcaaaggaacttgacaatgggcaattggagtctgatctgtcatcttcacttcgtatccaagatgttatgagaaatgagacccagagagttcaggatgaactttcttgcatcacccacaaggctaagcagttagagcttcaggtatccaagaaggatgaagcgatcaatgagctccaacaggacttgcaggaatctgccaaggagcttgcgtctctacgcggaacactgaaaacagtgactgaggagagggacctttcctggcaggaatccaagcagctcagacgaaacatcaacatcatgcagaacgaggtcgtgtcactgaagaagaagattgaagccttggacgaagacatactcctcaaggaagggcagataacaatactgcaggatagcatcgacaagccgttcgacatcatttgcagccctaggtccatgagagagtttgacatggagtgaagagtgcggcgaagaacattgtccttttcagatatgatgtgcatttcgtgaaagacagagaggtgcttgtgaatacgtcggcgttcatacgattccgcagtgtcttcgtgcggtatatcgtagtggcttgttttggaactcattgctcggtttacaccatttgtaaagcgtgcataacttgagatatgatatgggtagtccttgtccaattaccatcacttgccccaaaggttgtttcgtgtgctgtcatgttcttgatgaatgttggagcagtggatgcatgctgtcaagttttttttgtcattgcaattttttttgtagttcaatttttttttctaaatggaggggtagtgcccgccgtctcgcagttccgcctgctttcg

SEQ ID NO: 84517 - DNA, 3279 bp, Zea Mays
aggaaagccagctgttaatcgcaattagcaggcgctaatcaaaaccccccgcccgaccgttactttgccctcacatccatattccataccacaccacaccgcagcccgacttcgcctcacctcgccacgcttgggattcccgcagggatccaatttctggtgaatcttccgtacttctaattcctgaaatatgagaagattctttttctttgggtcctccgctgcaaatgctggcgacgaaaacgggacaccgggcagtgatagcgggactacgcataaaaagacactggtggcagatgtgggcaacgaaagttctggttcctgcagcacaaggttgtcaagatccagaagccgtggtcaaaagcggaataaggaggaaccagccaatccgaagcagctcaggaggtccatgtcattctcgtctccggccacaaacacttgcttagacgaacgatgctttagtttctctggtgatgttccatgcactttgtatgatggatttgatgcacctcagaatgtcaaagatgttgcccccaacatatggtcaccagaaggaaatccagttttgagagaatatgcaataaatatcccaaaagatcattcttccatggaaaacgattctcctcgttcaagatgttgttcatgctcggcagggcactctcctgttagctctcccattgctcttcgatgcaggtcaacaagactaagcaatctattaagcaagaatgaagtactagatcgatacattgatagagggcatgaagatgcaatggtaaatgagaaacagaggcagtatccctccgccgcatctatggtttctactttgggaaggccacctcgaccccaatcaacagtaccatccataccaaaatcaatgaaagggaatacagagtgctacccagatgtagacataaaagaagactgcctttggcaagttgctcaagagggtacaagagataactgcaagattacaactatgtgcgatgcaggtagaaaccacgtaagcatgccagatgcttttgagagagacagtgctacatctgttgtagatatttgtgaagatttgcaagaagtgagacctccaaatgttatttgcccctccgcttgtcctatttcaggggagcaagaaaccaatgacatgttgctgcaaagagctaaagaagttgagtcaaggttcattgttcattgtggagatgaatatgaattcaacattatcagagataagcgaatgagctcaaatgacatgtttcagttgatccagcagttgacagaagataggaaacagttaacgcatgaactgtcttcacatataagagcacacgttgcagaaagatctgctgccaaacagcaatacaaacaatcaaagaaagaactagataccagaactaggaggttggagaaggagaagagtgaaagacaaactacactggagagagagatggacagaaggtcacatgattggtctgtcaaactatcaagatttcaatctgaagaagagagactacatgaacgggtgagagaacttgcagagcagaatgtgtcatttcaaagagaagttgcctttcttgaagcaaataaggctgaagcttcaaccaaagttgctagtttggaattgcaaaacaacaaattaaatgacgatctagagaaacttagaaacgagcatgagaagctccataattcctcagtagataaggatgctcgttttgctgaggttgttgaggaaagggaccacaccagggaatacttgaaggacaaggagggagagaacaaagcattgcacaaagtgattgccagactacaaacaacatgtaatgaacaggaaagagcaatcacaagtctaagacagggatgcaaagctcaattagacaagaaatttgttgagtgtgacagtgataaaatgaggaaattgcgaatggaactgattagactgacaggggtggagcaaaagttgagatgtgaaattcgttcttgtcatcttgaagttgggtccctcagacaagagaacattgcactcttaaatcgtttacaagttgttggaaatggagcacccttctcaattcgccttgaccaagagcttcaggctagagtggacaacctgcaggtgcaaggcttgtcattgcttaataagaccagccaactttgcaccaaattgttggatttgatgaaacacaagaaacttgaaaatgagtctttcagtggcaatgatgtgttgatagtcagtaattacacttttgagtaccaaagcatcaaaggaggaattgaaagtttgaagcgaagtttgaagacaataaattctgtactgaatgaaaagcaaagtgtaaaagaaaaatctggtgagactgcagctagaggtagttcttccagggagcaaacggatgattttggactcaagctgaaagaagaggctatgctcagtagagtattaaaggaggcactcttgtcaaaggaacttgacaatgggcaattggagtctgatctgtcatcttcacttcgtatccaagatgttatgagaaatgagacccagagagttcaggatgaactttcttgcatcacccacaaggctaagcagttagagcttcaggtatccaagaaggatgaagcgatcaatgagctccaacaggacttgcaggaatctgccaaggagcttgcgtctctacgcggaacactgaaaacagtgactgaggagagggacctttcctggcaggaatccaagcagctcagacgaaacatcaacatcatgcagaacgaggtcgtgtcactgaagaagaagattgaagccttggacgaagacatactcctcaaggaagggcagataacaatactgcaggatagcatcgacaagccgttcgacatcatttgcagccctaggtccatgagagagtttgacatggagtgaagagtgcggcgaagaacattgtccttttcagatatgatgtgcatttcgtgaaagacagagaggtgcttgtgaatacgtcggcgttcatacgattccgcagtgtcttcgtgcggtatatcgtagtggcttgttttggaactcattgctcggtttacaccatttgtaaagcgtgcataacttgagatatgatatgggtagtccttgtccaattaccatcacttgccccaaaggttgtttcgtgtgctgtcatgttcttgatgaatgttggagcagtggatgcatgctgtcaagttttttttgtcattgcaattttttttgtagttcaatttttttttctaaatggaggggtagtgcccgccgtctcgcagttccgcctgctttcg

SEQ ID NO: 84518 - DNA, 2296 bp, Zea Mays
cgcagcccgacttcgcctcacctcgccacgcttgggattcccgcagggatccaatttctggtgaatcttccgtacttctaattcctgaaatatgagaagattctttttctttgggtcctccgctgcaaatgctggcgacgaaaacgggacaccgggcagtgatagcgggactacgcataaaaagacactggtggcagatgtgggcaacgaaagttctggttcctgcagcacaaggttgtcaagatccagaagccgtggtcaaaagcggaataaggaggaaccagccaatccgaagcagctcaggaggtccatgtcattctcgtctccggccacaaacacttgcttagacgaacgatgctttagtttctctggtgatgttccatgcactttgtatgatggatttgatgcacctcagaatgtcaaagatgttgcccccaacatatggtcaccagaaggaaatccagttttgagagaatatgcaataaatatcccaaaagatcattcttccatggaaaacgattctcctcgttcaagatgttgttcatgctcggcagggcactctcctgttagctctcccattgctcttcgatgcaggtcaacaagactaagcaatctattaagcaagaatgaagtactagatcgatacattgatagagggcatgaagatgcaatggtaaatgagaaacagaggcagtatccctccgccgcatctatggtttctactttgggaaggccacctcgaccccaatcaacagtaccatccataccaaaatcaatgaaagggaatacagagtgctacccagatgtagacataaaagaagactgcctttggcaagttgctcaagagggtacaagagataactgcaagattacaactatgtgcgatgcaggtagaaaccacgtaagcatgccagatgcttttgagagagacagtgctacatctgttgtagatatttgtgaagatttgcaagaagtgagacctccaaatgttatttgcccctccgcttgtcctatttcaggggagcaagaaaccaatgacatgttgctgcaaagagctaaagaagttgagtcaaggttcattgttcattgtggagatgaatatgaattcaacattatcagagataagcgaatgagctcaaatgacatgtttcagttgatccagcagttgacagaagataggaaacagttaacgcatgaactgtcttcacatataagagcacacgttgcagaaagatctgctgccaaacagcaatacaaacaatcaaagaaagaactagataccagaactaggaggttggagaaggagaagagtgaaagacaaactacactggagagagagatggacagaaggtcacatgattggtctgtcaaactatcaagatttcaatctgaagaagagagactacatgaacgggtgagagaacttgcagagcagaatgtgtcatttcaaagagaagttgcctttcttgaagcaaataaggctgaagcttcaaccaaagttgctagtttggaattgcaaaacaacaaattaaatgacgatctagagaaacttagaaacgagcatgagaagctccataattcctcagtagataaggatgctcgttttgctgaggttgttgaggaaagggaccacaccagggaatacttgaaggacaaggagggagagaacaaagcattgcacaaagtgattgccagactacaaacaacatgtaatgaacaggaaagagcaatcacaagtctaagacagggatgcaaagctcaattagacaagaaatttgttgagtgtgacagtgataaaatgaggaaattgcgaatggaactgattagactgacaggggtggagcaaaagttgagatgtgaaattcgttcttgtcatcttgaagttgggtccctcagacaagagaacattgcactcttaaatcgtttacaagttgttggaaatggagcacccttctcaattcgccttgaccaagagcttcaggctagagtggacaacctgcaggtgcaaggcttgtcattgcttaataagaccagccaactttgcaccaaattgttggatttgatgaaacacaagaaacttgaaaatgagtctttcagtggcaatgatgtgttgatagtcagtaattacacttttgagtaccaaagcatcaaaggaggaattgaaagtttgaagcgaagtttgaagacaataaattctgtactgaatgaaaagcaaagtgtaaaagaaaaatctggtgagactgcagctagaggtagttcttccagggagcaaacgtatttgtcaagtgtagaggag

SEQ ID NO: 84519 - DNA, 1785 bp, Zea Mays
ccgtactgtactgctcgtcgtcaaatcaaaggaaaattgaacgaaagcagcccaaccaaaatcccctcgccgcatctccccttcctgttcccgtgttccgttccgtcccgtccctgctcgacttctcgcgtcccgacgtcgcctcaatctcgaagcctctccggcgcagccgccgcaatctcgactccaaggcctctccgaccaaaattcatctagggttttcgcttcgtccgtcgcgatgggctccaagaagcggtcgccccagcatcccgcgtccccagccggcggagaggtcggtgctcaggcggcggggaaggccacgccggtgacggcggcgccggaaacggcgcccgtggcggtggtgccgaagcctcccgacgtggcgccattcctgaccaaggtctacgacatggtctccgacccggccaccgacgcggtcatctcctggagcgccggcggcggcagcttcgtgatctgggactcgcacgtttttgagcgcgacctgcttccgcgacacttcaagcacaaccacttcaccagcttcatacgccagctcaacacctacggatttcataaagttgatccagatagatgggaatgggccaatgaaggttttattaagggccaaaaacatcttctgaagaccatcaagagaaagaagaaatcctctcaggatgtacctagtgatctgcagtcggtgcctgtcaaaactgcacctggcactgagaatatcgagataggaaaatatggaggccttgaaaaggaggttgagacacttaagagggacaaggcccttctaatgcagcagcttgtagatttaaggcagtaccagcaaacatctagtcttgaagtgcagagtttaattcaacgcctccgtgtgatggaacagaaccagcagcagatgatggcacttttggcaatagttgtccacaatccggatttcctcaaccagctcgtgcagcagcagtgcaggagtaactggtggaatgatgatgggaacaggaaaagaaggttccaagctttggaacatggccctgtagatgattctgagacttctggtggaggcgcgcaaattattcaatattgtcctcctgttcctgaaacttccaatcaaccaacaccagcaaatgaagctttctgttcaagccctgtacaatcagtttcaagccatgcacttgagatgcccatggatgtagaaatggcttcaaacaatgttggtacacttgattcaactgggaatgattttactgacacctctgctctatgtgaatgggatgacatggatatatttggtggcggactagagcacatccttcaacagacagagcaagactttcaagtggaccctctaacaattgaagattacggttatgaccgtccatggttagagcaggactgccaggtagaagcgcaacagaattgcaaaaatcctcaatatgctgatgtcataactgaagcatgagcggtggtcccagagaattttgtccaataactttctgcagatttgtggtgaacagaatcttgagactggcaggttagccaccattgggaacctgaagaccgggattgctcagaatttactatactgatactaaaaaaatacagtaactcatattggtaaggcataattcgtttttcgtattcgctcgatcaaggcaacaggacaagggttttgtttttgtcccaggtctcattgtcctagccacacccataacacaaggtagcattgctcatgttgtatagaatatcgtattggatgaatgaagcacttttgaactttttttt

SEQ ID NO: 84520 - DNA, 2008 bp, Zea Mays
ccgtactgtactgctcgtcgtcaaatcaaaggaaaattgaacgaaagcagcccaaccaaaatcccctcgccgcatctccccttcctgttcccgtgttccgttccgtcccgtccctgctcgacttctcgcgtcccgacgtcgcctcaatctcgaagcctctccggcgcagccgccgcaatctcgactccaaggcctctccgaccaaaattcatctagggttttcgcttcgtccgtcgcgatgggctccaagaagcggtcgccccagcatcccgcgtccccagccggcggagaggtcggtgctcaggcggcggggaaggccacgccggtgacggcggcgccggaaacggcgcccgtggcggtggtgccgaagcctcccgacgtggcgccattcctgaccaaggtctacgacatggtctccgacccggccaccgacgcggtcatctcctggagcgccggcggcggcagcttcgtgatctgggactcgcacgtttttgagcgcgacctgcttccgcgacacttcaagcacaaccacttcaccagcttcatacgccagctcaacacctacggatttcataaagttgatccagatagatgggaatgggccaatgaaggttttattaagggccaaaaacatcttctgaagaccatcaagagaaagaagaaatcctctcaggatgtacctagtgatctgcagtcggtgcctgtcaaaactgcacctggcactgagaatatcgagataggaaaatatggaggccttgaaaaggaggttgagacacttaagagggacaaggcccttctaatgcagcagcttgtagatttaaggcagtaccagcaaacatctagtcttgaagtgcagagtttaattcaacgcctccgtgtgatggaacagaaccagcagcagatgatggcacttttggcaatagttgtccacaatccggatttcctcaaccagctcgtgcagcagcagtgcaggagtaactggtggaatgatgatgggaacaggaaaagaaggttccaagctttggaacatggccctgtagatgattctgagacttctggtggaggcgcgcaaattattcaatattgtcctcctgttcctgaaacttccaatcaaccaacaccagcaaatgaagctttctgttcaagccctgtacaatcagtttcaagccatgcacttgagatgcccatggatgtagaaatggcttcaaacaatgttggtacacttgattcaactgggaatgattttactgacacctctgctctatgtgaatgggatgacatggatatatttggtggcggactagagcacatccttcaacagacagagcaagactttcaagtggaccctctaacaattgaagattacggttatgaccgtccatggttagagcaggactgccaggtagaagcgcaacagaattgcaaaaatcctcaatatgctgatgtcataactgaagcatgagcggtggtcccagagaattttgtccaataacggtcaagcattcatttgactccttaactatacaatagcttccttccaaaacacaggtcagtactgactgcttttctatatatcataattacgggttgacctgtccatatctcttgcataagcaactcctctagcatcaaaatgcattttgatgtatgatgtgggtctgtttgatttttctttcattgttccccacccagaatctacttctttacgactgccagctttggcaggcacgtatttctttctttgacactgagtaaatgagcttaccttattgtatgataaataactaaaaatggataagtgatcgagtatttcttgtaagtgtgtaacgacatataaaaaactggacagggagggtaagaccatcctcatgatatttcattaatagaaggccgcggcaacggtcacaaccgagaaacccccgagccctatcctgtatcctcccatcactaacaggccgattcaagctgcctactctgcaaaggcccacccaggcccgagagtggcgca

SEQ ID NO: 84521 - DNA, 2821 bp, Zea Mays
gagccgcagccgcaggacgcggcagagccctgccagcggtgtcagtgactcgtaatcgctgcctgacccatggccaatcgcgtgatttgctttactaatcacgcttagcgatctagtctcctcttcatcccacctcttctccctccctgcttcgctgttccctttccccgcccctacctggggcatctgcctctgaatcgcggcggctcccgaggcgccgcctggcgagcggctaggcgccggtctacggcgacgatggaggtgtgatttggacgggagagagcgtggtggtgaggtctcggttttctcgatataggagatggcggcggcaaaggcgcggggaggggagttccccgtgggcatgaaggtgctggttgtggacgacgacccgacgtgcctcgttgtgctcaagaggatgctccttgagtgccgatatgacgtgacaacatgtcctcaggctacaagagcactaactatgttgcgagagaataggcgtggttttgatgttataataagtgatgtccacatgccggatatggacggattcaggctacttgaacttgtaggccttgagatggaccttccagttatcatgatgtctgctgattcaagaacggatattgtaatgaacggaattaagcatggagcatgtgactatttaataaaacctgtcagaatggaggagctgaaaaacatctggcaacatgttattaggaaaaaatttaatgaaaacaaggaccatgagcattctggtagcctagatgacaccgatcgtaacagaccaaccaataatgataatgaatacgcttcctccgcgaatgatggaggtgatggcagctggaaatctcagagaaagaaaagagagaaagaagatgatgaaactgacctcgaaaatggtgatccttcttctacatcaaagaaaccaagagttgtttggtcagttgagcttcatcaacaatttgtgaatgcagtcaatcacctcgggatagacaaagctgtcccaaagaaaattttggaattgatgaatgtcccaggcttaaccagggaaaatgttgccagccatttgcagaaattcagactctacctgaagagaattgctcagcatcatgcaggaatacctcatccatttgttgcgcctgtatctagtgctaacgttgctccgttaggaggactggaattccaagctttggctgcttctggtcagatccctcctcaagctctggctgctttgcaggatgaactccttggtcgacctacaagcagtttggcgttgcctggaagggaccagtcatctttgcgagtggctgcaatcaaaggaaacaagcaccatgaagaaagagaaatagcatttggtcaacccatatacaagtgtcagaataatgcatatggtgcattccctcaaaacagcccagcagttggaggattgcaaccttttgcagcttggcccaataacaaagttggtatgactgattcaacaagcacattgggaaatgtgggcaattctcaaaatagcaatatgctattgcatgaattgcagcaacagccagacaccttgctgttaggaacccttcacaatattgatgccaaaccttctggtgtagttatgccatctcagtcgttaaatacattcccggctagtgagggtatctcacctaatcaaaatcccttgattataccatctcaacccccaagttttgtgtcatcaattcctccatccatgaaacatgaatctcttcttggattaccttcaacgtcaaccagtctgttgggcgggcttgatatggttaatcaagcttcaacaagtcaggctttgattagtagccatggaacaaatcttcctggtctcatgaaccgtagctcaaatgcaatcccttcaccaggaattagtaattttcaaagtggaaatattcattatgttgttaatcagaacgctatgggagttagctctaagccaccaggtgttctaaagaccgagagcactgactcactgagttgtagttatggctatattggtggtagcaccagtgtggactctggcttgttctcttctcagtccaaaaatccacagtatgatctactgcagaatcaaaatgatgttaacggcagctggtcgccttcacaagattttgatagttttggaaattctcttgggcaaggccaccctggtaccacttcatctaacttccagagttccgcccttgggaagttgcctgaccaaggacgagggagaaatcatgggtttgtcgggaaaggcacttgcattccaagccgctttgcagtggatgaggttgaatctccaactaacaacttgagccacagcattggaaacagtggagacatagtgaaccccgacatatttggatttagtggacatatgtgaaactttcttgaatttgtaagtagcgttgatcagtgagcactggaaacaaatctagtggtttgatgaatggttgctagtaatttcgtttcttcttcttttttcttctgtaattggtttataaagggaataatctatgtggcagcatgtggaatcttactttatagaagtttgttcagttcaaaggacttaaaattgattttgggccttacaatgtctcagttattcagctactcctgtttgaagttttcttttccccttttgcagtgcactcctgttttaaggttgaacagatagacaccgatcgcattacgatgaaacattagccgtaactgaaataccaaattctagatgtactaggtcagtacccgtgcattgcaacgggaacatataataccatgataacttatatacaaaatgtgtcttatattgttataagaaaat

SEQ ID NO: 84522 - DNA, 2437 bp, Zea Mays
cgcccctacctggggcatctgcctctgaatcgcggcggctcccgaggcgccgcctggcgagcggctaggcgccggtctacggcgacgatggaggtgtgatttggacgggagagagcgtggtggtgaggtctcggttttctcgatataggagatggcggcggcaaaggcgcggggaggggagttccccgtgggcatgaaggtgctggttgtggacgacgacccgacgtgcctcgttgtgctcaagaggatgctccttgagtgccgatatgacgtgacaacatgtcctcaggctacaagagcactaactatgttgcgagagaataggcgtggttttgatgttataataagtgatgtccacatgccggatatggacggattcaggctacttgaacttgtaggccttgagatggaccttccagttatcatgatgtctgctgattcaagaacggatattgtaatgaacggaattaagcatggagcatgtgactatttaataaaacctgtcagaatggaggagctgaaaaacatctggcaacatgttattaggaaaaaatttaatgaaaacaaggaccatgagcattctggtagcctagatgacaccgatcgtaacagaccaaccaataatgataatgaatacgcttcctccgcgaatgatggaggtgatggcagctggaaatctcagagaaagaaaagagagaaagaagatgatgaaactgacctcgaaaatggtgatccttcttctacatcaaagaaaccaagagttgtttggtcagttgagcttcatcaacaatttgtgaatgcagtcaatcacctcgggatagacaaagctgtcccaaagaaaattttggaattgatgaatgtcccaggcttaaccagggaaaatgttgccagccatttgcagaaattcagactctacctgaagagaattgctcagcatcatgcaggaatacctcatccatttgttgcgcctgtatctagtgctaacgttgctccgttaggaggactggaattccaagctttggctgcttctggtcagatccctcctcaagctctggctgctttgcaggatgaactccttggtcgacctacaagcagtttggcgttgcctggaagggaccagtcatctttgcgagtggctgcaatcaaaggaaacaagcaccatgaagaaagagaaatagcatttggtcaacccatatacaagtgtcagaataatgcatatggtgcattccctcaaaacagcccagcagttggaggattgcaaccttttgcagcttggcccaataacaaagttggtatgactgattcaacaagcacattgggaaatgtgggcaattctcaaaatagcaatatgctattgcatgaattgcagcaacagccagacaccttgctgttaggaacccttcacaatattgatgccaaaccttctggtgtagttatgccatctcagtcgttaaatacattcccggctagtgagggtatctcacctaatcaaaatcccttgattataccatctcaacccccaagttttgtgtcatcaattcctccatccatgaaacatgaatctcttcttggattaccttcaacgtcaaccagtctgttgggcgggcttgatatggttaatcaagcttcaacaagtcaggctttgattagtagccatggaacaaatcttcctggtctcatgaaccgtagctcaaatgcaatcccttcaccaggaattagtaattttcaaagtggaaatattcattatgttgttaatcagaacgctatgggagttagctctaagccaccaggtgttctaaagaccgagagcactgactcactgagttgtagttatggctatattggtggtagcaccagtgtggactctggcttgttctcttctcagtccaaaaatccacagtatgatctactgcagaatcaaaatgatgttaacggcagctggtcgccttcacaagattttgatagttttggaaattctcttgggcaaggccaccctggtaccacttcatctaacttccagagttccgcccttgggaagttgcctgaccaaggacgagggagaaatcatgggtttgtcgggaaaggcacttgcattccaagccgctttgcagtggatgaggttgaatctccaactaacaacttgagccacagcattggaaacagtggagacatagtgaaccccgacatatttggatttagtggacatatgtgaaactttcttgaatttgtaagtagcgttgatcagtgagcactggaaacaaatctagtggtttgatgaatggttgctagtaatttcgtttcttcttcttttttcttctgtaattggtttataaagggaataatctatgtggcagcatgtggaatcttactttatagaagtttgttcagttcaaaggacttaaaattgcctagtcgatttattcccggccatatatta

SEQ ID NO: 84523 - DNA, 1894 bp, Zea Mays
accatggatacatgattagtacttccatcaaactggaaaccttatctggtctgtcaacgtgttggtgatattatcctattttggggtttgcccattttgacatacaagtaaaaaaattgggcaattctaagcaccttccattgatcatggttcgggcagtttcttcagttacatctggagctgctaagttgcatgatttaagtgcacctatcttgactagtcaaacaaagtatctcgagctcctagctagatactatgttcgcaagggggagcgtattgctgctgccaggatgtttttaatattggcagagagacagtgctccaattctgaagaagttccaactcttgacaagaggtatgaatatctcagagatgcagtgcttcaggccaaaagcgcaggcatagaggctgattcgtctagaaaacctattgacagtagcacagtggatttgcttgaaggcaaacttaccgtgctacgcttccaaatgcaaatcaaacaagaattggagctcatgactgcacgggttgaaaatatttcgagcagttctgaatcccctagtggtctgttccctcgtgacaacattcttgctgatgcagaggctgctaaggctgctaaggataaggcaaaagaactatcattgaatctcaagagcatcactcaactgtataatgattatgctgttccatttgagctctgggagacttggcatgcttttttgttaggtttgcctggaaatgctgagcttcgctaattactctggagatgctgatagcaaaattcttcgagaaatttgggctagactccttgatgaggcacttacaaaaggtggtgttgcagaagcatgttctgtagtgaaaagagtaggctcgaaacttgatcctgcagatggagcttgtttacctttagatataatatgccttcatcttgagaaggctgcattggatagattaagttcaggagaagaattagtcggtgatgatgatgttgcaagagctcttcttggtgcatgtaaaggtcttcctgaacctgtacttgctgtgtatgatcaactgttattgaacggtgcaataataccctcactaaatctgaagttgcgcttgctgcgatcagttcttgcgatcctccgtgagtgggggatatctgtcattgcacataggcttggcaccacaagtactggggcttcaatctttcttgatggaacattttcactgaaccaaacagggactgcgaatcaaggtgctcgagataaaataattagtttggctaacaggtacatgactgaggtgaggcgattaaaccttccacagaaccaaacggagaatgtctaccgtggtttccgtgaacttgaggagaaattactatctccttattaggcaattttcagttgttcttcaagattgtaaaagaagagtcgaaggctctggattcactgcagcatgatctctattgttctgtacatatatctgcaagaacccaaggcttctttaatcattattaattagaggttattcatgacggtgtgcagccttcttttatttgacttagagccagtatggattacagagctgttgttgtggaaattgtctagctgtcttcattacttcttaataatcttttggtagatgctgttgatcctgttttacctgaatttaggaaacagctagagaactcaggcaggactttccaccagaaatacaagttggttttcatgttggaaatcgaaatttagtatgtaccatgacattgtacagttcgttagtagattatttagagtgttgtaagccttgtagcttatgtttttgttggcatcaaggtatcattcctgtagctgaaaaataaacgttatattgtcagaaatatggaattctaggttgtttttgttccattcgtttg

SEQ ID NO: 84524 - DNA, 4875 bp, Zea Mays
cagcagttatccagggagattcgtgtcattgtttcccccagtggaatggggtggtgaagaatcgatgaatgaagtggcctcctttggtggaagttgcagaaattcgtcaactccctcctatgttgattgaaagatataacacagctgctggtgaaggaacagctctttgtgggattttttctgacatacatcgggcctgggcaacagttgacaattcatttttcgtctggcattttgataaatgggatgggcagtgccaagagcataatgtcgatgagcaagcaatttgtgctgttggccttgctagggcaaagtctgggattttcattgaagccattcaataccttttagttttagcaacacctgttgagctgatacttgttggagcttgctgttctgctagtgctgatggaacagacccatacgctgagctttcattacaacctttacctgagtacatgattgccactgatggtgtcacaatgacatgcatcacatgtacagaaaagggccaaatttttctagctggtcgtgatggccatatatatgaattgcagtatacaactggttcaggttggcgtaaacgctgccgtaaagtttgtcttactactggtattggcagccttctttctaggtgggtagtgccaaacacattcaaattttcaactgttgatccaatagttgatatggtcatggatgaggagagaaatactatctatacgcgtactgagggcatgaaaatgcaattatttgatctaggagctaatggtgatggccctttgacaaaaattactgaagaaaagaacattgttgatccactggatgcaccttatggtggccggaggactaatgcaccgccaccaagaactgcacgatcaccaaaaccatcaattgtttgcatctcacctctatccgctatggaatcgaaatggctccatgctgttgttgttttatcagatgggaagagattattcctcactacatcaggtgggattggttcttcagttggattgaacagtggtctgcggaggcccacctgtttaaaaattgttgctactaggccgtccccacctctgggggttggtggcgggcttacatttggtgctgtttctgcagctggcagagttcatcctgaggacctagctttgaaagttgagtctgcgttctattctgctggtgctcttataatgtcagattcatccgctacagccatgtcatctctgctggctgtgcagaaaggttcagctgcacagctatcccttcccagtacctttggaacagcttctagagcctcccgagctctacgggaaacagtatctgctttgcctgttgagggtcgaatgctttgtgcctctgatgttttaccacttcctgacgctgcttacatgttgcagtctttgtatgctgatgtggaatgcttcacaggtttcagaaaaccttttgagaaggcatgtataaaactttgggcaaaaggagatcttcctacccagcatatcttgcctcggaggagggttgttgtattcaatactatgggtttgatggaggtaatttttaacaggcctgttgatattctaaggaaattgtttgatgggaacaccttgagatcacaaatcgaagaattctttaatcgctttggtgctggagaggctgctgcaatgtgcttaatgatagctgcgaagctactttatgctgaagatagtctgataagcaattctgtttctgagaaagccgctgaggcatttgaggaccctgggcttgttgggatgcctcaaattgctggtaccactgctttatctaatacacgaactcaggctggaggctttagtatgggccaagttgttcaagaagcagaacctttgttttctggtgcatatgaagggctttgtttgtgctcgtcaagactactttatcccatatgggagtttcctattatggtgattcgaagaccggctggtactaataaatgcgaggatggtgtaattgtttgcaggctttcagctggggccatggaaattcttgagagcaagattcattcactggaaacatttttaagatctagaagaaataagagaaggggcctttatggttatgttgccggccttggtgattctggttccatactctacaaaacagggcctattattggtcctggagggcatagcaatgggaggagtccatataactcccaaattcaagatatggaccctgcggacaaatcagcatcaaataaaaagccaaggttgctttatacatcagcagaactagccgctatggaggtgagggcaatggagtgtcttaggcggttgcttaggagatctggtgaagcactctttctgcttcaacttatttgccagcataatgttgcccgcttggctcagacactgggcaatgatttacacaagaaattagttcaattaacatttcatcagttggtatgttcagaagatggtgatcagcttgcaatgtgtcttatttctgcactcatggagtactatattggcccagagggcagaggaactgttgaagaaattagcactaaattgaaggagggttgccctagttacttcaatgaatcagattacaaatattacttggcagtggagtgccttgagagagcagcatctatggctaataaccctgatgagagagatattcttgctagagatgctttcaaccttttgactaaaattccagaatctgctgatttgagtgccatatgcaagagatttgagaacctaagattttatgaggctgtagtccggttgcctctgcagaaagctcaagcacttgactccaatgctgatattaccaatggtcaaattgatccaaggcatcatgataccataatgttgcagcgtgaacaatgctatgagattgttatgaatgctctgcgcactctcaagggcgtcgggcatagtcgaatgcaaagtgcagacaagtcatctggtgtagcaactgctgttgatccagcttctcgaaccaagtatatcaaacaaattctccaacttagtgtccaatggccagacacagttttccatgaacatctatacaagacacttattgagctcggtctggaaaatgagcttttggagtatggtggttctgatttggcttcttttctgcagagtgctggtcgtaagcatcaagaagaggttcgggcagtttcttcagttacatctggagctgctaagttgcatgatttaagtgcacctatcttgactagtcaaacaaagtatctcgagctcctagctagatactatgttcgcaagggggagcgtattgctgctgccaggatgtttttaatattggcagagagacagtgctccaattctgaagaagttccaactcttgacaagaggtatgaatatctcagagatgcagtgcttcaggccaaaagcgcaggcatagaggctgattcgtctagaaaacctattgacagtagcacagtggatttgcttgaaggcaaacttaccgtgctacgcttccaaatgcaaatcaaacaagaattggagctcatgactgcacgggttgaaaatatttcgagcagttctgaatcccctagtggtctgttccctcgtgacaacattcttgctgatgcagaggctgctaaggctgctaaggataaggcaaaagaactatcattgaatctcaagagcatcactcaactgtataatgattatgctgttccatttgagctctgggaggtttgcctggaaatgctgagcttcgctaattactctggagatgctgatagcaaaattcttcgagaaatttgggctagactccttgatgaggcacttacaaaaggtggtgttgcagaagcatgttctgtagtgaaaagagtaggctcgaaacttgatcctgcagatggagcttgtttacctttagatataatatgccttcatcttgagaaggctgcattggatagattaagttcaggagaagaattagtcggtgatgatgatgttgcaagagctcttcttggtgcatgtaaaggtcttcctgaacctgtacttgctgtgtatgatcaactgttattgaacggtgcaataataccctcactaaatctgaagttgcgcttgctgcgatcagttcttgcgatcctccgtgagtgggggatatctgtcattgcacataggcttggcaccacaagtactggggcttcaatctttcttgatggaacattttcactgaaccaaacagggactgcgaatcaaggtgctcgagataaaataattagtttggctaacaggtacatgactgaggtgaggcgattaaaccttccacagaaccaaacggagaatgtctaccgtggtttccgtgaacttgaggagaaattactatctccttattaggcaattttcagttgttcttcaagattgtaaaagaagagtcgaaggctctggattcactgcagcatgatctctattgttctgtacatatatctgcaagaacccaaggcttctttaatcattattaattagaggttattcatgacggtgtgcagccttcttttatttgacttagagccagtatggattacagagctgttgttgtggaaattgtctagctgtcttcattacttcttaataatcttttggtagatgctgttgatcctgttttacctgaatttaggaaacagctagagaactcaggcaggactttccaccagaaatacaagttggttttcatgttggaaatcgaaatttagtatgtaccatgacattgtacagttcgttagtagattatttagagtgttgtaagccttgtagcttatgtttttgttggcatcaaggtatcattcctgtagctgaaaaataaacgttatattgtcagaaatatggaattctaggttgtttttgttccattcgtttg

SEQ ID NO: 84525 - DNA, 4744 bp, Zea Mays
atggcgtggggagaggacgaggctatcggccccgacgtggcctcggcgggtcttcacgtctcggagcggatcggccgcgacgccgccgcgcagcccgacctggaggaggcccttgaagcctcgcgctacgcgtctcacccctactcctcgcaccccaaggaatggcctcctttggtggaagttgcagaaattcgtcaactccctcctatgttgattgaaagatataacacagctgctggtgaaggaacagctctttgtgggattttttctgacatacatcgggcctgggcaacagttgacaattcatttttcgtctggcattttgataaatgggatgggcagtgccaagagcataatgtcgatgagcaagcaatttgtgctgttggccttgctagggcaaagtctgggattttcattgaagccattcaataccttttagttttagcaacacctgttgagctgatacttgttggagcttgctgttctgctagtgctgatggaacagacccatacgctgagctttcattacaacctttacctgagtacatgattgccactgatggtgtcacaatgacatgcatcacatgtacagaaaagggccaaatttttctagctggtcgtgatggccatatatatgaattgcagtatacaactggttcaggttggcgtaaacgctgccgtaaagtttgtcttactactggtattggcagccttctttctaggtgggtagtgccaaacacattcaaattttcaactgttgatccaatagttgatatggtcatggatgaggagagaaatactatctatacgcgtactgagggcatgaaaatgcaattatttgatctaggagctaatggtgatggccctttgacaaaaattactgaagaaaagaacattgttgatccactggatgcaccttatggtggccggaggactaatgcaccgccaccaagaactgcacgatcaccaaaaccatcaattgtttgcatctcacctctatccgctatggaatcgaaatggctccatgctgttgttgttttatcagatgggaagagattattcctcactacatcaggtgggattggttcttcagttggattgaacagtggtctgcggaggcccacctgtttaaaaattgttgctactaggccgtccccacctctgggggttggtggcgggcttacatttggtgctgtttctgcagctggcagagttcatcctgaggacctagctttgaaagttgagtctgcgttctattctgctggtgctcttataatgtcagattcatccgctacagccatgtcatctctgctggctgtgcagaaaggttcagctgcacagctatcccttcccagtacctttggaacagcttctagagcctcccgagctctacgggaaacagtatctgctttgcctgttgagggtcgaatgctttgtgcctctgatgttttaccacttcctgacgctgcttacatgttgcagtctttgtatgctgatgtggaatgcttcacaggtttcagaaaaccttttgagaaggcatgtataaaactttgggcaaaaggagatcttcctacccagcatatcttgcctcggaggagggttgttgtattcaatactatgggtttgatggaggtaatttttaacaggcctgttgatattctaaggaaattgtttgatgggaacaccttgagatcacaaatcgaagaattctttaatcgctttggtgctggagaggctgctgcaatgtgcttaatgatagctgcgaagctactttatgctgaagatagtctgataagcaattctgtttctgagaaagccgctgaggcatttgaggaccctgggcttgttgggatgcctcaaattgctggtaccactgctttatctaatacacgaactcaggctggaggctttagtatgggccaagttgttcaagaagcagaacctttgttttctggtgcatatgaagggctttgtttgtgctcgtcaagactactttatcccatatgggagtttcctattatggtgattcgaagaccggctggtactaataaatgcgaggatggtgtaattgtttgcaggctttcagctggggccatggaaattcttgagagcaagattcattcactggaaacatttttaagatctagaagaaataagagaaggggcctttatggttatgttgccggccttggtgattctggttccatactctacaaaacagggcctattattggtcctggagggcatagcaatgggaggagtccatataactcccaaattcaagatatggaccctgcggacaaatcagcatcaaataaaaagccaaggttgctttatacatcagcagaactagccgctatggaggtgagggcaatggagtgtcttaggcggttgcttaggagatctggtgaagcactctttctgcttcaacttatttgccagcataatgttgcccgcttggctcagacactgggcaatgatttacacaagaaattagttcaattaacatttcatcagttggtatgttcagaagatggtgatcagcttgcaatgtgtcttatttctgcactcatggagtactatattggcccagagggcagaggaactgttgaagaaattagcactaaattgaaggagggttgccctagttacttcaatgaatcagattacaaatattacttggcagtggagtgccttgagagagcagcatctatggctaataaccctgatgagagagatattcttgctagagatgctttcaaccttttgactaaaattccagaatctgctgatttgagtgccatatgcaagagatttgagaacctaagattttatgaggctgtagtccggttgcctctgcagaaagctcaagcacttgactccaatgctgatattaccaatggtcaaattgatccaaggcatcatgataccataatgttgcagcgtgaacaatgctatgagattgttatgaatgctctgcgcactctcaagggcgtcgggcatagtcgaatgcaaagtgcagacaagtcatctggtgtagcaactgctgttgatccagcttctcgaaccaagtatatcaaacaaattctccaacttagtgtccaatggccagacacagttttccatgaacatctatacaagacacttattgagctcggtctggaaaatgagcttttggagtatggtggttctgatttggcttcttttctgcagagtgctggtcgtaagcatcaagaagaggttcgggcagtttcttcagttacatctggagctgctaagttgcatgatttaagtgcacctatcttgactagtcaaacaaagtatctcgagctcctagctagatactatgttcgcaagggggagcgtattgctgctgccaggatgtttttaatattggcagagagacagtgctccaattctgaagaagttccaactcttgacaagaggtatgaatatctcagagatgcagtgcttcaggccaaaagcgcaggcatagaggctgattcgtctagaaaacctattgacagtagcacagtggatttgcttgaaggcaaacttaccgtgctacgcttccaaatgcaaatcaaacaagaattggagctcatgactgcacgggttgaaaatatttcgagcagttctgaatcccctagtggtctgttccctcgtgacaacattcttgctgatgcagaggctgctaaggctgctaaggataaggcaaaagaactatcattgaatctcaagagcatcactcaactgtataatgattatgctgttccatttgagctctgggaggatagattaagttcaggagaagaattagtcggtgatgatgatgttgcaagagctcttcttggtgcatgtaaaggtcttcctgaacctgtacttgctgtgtatgatcaactgttattgaacggtgcaataataccctcactaaatctgaagttgcgcttgctgcgatcagttcttgcgatcctccgtgagtgggggatatctgtcattgcacataggcttggcaccacaagtactggggcttcaatctttcttgatggaacattttcactgaaccaaacagggactgcgaatcaaggtgctcgagataaaataattagtttggctaacaggtacatgactgaggtgaggcgattaaaccttccacagaaccaaacggagaatgtctaccgtggtttccgtgaacttgaggagaaattactatctccttattaggcaattttcagttgttcttcaagattgtaaaagaagagtcgaaggctctggattcactgcagcatgatctctattgttctgtacatatatctgcaagaacccaaggcttctttaatcattattaattagaggttattcatgacggtgtgcagccttcttttatttgacttagagccagtatggattacagagctgttgttgtggaaattgtctagctgtcttcattacttcttaataatcttttggtagatgctgttgatcctgttttacctgaatttaggaaacagctagagaactcaggcaggactttccaccagaaatacaagttggttttcatgttggaaatcgaaatttagtatgtaccatgacattgtacagttcgttagtagattatttagagtgttgtaagccttgtagcttatgtttttgttggcatcaaggtatcattcctgtagctgaaaaataaacgttatattgtcagaaatatggaattctaggttgtttttgttccattcgtttg

SEQ ID NO: 84526 - DNA, 4959 bp, Zea Mays
ccgctactcgcgttttgccgcaacgcgaccatggcgtggggagaggacgaggctatcggccccgacgtggcctcggcgggtcttcacgtctcggagcggatcggccgcgacgccgccgcgcagcccgacctggaggaggcccttgaagcctcgcgctacgcgtctcacccctactcctcgcaccccaaggaatggcctcctttggtggaagttgcagaaattcgtcaactccctcctatgttgattgaaagatataacacagctgctggtgaaggaacagctctttgtgggattttttctgacatacatcgggcctgggcaacagttgacaattcatttttcgtctggcattttgataaatgggatgggcagtgccaagagcataatgtcgatgagcaagcaatttgtgctgttggccttgctagggcaaagtctgggattttcattgaagccattcaataccttttagttttagcaacacctgttgagctgatacttgttggagcttgctgttctgctagtgctgatggaacagacccatacgctgagctttcattacaacctttacctgagtacatgattgccactgatggtgtcacaatgacatgcatcacatgtacagaaaagggccaaatttttctagctggtcgtgatggccatatatatgaattgcagtatacaactggttcaggttggcgtaaacgctgccgtaaagtttgtcttactactggtattggcagccttctttctaggtgggtagtgccaaacacattcaaattttcaactgttgatccaatagttgatatggtcatggatgaggagagaaatactatctatacgcgtactgagggcatgaaaatgcaattatttgatctaggagctaatggtgatggccctttgacaaaaattactgaagaaaagaacattgttgatccactggatgcaccttatggtggccggaggactaatgcaccgccaccaagaactgcacgatcaccaaaaccatcaattgtttgcatctcacctctatccgctatggaatcgaaatggctccatgctgttgttgttttatcagatgggaagagattattcctcactacatcaggtgggattggttcttcagttggattgaacagtggtctgcggaggcccacctgtttaaaaattgttgctactaggccgtccccacctctgggggttggtggcgggcttacatttggtgctgtttctgcagctggcagagttcatcctgaggacctagctttgaaagttgagtctgcgttctattctgctggtgctcttataatgtcagattcatccgctacagccatgtcatctctgctggctgtgcagaaaggttcagctgcacagctatcccttcccagtacctttggaacagcttctagagcctcccgagctctacgggaaacagtatctgctttgcctgttgagggtcgaatgctttgtgcctctgatgttttaccacttcctgacgctgcttacatgttgcagtctttgtatgctgatgtggaatgcttcacaggtttcagaaaaccttttgagaaggcatgtataaaactttgggcaaaaggagatcttcctacccagcatatcttgcctcggaggagggttgttgtattcaatactatgggtttgatggaggtaatttttaacaggcctgttgatattctaaggaaattgtttgatgggaacaccttgagatcacaaatcgaagaattctttaatcgctttggtgctggagaggctgctgcaatgtgcttaatgatagctgcgaagctactttatgctgaagatagtctgataagcaattctgtttctgagaaagccgctgaggcatttgaggaccctgggcttgttgggatgcctcaaattgctggtaccactgctttatctaatacacgaactcaggctggaggctttagtatgggccaagttgttcaagaagcagaacctttgttttctggtgcatatgaagggctttgtttgtgctcgtcaagactactttatcccatatgggagtttcctattatggtgattcgaagaccggctggtactaataaatgcgaggatggtgtaattgtttgcaggctttcagctggggccatggaaattcttgagagcaagattcattcactggaaacatttttaagatctagaagaaataagagaaggggcctttatggttatgttgccggccttggtgattctggttccatactctacaaaacagggcctattattggtcctggagggcatagcaatgggaggagtccatataactcccaaattcaagatatggaccctgcggacaaatcagcatcaaataaaaagccaaggttgctttatacatcagcagaactagccgctatggaggtgagggcaatggagtgtcttaggcggttgcttaggagatctggtgaagcactctttctgcttcaacttatttgccagcataatgttgcccgcttggctcagacactgggcaatgatttacacaagaaattagttcaattaacatttcatcagttggtatgttcagaagatggtgatcagcttgcaatgtgtcttatttctgcactcatggagtactatattggcccagagggcagaggaactgttgaagaaattagcactaaattgaaggagggttgccctagttacttcaatgaatcagattacaaatattacttggcagtggagtgccttgagagagcagcatctatggctaataaccctgatgagagagatattcttgctagagatgctttcaaccttttgactaaaattccagaatctgctgatttgagtgccatatgcaagagatttgagaacctaagaaagctcaagcacttgactccaatgctgatattaccaatggtcaaattgatccaaggcatcatgataccataatgttgcagcgtgaacaatgctatgagattgttatgaatgctctgcgcactctcaagggcgtcgggcatagtcgaatgcaaagtgcagacaagtcatctggtgtagcaactgctgttgatccagcttctcgaaccaagtatatcaaacaaattctccaacttagtgtccaatggccagacacagttttccatgaacatctatacaagacacttattgagctcggtctggaaaatgagcttttggagtatggtggttctgatttggcttcttttctgcagagtgctggtcgtaagcatcaagaagaggttcgggcagtttcttcagttacatctggagctgctaagttgcatgatttaagtgcacctatcttgactagtcaaacaaagtatctcgagctcctagctagatactatgttcgcaagggggagcgtattgctgctgccaggatgtttttaatattggcagagagacagtgctccaattctgaagaagttccaactcttgacaagaggtatgaatatctcagagatgcagtgcttcaggccaaaagcgcaggcatagaggctgattcgtctagaaaacctattgacagtagcacagtggatttgcttgaaggcaaacttaccgtgctacgcttccaaatgcaaatcaaacaagaattggagctcatgactgcacgggttgaaaatatttcgagcagttctgaatcccctagtggtctgttccctcgtgacaacattcttgctgatgcagaggctgctaaggctgctaaggataaggcaaaagaactatcattgaatctcaagagcatcactcaactgtataatgattatgctgttccatttgagctctgggaggtttgcctggaaatgctgagcttcgctaattactctggagatgctgatagcaaaattcttcgagaaatttgggctagactccttgatgaggcacttacaaaaggtggtgttgcagaagcatgttctgtagtgaaaagagtaggctcgaaacttgatcctgcagatggagcttgtttacctttagatataatatgccttcatcttgagaaggctgcattggatagattaagttcaggagaagaattagtcggtgatgatgatgttgcaagagctcttcttggtgcatgtaaaggtcttcctgaacctgtacttgctgtgtatgatcaactgttattgaacggtgcaataataccctcactaaatctgaagttgcgcttgctgcgatcagttcttgcgatcctccgtgagtgggggatatctgtcattgcacataggcttggcaccacaagtactggggcttcaatctttcttgatggaacattttcactgaaccaaacagggactgcgaatcaaggtgctcgagataaaataattagtttggctaacaggtacatgactgaggtgaggcgattaaaccttccacagaaccaaacggagaatgtctaccgtggtttccgtgaacttgaggagaaattactatctccttattaggcaattttcagttgttcttcaagattgtaaaagaagagtcgaaggctctggattcactgcagcatgatctctattgttctgtacatatatctgcaagaacccaaggcttctttaatcattattaattagaggttattcatgacggtgtgcagccttcttttatttgacttagagccagtatggattacagagctgttgttgtggaaattgtctagctgtcttcattacttcttaataatcttttggtagatgctgttgatcctgttttacctgaatttaggaaacagctagagaactcaggcaggactttccaccagaaatacaagttggttttcatgttggaaatcgaaatttagtatgtaccatgacattgtacagttcgttagtagattatttagagtgttgtaagccttgtagcttatgtttttgttggcatcaaggtatcattcctgtagctgaaaaataaacgttatattgtcagaaatatggaattctaggttgtttttgttccattcgtttg

SEQ ID NO: 84527 - DNA, 4824 bp, Zea Mays
tcgagctcgatttttttcccgccctactctggcgcctccctcgcgctctagggtttttcaccgctctcccgttccccgctactcgcgttttgccgcaacgcgaccatggcgtggggagaggacgaggctatcggccccgacgtggcctcggcgggtcttcacgtctcggagcggatcggccgcgacgccgccgcgcagcccgacctggaggaggcccttgaagcctcgcgctacgcgtctcacccctactcctcgcaccccaaggaatggcctcctttggtggaagttgcagaaattcgtcaactccctcctatgttgattgaaagatataacacagctgctggtgaaggaacagctctttgtgggattttttctgacatacatcgggcctgggcaacagttgacaattcatttttcgtctggcattttgataaatgggatgggcagtgccaagagcataatgtcgatgagcaagcaatttgtgctgttggccttgctagggcaaagtctgggattttcattgaagccattcaataccttttagttttagcaacacctgttgagctgatacttgttggagcttgctgttctgctagtgctgatggaacagacccatacgctgagctttcattacaacctttacctgagtacatgattgccactgatggtgtcacaatgacatgcatcacatgtacagaaaagggccaaatttttctagctggtcgtgatggccatatatatgaattgcagtatacaactggttcaggttggcgtaaacgctgccgtaaagtttgtcttactactggtattggcagccttctttctaggtgggtagtgccaaacacattcaaattttcaactgttgatccaatagttgatatggtcatggatgaggagagaaatactatctatacgcgtactgagggcatgaaaatgcaattatttgatctaggagctaatggtgatggccctttgacaaaaattactgaagaaaagaacattgttgatccactggatgcaccttatggtggccggaggactaatgcaccgccaccaagaactgcacgatcaccaaaaccatcaattgtttgcatctcacctctatccgctatggaatcgaaatggctccatgctgttgttgttttatcagatgggaagagattattcctcactacatcaggtgggattggttcttcagttggattgaacagtggtctgcggaggcccacctgtttaaaaattgttgctactaggccgtccccacctctgggggttggtggcgggcttacatttggtgctgtttctgcagctggcagagttcatcctgaggacctagctttgaaagttgagtctgcgttctattctgctggtgctcttataatgtcagattcatccgctacagccatgtcatctctgctggctgtgcagaaaggttcagctgcacagctatcccttcccagtacctttggaacagcttctagagcctcccgagctctacgggaaacagtatctgctttgcctgttgagggtcgaatgctttgtgcctctgatgttttaccacttcctgacgctgcttacatgttgcagtctttgtatgctgatgtggaatgcttcacaggtttcagaaaaccttttgagaaggcatgtataaaactttgggcaaaaggagatcttcctacccagcatatcttgcctcggaggagggttgttgtattcaatactatgggtttgatggaggtaatttttaacaggcctgttgatattctaaggaaattgtttgatgggaacaccttgagatcacaaatcgaagaattctttaatcgctttggtgctggagaggctgctgcaatgtgcttaatgatagctgcgaagctactttatgctgaagatagtctgataagcaattctgtttctgagaaagccgctgaggcatttgaggaccctgggcttgttgggatgcctcaaattgctggtaccactgctttatctaatacacgaactcaggctggaggctttagtatgggccaagttgttcaagaagcagaacctttgttttctggtgcatatgaagggctttgtttgtgctcgtcaagactactttatcccatatgggagtttcctattatggtgattcgaagaccggctggtactaataaatgcgaggatggtgtaattgtttgcaggctttcagctggggccatggaaattcttgagagcaagattcattcactggaaacatttttaagatctagaagaaataagagaaggggcctttatggttatgttgccggccttggtgattctggttccatactctacaaaacagggcctattattggtcctggagggcatagcaatgggaggagtccatataactcccaaattcaagatatggaccctgcggacaaatcagcatcaaataaaaagccaaggttgctttatacatcagcagaactagccgctatggaggtgagggcaatggagtgtcttaggcggttgcttaggagatctggtgaagcactctttctgcttcaacttatttgccagcataatgttgcccgcttggctcagacactgggcaatgatttacacaagaaattagttcaattaacatttcatcagttggtatgttcagaagatggtgatcagcttgcaatgtgtcttatttctgcactcatggagtactatattggcccagagggcagaggaactgttgaagaaattagcactaaattgaaggagggttgccctagttacttcaatgaatcagattacaaatattacttggcagtggagtgccttgagagagcagcatctatggctaataaccctgatgagagagatattcttgctagagatgctttcaaccttttgactaaaattccagaatctgctgatttgagtgccatatgcaagagatttgagaacctaagattttatgaggctgtagtccggttgcctctgcagaaagctcaagcacttgactccaatgctgatattaccaatggtcaaattgatccaaggcatcatgataccataatgttgcagcgtgaacaatgctatgagattgttatgaatgctctgcgcactctcaagggcgtcgggcatagtcgaatgcaaagtgcagacaagtcatctggtgtagcaactgctgttgatccagcttctcgaaccaaagtgctggtcgtaagcatcaagaagaggttcgggcagtttcttcagttacatctggagctgctaagttgcatgatttaagtgcacctatcttgactagtcaaacaaagtatctcgagctcctagctagatactatgttcgcaagggggagcgtattgctgctgccaggatgtttttaatattggcagagagacagtgctccaattctgaagaagttccaactcttgacaagaggtatgaatatctcagagatgcagtgcttcaggccaaaagcgcaggcatagaggctgattcgtctagaaaacctattgacagtagcacagtggatttgcttgaaggcaaacttaccgtgctacgcttccaaatgcaaatcaaacaagaattggagctcatgactgcacgggttgaaaatatttcgagcagttctgaatcccctagtggtctgttccctcgtgacaacattcttgctgatgcagaggctgctaaggctgctaaggataaggcaaaagaactatcattgaatctcaagagcatcactcaactgtataatgattatgctgttccatttgagctctgggaggtttgcctggaaatgctgagcttcgctaattactctggagatgctgatagcaaaattcttcgagaaatttgggctagactccttgatgaggcacttacaaaaggtggtgttgcagaagcatgttctgtagtgaaaagagtaggctcgaaacttgatcctgcagatggagcttgtttacctttagatataatatgccttcatcttgagaaggctgcattggatagattaagttcaggagaagaattagtcggtgatgatgatgttgcaagagctcttcttggtgcatttcttgcgatcctccgtgagtgggggatatctgtcattgcacataggcttggcaccacaagtactggggcttcaatctttcttgatggaacattttcactgaaccaaacagggactgcgaatcaaggtgctcgagataaaataattagtttggctaacaggtacatgactgaggtgaggcgattaaaccttccacagaaccaaacggagaatgtctaccgtggtttccgtgaacttgaggagaaattactatctccttattaggcaattttcagttgttcttcaagattgtaaaagaagagtcgaaggctctggattcactgcagcatgatctctattgttctgtacatatatctgcaagaacccaaggcttctttaatcattattaattagaggttattcatgacggtgtgcagccttcttttatttgacttagagccagtatggattacagagctgttgttgtggaaattgtctagctgtcttcattacttcttaataatcttttggtagatgctgttgatcctgttttacctgaatttaggaaacagctagagaactcaggcaggactttccaccagaaatacaagttggttttcatgttggaaatcgaaatttagtatgtaccatgacattgtacagttcgttagtagattatttagagtgttgtaagccttgtagcttatgtttttgttggcatcaaggtatcattcctgtagctgaaaaataaacgttatattgtcagaaatatggaattctaggttgtttttgttccattcgtttg

SEQ ID NO: 84528 - DNA, 5029 bp, Zea Mays
gaaccgtcgagctcgatttttttcccgccctactctggcgcctccctcgcgctctagggtttttcaccgctctcccgttccccgctactcgcgttttgccgcaacgcgaccatggcgtggggagaggacgaggctatcggccccgacgtggcctcggcgggtcttcacgtctcggagcggatcggccgcgacgccgccgcgcagcccgacctggaggaggcccttgaagcctcgcgctacgcgtctcacccctactcctcgcaccccaaggaatggcctcctttggtggaagttgcagaaattcgtcaactccctcctatgttgattgaaagatataacacagctgctggtgaaggaacagctctttgtgggattttttctgacatacatcgggcctgggcaacagttgacaattcatttttcgtctggcattttgataaatgggatgggcagtgccaagagcataatgtcgatgagcaagcaatttgtgctgttggccttgctagggcaaagtctgggattttcattgaagccattcaataccttttagttttagcaacacctgttgagctgatacttgttggagcttgctgttctgctagtgctgatggaacagacccatacgctgagctttcattacaacctttacctgagtacatgattgccactgatggtgtcacaatgacatgcatcacatgtacagaaaagggccaaatttttctagctggtcgtgatggccatatatatgaattgcagtatacaactggttcaggttggcgtaaacgctgccgtaaagtttgtcttactactggtattggcagccttctttctaggtgggtagtgccaaacacattcaaattttcaactgttgatccaatagttgatatggtcatggatgaggagagaaatactatctatacgcgtactgagggcatgaaaatgcaattatttgatctaggagctaatggtgatggccctttgacaaaaattactgaagaaaagaacattgttgatccactggatgcaccttatggtggccggaggactaatgcaccgccaccaagaactgcacgatcaccaaaaccatcaattgtttgcatctcacctctatccgctatggaatcgaaatggctccatgctgttgttgttttatcagatgggaagagattattcctcactacatcagctggcagagttcatcctgaggacctagctttgaaagttgagtctgcgttctattctgctggtgctcttataatgtcagattcatccgctacagccatgtcatctctgctggctgtgcagaaaggttcagctgcacagctatcccttcccagtacctttggaacagcttctagagcctcccgagctctacgggaaacagtatctgctttgcctgttgagggtcgaatgctttgtgcctctgatgttttaccacttcctgacgctgcttacatgttgcagtctttgtatgctgatgtggaatgcttcacaggtttcagaaaaccttttgagaaggcatgtataaaactttgggcaaaaggagatcttcctacccagcatatcttgcctcggaggagggttgttgtattcaatactatgggtttgatggaggtaatttttaacaggcctgttgatattctaaggaaattgtttgatgggaacaccttgagatcacaaatcgaagaattctttaatcgctttggtgctggagaggctgctgcaatgtgcttaatgatagctgcgaagctactttatgctgaagatagtctgataagcaattctgtttctgagaaagccgctgaggcatttgaggaccctgggcttgttgggatgcctcaaattgctggtaccactgctttatctaatacacgaactcaggctggaggctttagtatgggccaagttgttcaagaagcagaacctttgttttctggtgcatatgaagggctttgtttgtgctcgtcaagactactttatcccatatgggagtttcctattatggtgattcgaagaccggctggtactaataaatgcgaggatggtgtaattgtttgcaggctttcagctggggccatggaaattcttgagagcaagattcattcactggaaacatttttaagatctagaagaaataagagaaggggcctttatggttatgttgccggccttggtgattctggttccatactctacaaaacagggcctattattggtcctggagggcatagcaatgggaggagtccatataactcccaaattcaagatatggaccctgcggacaaatcagcatcaaataaaaagccaaggttgctttatacatcagcagaactagccgctatggaggtgagggcaatggagtgtcttaggcggttgcttaggagatctggtgaagcactctttctgcttcaacttatttgccagcataatgttgcccgcttggctcagacactgggcaatgatttacacaagaaattagttcaattaacatttcatcagttggtatgttcagaagatggtgatcagcttgcaatgtgtcttatttctgcactcatggagtactatattggcccagagggcagaggaactgttgaagaaattagcactaaattgaaggagggttgccctagttacttcaatgaatcagattacaaatattacttggcagtggagtgccttgagagagcagcatctatggctaataaccctgatgagagagatattcttgctagagatgctttcaaccttttgactaaaattccagaatctgctgatttgagtgccatatgcaagagatttgagaacctaagattttatgaggctgtagtccggttgcctctgcagaaagctcaagcacttgactccaatgctgatattaccaatggtcaaattgatccaaggcatcatgataccataatgttgcagcgtgaacaatgctatgagattgttatgaatgctctgcgcactctcaagggcgtcgggcatagtcgaatgcaaagtgcagacaagtcatctggtgtagcaactgctgttgatccagcttctcgaaccaagtatatcaaacaaattctccaacttagtgtccaatggccagacacagttttccatgaacatctatacaagacacttattgagctcggtctggaaaatgagcttttggagtatggtggttctgatttggcttcttttctgcagagtgctggtcgtaagcatcaagaagaggtgtgccgtaatccttgttttcccatcaaaatacgtaaccatggatacatgattagtacttccatcaaactggaaaccttatctggtctgtcaacgtgttggtgatattatcctattttggggtttgcccattttgacatacaagtaaaaaaattgggcaattctaagcaccttccattgatcatggttcgggcagtttcttcagttacatctggagctgctaagttgcatgatttaagtgcacctatcttgactagtcaaacaaagtatctcgagctcctagctagatactatgttcgcaagggggagcgtattgctgctgccaggatgtttttaatattggcagagagacagtgctccaattctgaagaagttccaactcttgacaagaggtatgaatatctcagagatgcagtgcttcaggccaaaagcgcaggcatagaggctgattcgtctagaaaacctattgacagtagcacagtggatttgcttgaaggcaaacttaccgtgctacgcttccaaatgcaaatcaaacaagaattggagctcatgactgcacgggttgaaaatatttcgagcagttctgaatcccctagtggtctgttccctcgtgacaacattcttgctgatgcagaggctgctaaggctgctaaggataaggcaaaagaactatcattgaatctcaagagcatcactcaactgtataatgattatgctgttccatttgagctctgggaggtttgcctggaaatgctgagcttcgctaattactctggagatgctgatagcaaaattcttcgagaaatttgggctagactccttgatgaggcacttacaaaaggtggtgttgcagaagcatgttctgtagtgaaaagagtaggctcgaaacttgatcctgcagatggagcttgtttacctttagatataatatgccttcatcttgagaaggctgcattggatagattaagttcaggagaagaattagtcggtgatgatgatgttgcaagagctcttcttggtgcatttcttgcgatcctccgtgagtgggggatatctgtcattgcacataggcttggcaccacaagtactggggcttcaatctttcttgatggaacattttcactgaaccaaacagggactgcgaatcaaggtgctcgagataaaataattagtttggctaacaggtacatgactgaggtgaggcgattaaaccttccacagaaccaaacggagaatgtctaccgtggtttccgtgaacttgaggagaaattactatctccttattaggcaattttcagttgttcttcaagattgtaaaagaagagtcgaaggctctggattcactgcagcatgatctctattgttctgtacatatatctgcaagaacccaaggcttctttaatcattattaattagaggttattcatgacggtgtgcagccttcttttatttgacttagagccagtatggattacagagctgttgttgtggaaattgtctagctgtcttcattacttcttaataatcttttggtagatgctgttgatcctgttttacctgaatttaggaaacagctagagaactcaggcaggactttccaccagaaatacaagttggttttcatgttggaaatcgaaatttagtatgtaccatgacattgtacagttcgttagtagattatttagagtgttgtaagccttgtagcttatgtttttgttggcatcaaggtatcattcctgtagctgaaaaataaacgttatattgtcagaaatatggaattctaggttgtttttgttccattcgtttg

SEQ ID NO: 84529 - DNA, 3090 bp, Zea Mays
ccgagcaaaccaccgcgagcccgaaccgtcgagctcgatttttttcccgccctactctggcgcctccctcgcgctctagggtttttcaccgctctcccgttccccgctactcgcgttttgccgcaacgcgaccatggcgtggggagaggacgaggctatcggccccgacgtggcctcggcgggtcttcacgtctcggagcggatcggccgcgacgccgccgcgcagcccgacctggaggaggcccttgaagcctcgcgctacgcgtctcacccctactcctcgcaccccaaggaatggcctcctttggtggaagttgcagaaattcgtcaactccctcctatgttgattgaaagatataacacagctgctggtgaaggaacagctctttgtgggattttttctgacatacatcgggcctgggcaacagttgacaattcatttttcgtctggcattttgataaatgggatgggcagtgccaagagcataatgtcgatgagcaagcaatttgtgctgttggccttgctagggcaaagtctgggattttcattgaagccattcaataccttttagttttagcaacacctgttgagctgatacttgttggagcttgctgttctgctagtgctgatggaacagacccatacgctgagctttcattacaacctttacctgagtacatgattgccactgatggtgtcacaatgacatgcatcacatgtacagaaaagggccaaatttttctagctggtcgtgatggccatatatatgaattgcagtatacaactggttcaggttggcgtaaacgctgccgtaaagtttgtcttactactggtattggcagccttctttctaggtgggtagtgccaaacacattcaaattttcaactgttgatccaatagttgatatggtcatggatgaggagagaaatactatctatacgcgtactgagggcatgaaaatgcaattatttgatctaggagctaatggtgatggccctttgacaaaaattactgaagaaaagaacattgttgatccactggatgcaccttatggtggccggaggactaatgcaccgccaccaagaactgcacgatcaccaaaaccatcaattgtttgcatctcacctctatccgctatggaatcgaaatggctccatgctgttgttgttttatcagatgggaagagattattcctcactacatcaggtgggattggttcttcagttggattgaacagtggtctgcggaggcccacctgtttaaaaattgttgctactaggccgtccccacctctgggggttggtggcgggcttacatttggtgctgtttctgcagctggcagagttcatcctgaggacctagctttgaaagttgagtctgcgttctattctgctggtgctcttataatgtcagattcatccgctacagccatgtcatctctgctggctgtgcagaaaggttcagctgcacagctatcccttcccagtacctttggaacagcttctagagcctcccgagctctacgggaaacagtatctgctttgcctgttgagggtcgaatgctttgtgcctctgatgttttaccacttcctgacgctgcttacatgttgcagtctttgtatgctgatgtggaatgcttcacaggtttcagaaaaccttttgagaaggcatgtataaaactttgggcaaaaggagatcttcctacccagcatatcttgcctcggaggagggttgttgtattcaatactatgggtttgatggaggtaatttttaacaggcctgttgatattctaaggaaattgtttgatgggaacaccttgagatcacaaatcgaagaattctttaatcgctttggtgctggagaggctgctgcaatgtgcttaatgatagctgcgaagctactttatgctgaagatagtctgataagcaattctgtttctgagaaagccgctgaggcatttgaggaccctgggcttgttgggatgcctcaaattgctggtaccactgctttatctaatacacgaactcaggctggaggctttagtatgggccaagttgttcaagaagcagaacctttgttttctggtgcatatgaagggctttgtttgtgctcgtcaagactactttatcccatatgggagtttcctattatggtgattcgaagaccggctggtactaataaatgcgaggatggtgtaattgtttgcaggctttcagctggggccatggaaattcttgagagcaagattcattcactggaaacatttttaagatctagaagaaataagagaaggggcctttatggttatgttgccggccttggtgattctggttccatactctacaaaacagggcctattattggtcctggagggcatagcaatgggaggagtccatataactcccaaattcaagatatggaccctgcggacaaatcagcatcaaataaaaagccaaggttgctttatacatcagcagaactagccgctatggaggtgagggcaatggagtgtcttaggcggttgcttaggagatctggtgaagcactctttctgcttcaacttatttgccagcataatgttgcccgcttggctcagacactgggcaatgatttacacaagaaattagttcaattaacatttcatcagttggtatgttcagaagatggtgatcagcttgcaatgtgtcttatttctgcactcatggagtactatattggcccagagggcagaggaactgttgaagaaattagcactaaattgaaggagggttgccctagttacttcaatgaatcagattacaaatattacttggcagtggagtgccttgagagagcagcatctatggctaataaccctgatgagagagatattcttgctagagatgctttcaaccttttgactaaaattccagaatctgctgatttgagtgccatatgcaagagatttgagaacctaagaaacgcttcgtcggctgcgcgctggcattgattcgcagtgaccgtgttttactccagagtccagacaagtgccatgcagcaagtaaacggacgccaagcagaaaaataggggccccatgcaacttaaac

SEQ ID NO: 84530 - DNA, 2850 bp, Zea Mays
gccttcacacctgtgtctctgcctccactcctctcccttcccttcgcgtctcttcttcccccttccacttcttggccgagcccctcttggtctcggcatcctgctcgatcgaagaatgctggatcaggcatattggaggttgcagtaaaggcggtaggtgcttttcttcttccccgttggtggctagagggactggccggggagaactacaacatattggaggctgcaagttctcgggaggagccgggcttctcttgcggcggcaaacatgaggaagctcttcttcgtctacttcgtcctcctgctggccgctgcagtagttcacggtgaagatggtgcgtacattggcgtgaacattggcacggccatgtcgtcggtcccggcgccgacgcagatcaccacgctgctccgctcgcagaacatccgccacgtccgcctctacgacgccgaccccgccatgctagcggcgctctccaacaccggcatccgcgtcatcgtgtccgtgcctaacgagcagctgctggccatcggcaactccaacgcgacggcggccaactgggtggcgcgcaacgtggccgcgcacttccccgccgtcaacatcacggccatcgccgtgggctccgaggtgctctccgcgcagcccaacgcggcgccgctgctcatgcccgccatgcgctacctccagaacgcgctggtggccgcggcgctggaccggtacatcaagatctcgacgccgcactcgtcgtccatcatcctcgactccttcccgccgtcgcaggccttcttcaacaggtcgctggacagcgtgctggtgccgatgctcaagttcctgcagtccacggggtcgccgctcatgctcaacgtgtacccttactacgactacatgcgctccaacggcgtcatcccgctggactacgcgctgttccggccgctgccggccaacaaggaggccgtggacgccaacaccctgctgcactacaccaacgtgttcgacgcggtggtggacgccgcctacttcgccatggcgtacctcaatgtcaccaacgtgccggtgatggtgacggagaccgggtggccgcacaagggcgacccttcctcggagcccgacgccacctccgacaacgccgacacgtacaacagcaacctcatccggcacgtgatgaacagcaccggcacgccgaagcaccccagggtggccgtgccgacctacatctacgagctgtacgacgaggacacccggcccggctccacgtcggagaagtactggggcctgttcgacatgaacggcgtcccggcctacaccctgcacctgacgggctccggcgtcctgctggccaacgacacgacgaaccagacctactgcgtggcgcgggagggcgcggaccccaagatgttgcaggcggcgctggactgggcgtgcggccccgggaaggtggactgctccgtgctgatgcagggccagccgtgctacgacccggacaccgtggaggcgcacgccacgtacgccttcaacgcctactaccacggcatgggaatgggctccgggacgtgctacttcagcggcgtcgcggtcgtcacgacgaccgacccgagccacggatcttgtgtttatggtgggaagaacgggacgtcgttgatgaacggcacctcgctggcgccgtcgtcgaactccacggagggaggctccggcgcgcaccgggagttcggcgacgtctcgtcactcgtccgcatcgtctccgcagcgctgctcttcagcgccctcctcctgttgtagttactactagagctactaggcaccctggaatcaatgcagtctttgcagagttaggcattcgtcgtgaaggagggatgattctttttgctgtggaacggaggcggatgtgcttctgttctgatgctcttgtcatctgctgggtttctctattggcatcgaacggaaattggtttgcttccccgcaattgctccggttgatcgtgatgactgagcaaagaggatgcttagggtttcaggtagagattgttacaacacacaacgctagggtcggaaaatactggccattgttcaccaccgacttgtgtcgaaaccagtgtgttgcagcaaaggttaatcagcatcgaagttcagaactaacaaagcacaacaccagctaccccgggcgggagtaatcaggtgtatcgtgttcatcctttttagagacgaagcagctacggtccattggcatccaaagacggcaacggccctgcacgcctctgtcaacgtgcggcggcgtgcctcagctagatgggatgggccgaccacaatcattttttggcccacgcggccggaatgggtgtagctgtaatttgcccttttcagccgtgcgagcgccctgtatataacagggcaaaggccaaagggcatcggtctggtttttcctccgcgtcgccgccttcatcaccctgcaacgatctccttgcaacgaccacaaccattttttttgttgctttgtttttcgagtcgctatgctcacgtagggtgaaatcttgttctcgtttcttcgattggtttacttcaagacgttctctgctcgggcactcttcgagttttgaaagttctgaagccctggtcgcagctgtgcgcatcctggctttggttaccgaagagatgcgagatcatacacctggacctctggacatgcgtcttctttctatagctcctcgcgttttctctcgtgggtccaacaattcccttcccttacacttgtgaataacgagatttgttgttggttgtttgcatctatttttgttgttgtttttctctaaatgattttgtttggattaatcagttatatcttgaatccgtgacgacga

SEQ ID NO: 84531 - DNA, 1733 bp, Zea Mays
atggcgtctctccgaccaagcctcggcggccataaccgacggcgtggtacgcggccaggcgcggcggtcctgtggcgcgcgtcacaacggccagcacgggacccgacgtggccttggccagcgcagggcgcagccccggcggcgcgagcgcggccgcccggccacggcacgggcgtgtgggcggcggcacgggcccgacgcggtggcccccgtccccgacgagtgcgaggcgcggcccttggcggcgcgaacgcgaccccggaggcatgcgggcgcggcggccccgacaatcctgtcgagggcgcagagtggcgtacgggcgcgcggcggcgcagcgccagcctcgccacggcgtgtgcgacccccggccccgcggcttgggcgcggctccccgcgccagcctcgacgtgcgggagcactcctccggcagcgcggtcccggcctggcgggcggacacggcgcggctcgggcggccccagccacgacgcacacgggtgcggcctccctgacgacgcgggcgaggccccagcggcgcgggtgcgcggcatccccggctgcgcgggctcggcacgctgccccgggtacccagcacgggcatggatgcccggcgcgcggcaagggcggcgcgaccgcgtggctcgcggcaacagcggcgcttgcgtgtgcaacggcccagaggcatggcgcgaggcaacagcggccacggcgtggccccggccccgccctcggagcgggagcgcgctcgggtgcggcgtccctagcccctgcgcgggagcgacgcgtgaacctcggcgcgggcatggcagcccgacccagcctccgagcgcgggcacggcgaccccgacatgacgcaatcgagtgtcgcgcgtgcatgagcaaccctcggccatggtgcccaggcgcgggcccggacgagatgcggcctcgacgccacgcaacctgctcggtcaggcatttccacggcctctcggacgaggctgccatggacccggcgtgcgtaggcgccacgacccagcgcgggtgcagtcgacccggcggccatggcgtatttacaaccaaccatggcgcacggtggcgtaggcacgtggccagacgccgagcgtgaaatccccgtggcgcgtgagcgtgcagccccgcaacctcggtagccagcgatttcattgtttgcatgaatagaatcatcataatgatttaacgcattaatgattcaacgtataataaatgcttacagaatactgtagatccgtagtgctagacaagacacgccatcaatcaaatcaagaatgatgtagatgaagcgttcagggacatcatcgccatggcgtggatcaaaattgcccgaagccaatctctcttttttctgtgatctcgcgagcgtcgtgctgataacgtgttatattatactcagtagtaacgagattgagagagagacaaatgacagttgtaagtctttattgcagggaacattggattatatacagactgcaggggtactcctccaaggggtgcgacccttgggtagtaactcatccgatgggtttgatcacatgtgaatgttttgcaacactagctgcgaggtggagcaggaacagtcgaacagaggtgcttcgcgaagaagaacctggtgcggccggggaggttgtcgccatatgccaactgcactttgcattgaattgaactgcgcaatcgccttaagtatcagcgtgcaacgctaagtgcatatgtggtcctag

SEQ ID NO: 84532 - DNA, 1618 bp, Zea Mays
cgatctccggctccggccggctacctcgtctacggctctccaccctccaatcctccatagccacccctcattctccgatggcatcagccgtctgcgccgaatcggcagctcgagctcggcattctcctcgccacagcctccgttcactagcaggtgtaatgcaatagcaaacatggaataaatgggaggtacaaccatgcaactcaagcacgcctggttgactgacaccaaaggaaaataaccatgcatccagatcgatgactcaatactcagcttcctcgtcctcatcttcaacttcagctccgacttcctcataatccttctccagtgctgcaagatcctcccttgcctctgagaactccccttcttccatcccttcaccgacataccaatgaacgaatgcacgtttggcatacatgagatcaaacttgcggtcaatacgagagaagacctcagccacggctgtgttgttgctgatcatgcagactgctcgttgcaccttggccaggtcccctccagggactacagttggtggttggtagtttatcccacacttgaaaccagtagggcacctgtgcatgagacagcagagaaagacattcatgtctcgcgcagctatcttttcagtggaagattacaatctataatctgatataacttggtaagagttgtgagcatataccaatcaacaaactgcactgctctcttggtcttgattgaatggacagcagcattcacatcttttggaacaacgtcgccacggtacatcaaacagcatgccatgtactttccatgcctgggatcacattttgccatcacacttgatggctcaaacacagaatttgtgatctcaggaacagagtgttgttcatggtaggccttttccactgagataattggagcatacgaagagagcataaagtgtatgcggggataaggcacaaggttggtctggaactcagttatgtcaacattaatagctccttcaaacctcagagaggtagtcagagatgatataacttgtgatataagcctgttcagattggtgtatgttggacgctcaatgtcgagggacctcttgcatatgtcatagatagcttcattgtcaagaagcacaacaacatctgtgtgttcaatcaaggaatgtgtggagagcacgctgttataaggctcgaccacagcagtcgagatctgcaatgaaaatggtttcagtacagagttcttgtacattacaatgacaggggtgtcatcgactcttaagagaagatttttagaggtcagagcatccagcgaagtttctctagcttttagagtgctgtctgtgatcaacaagtaaagatcttcctcaggattatctcaaaaacccaaccttttgaggcgactgctacaagaacccagatggcagccctatcttaaataattatctgagctggaactggaataatcatctcagagagaagtacagaacaaaatctgacataattctcaaggaaaggatgagttggaatggaaaggggcctcacctgggcatgaggccgtcaggctggataccgtgctcgaggcagtagagctcccagcaagaattccctacctggatgcctgcctgcccgatatggat

SEQ ID NO: 84533 - DNA, 1263 bp, Zea Mays
ctcgtctacggctctccaccctccaatcctccatagccacccctcattctccgatggcatcagccgtctgcgccgaatcggcagctcgagctcggcattctcctcgccacagcctccgttcactagcaggtgtaatgcaatagcaaacatggaataaatgggaggtacaaccatgcaactcaagcacgcctggttgactgacaccaaaggaaaataaccatgcatccagatcgatgactcaatactcagcttcctcgtcctcatcttcaacttcagctccgacttcctcataatccttctccagtgctgcaagatcctcccttgcctctgagaactccccttcttccatcccttcaccgacataccaatgaacgaatgcacgtttggcatacatgagatcaaacttgcggtcaatacgagagaagacctcagccacggctgtgttgttgctgatcatgcagactgctcgttgcaccttggccaggtcccctccagggactacagttggtggttggtagtttatcccacacttgaaaccagtagggcacctgtgcatgagacagcagagaaagacattcatgtctcgcgcagctatcttttcagtggaagattacaatctataatctgatataacttggtaagagttgtgagcatataccaatcaacaaactgcactgctctcttggtcttgattgaatggacagcagcattcacatcttttggaacaacgtcgccacggtacatcaaacagcatgccatgtactttccatgcctgggatcacattttgccatcacacttgatggctcaaacacagaatttgtgatctcaggaacagagtgttgttcatggtaggccttttccactgagataattggagcatacgaagagagcataaagtgtatgcggggataaggcacaaggttggtctggaactcagttatgtcaacattaatagctccttcaaacctcagagaggtagtcagagatgatataacttgtgatataagcctgttcagattggtgtatgttggacgctcaatgtcgagggacctcttgcatatgtcatagatagcttcattgtcaagaagcacaacaacatctgtgtgttcaatcaaggaatgtgtggagagcacgctgttataaggctcgaccacagcagtcgagatctgcaatgaaaatggtttcagtacagagttcttgtacattacaatgacagctcagggtgaggggaacatgtcacacctgtgtaatgtccacgggcg

SEQ ID NO: 84534 - DNA, 2776 bp, Zea Mays
aacgtgggacctactacgtcagtatccgatctccggctccggccggctacctcgtctacggctctccaccctccaatcctccatagccacccctcattctccgatggcatcagccgtctgcgccgaatcggcagctcgagctcggcattctcctcgccacagcctccgttcactagcaggtgtaatgcaatagcaaacatggaataaatgggaggtacaaccatgcaactcaagcacgcctggttgactgacaccaaaggaaaataaccatgcatccagatcgatgactcaatactcagcttcctcgtcctcatcttcaacttcagctccgacttcctcataatccttctccagtgctgcaagatcctcccttgcctctgagaactccccttcttccatcccttcaccgacataccaatgaacgaatgcacgtttggcatacatgagatcaaacttgcggtcaatacgagagaagacctcagccacggctgtgttgttgctgatcatgcagactgctcgttgcaccttggccaggtcccctccagggactacagttggtggttggtagtttatcccacacttgaaaccagtagggcacctgtgcatgagacagcagagaaagacattcatgtctcgcgcagctatcttttcagtggaagattacaatctataatctgatataacttggtaagagttgtgagcatataccaatcaacaaactgcactgctctcttggtcttgattgaatggacagcagcattcacatcttttggaacaacgtcgccacggtacatcaaacagcatgccatgtactttccatgcctgggatcacattttgccatcacacttgatggctcaaacacagaatttgtgatctcaggaacagagtgttgttcatggtaggccttttccactgagataattggagcatacgaagagagcataaagtgtatgcggggataaggcacaaggttggtctggaactcagttatgtcaacattaatagctccttcaaacctcagagaggtagtcagagatgatataacttgtgatataagcctgttcagattggtgtatgttggacgctcaatgtcgagggacctcttgcatatgtcatagatagcttcattgtcaagaagcacaacaacatctgtgtgttcaatcaaggaatgtgtggagagcacgctgttataaggctcgaccacagcagtcgagatctgcaatgaaaatggtttcagtacagagttcttgtacattacaatgacaggtaaacctcctttgcaagcttttgttttccgattgagaaggcaagtatatgccttcatttaggtatacataaatagtactgttgcaaattaacactttttactcacttttgtctcaagcatacagatttagataattgtacaattaaccattatgtagccactccgcaataacaagaattgatatgaatattcttcactcacacattttcacggtctagactaaatgttagcctaaacgtctaactggctaaacaatcacctattgtttagctatttattcaggctaaacgatcatttaaatggattaaatgtggtcaaaagggataaatggacacatcaagctgccatgcagcatttacacggcgtgtaaacgggctacacggccgtataggtgaagtagacatacatgggcttgcagcattgcgtgatatccaaggttgaatttcatgaagatccttcaagatttatttttactacaatcaatgataggtgaatgtaggctagggaaaaatatactccacttggatacataggtttttctatgcacttaggtatacattatgtctagatagtagatacatagtaaaattaatgtatctagaaaagtcaaaatgtcttatagtttgaaatggagggagtatttctgtatgcaagctatgtcttattgcaagaacaaataaagagttctgctcactgacacaagcggctcaactctaatatccgtaaaatttatatttttatcgtggctcctccagaaacatgacaaaaacagcatactagttggaaagagaaggtaaaagtccaaaataattagactagcttttcaagaaattgagttatgataaaacaacatactagctgaaagtaggacatatttagacttttcttgtaaagttactatcagatattcgattaatcattttattgaaattgagatttttgttgtatatcaaaaattcaaaactgatggcgagacagactttttttgttactattactagtactactttatattggtagtcttgcgaaatcacgatacagatctaccattgaagtgatttctttttaatgtttcacactgaatactatatttttctggcaaaaaccgaatcaaacttcccatgcaatctagatgcaatctgtcatgggcataatagggagtgagaggcaacagccaggctaggataaggctagagaataagattgagatgagctaggataaggctagagaataagattgagatgagagaattgtggagagttagttagcagcagataagtccaagaaagtaggagttagttgagagtttgtaggagaagttggttagtcatagggctatttataagccgcatagcagcaaggaataaatcaagcaagatcattaccaaatcaatctctctctcttgcaatctccctctcaagcgcctagggctgctaccctagaaccaagcctacggcagaggggtataacctcgccggagaagacagctatccccatggaccgaag

SEQ ID NO: 84535 - DNA, 1365 bp, Zea Mays
ctgtttctgttcttgcagttgcagctcaatagctgatacctacggcacagtgccaagttgctgtgccgccgcgccgaatttattttattgcgctgccgatttgaccacatcatggccgacgagttctccgccgagctcgccgacggcgtggcgttcgtctccggccacgacgacgacggccgcccggtgtttcgaatcaagcaggaataccccaagttccgctcgccgaaatcgttcgtgcgcctgctggtgttgacactggaggtggccgtggcgtgcatgtcccggtccgtggaccagctcgtcctcctcttcgatgcaagctttttccgatcggcgtcggctttcctcaacctgctcatgggcacgctcaagatcgtcgccgactactaccccggccgcctccaccgcgccttcgtcatcgacgcgccctccctcttctccgtcctctggaagggagtgaggccgttcgtggagctggcgccggcgacggcggtggtgtgctccctggacttcgaggactcactggaggacgcctccttcacggcgtacccgcggaccgcgtccctgcggttcgagccgccgccggcggcggtcacggggaaggccggcgtggggtcagcctcgtcgcggttctccgtcacccccaccgacaaccccgtcaagccgtggtacctctgcaccatccccgcctcggtgggctcccgctccgtggtacccacctccagcagcagcccgtcgctggtcggcgcgtccccgctctccgcgcgctccttctccttcgcctcgcccgccgcgctgcgctcgacgccgttcccgcgcggcgggggcgcccccccgacgccttcctccgccgtcacgggccacaagatcccgccgccgccgcagttcccgcggacgccgcggccgtcgttcctgcagtcgccgtcgacgctgttcgcgttccggaaggacgggcagcagaccagccgcgtggagcgcgagcgcgggtccttcctcccgtacctccgcttctaccgccgcccctacgacgagatttcctaccgcgccatgatgcgcccgccgctcggcggcctgatacccatcgtcgagaagttcaagcacaagccggtgcagcagacgctgcgtcgacacgctgggctccaccagcatcagcagcagcagcaccaccattaccaacagcagcagaggatctgagtctcgtctctcagtcggtactgcatggcgacccgagaattttctccatacagcataaaggcgatgctatattatgctaagttaatcttttgccaagtatgatattcttaaaggcatgtataataacatcccaaaaaaatgtgagtaaaatggactcctttctgcacc

SEQ ID NO: 84536 - DNA, 1484 bp, Zea Mays
caaaagtggacgtccaaacggcggacgccaaggagagggagaagatcgacgccgttcgcaagctgctgcgcaagcaggcgccgctctccataaagcaggcgcagtactgcgacgacgcgtgcgtggagcggttcctgcggtggcgcggggagagcgtcaagaaggcggcgaagcacctgaggaccgtcctgtcatggagggagaccgtcggagctgaccacatcatggccgacgagttctccgccgagctcgccgacggcgtggcgttcgtctccggccacgacgacgacggccgcccggtagtggtgtttcgaatcaagcaggaataccccaagttccgctcgccgaaatcgttcgtgcgcctgctggtgttgacactggaggtggccgtggcgtgcatgtcccggtccgtggaccagctcgtcctcctcttcgatgcaagctttttccgatcggcgtcggctttcctcaacctgctcatgggcacgctcaagatcgtcgccgactactaccccggccgcctccaccgcgccttcgtcatcgacgcgccctccctcttctccgtcctctggaagggagtgaggccgttcgtggagctggcgccggcgacggcggtggtgtgctccctggacttcgaggactcactggaggacgcctccttcacggcgtacccgcggaccgcgtccctgcggttcgagccgccgccggcggcggtcacggggaaggccggcgtggggtcagcctcgtcgcggttctccgtcacccccaccgacaaccccgtcaagccgtggtacctctgcaccatccccgcctcggtgggctcccgctccgtggtacccacctccagcagcagcccgtcgctggtcggcgcgtccccgctctccgcgcgctccttctccttcgcctcgcccgccgcgctgcgctcgacgccgttcccgcgcggcgggggcgcccccccgacgccttcctccgccgtcacgggccacaagatcccgccgccgccgcagttcccgcggacgccgcggccgtcgttcctgcagtcgccgtcgacgctgttcgcgttccggaaggacgggcagcagaccagccgcgtggagcgcgagcgcgggtccttcctcccgtacctccgcttctaccgccgcccctacgacgagatttcctaccgcgccatgatgcgcccgccgctcggcggcctgatacccatcgtcgagaagttcaagcacaagccggtgcagcagacgctgcgtcgacacgctgggctccaccagcatcagcagcagcagcaccaccattaccaacagcagcagaggatctgagtctcgtctctcagtcggtactgcatggcgacccgagaattttctccatacagcataaaggcgatgctatattatgctaagttaatcttttgccaagtatgatattcttaaaggcatgtataataacatcccaaaaaaatgtgagtaaaatggactcctttctgcacc

SEQ ID NO: 84537 - DNA, 2017 bp, Zea Mays
tgaatggaaggacataatggcttgctgcagctcggctacaaccagctcacagggagcattccaacccagctgggccacctaaacaagctcactgttctcgcccttcagtccaaccagctcagcggcgcgatcccggcatccctcggggacttgccggcgctggcacggctagacttgagctccaaccaactcttcggctcaatcccctccaagctcgctgagatccctcgtcttgcaacgctagacctccggaacaacacactttcaggaagtgttccatctggtctgaagaagctgaacgaggggtttctgtacgagaacaatccggagctctgtggagcgcagttcgattctctgaaagcttgtcctaacgatggcaacgatgacggcagaacgccccggaaacctgaatcgacctctgtcaagccccagcagattcaaaagacggccgacctcaaccggaactgcggcgacggaggctgctcgaagccttcgacgctctctacaggggctgttgttgccggaacagtcgtcatcgtggcaggagcagcggcctgtggcctgtccgcgttctcatggcaccgccgccagaagcagaaggtcggcagcagttcggtcgagcatctggaaggccggcctagcctggaccggtcgaaggaagcataccagagaagcgccgtgtcgtcactgatgaacgtcgagtactccagtggcggctgggacacttcatccgaggggtcacagtcacagcatggggtggcgaggctgtcgtcgtcgacagagggtggttccccgagcgtgaggtcgttcaacctcgaggaggtggagtgcgccacgcagtacttctcggacgcgaacctgatcggcaagagcggtttcgccgcgacgtacaagggggtcttgcgggacgggacggctgttgcggtgaagagcatcagcaagaacagctgcaagtcggaggaggccgacttcctgaggggcctccgcacgctgacgtcgctgcggcacgagaacctcgtcggcctgaggggattctgccggtcccgggcgagcggggggtgcttcctcgtctacgagttcatggccaacggaagcctttctcggtacctcgacgccaaggaaggcgatgcggcggacgccgccgccgtcctcgactggcctacacgggtctccatcatcaaaggcgtcgccaagggcatcgagtacctgcacagcagcaagctggcgcaccagagcatctcggcggacaaggtcctgctcgaccacctctacgcgccgcgcctctccggcgcgggcctgcacaggctgctggccgacgacgtggtgttcgcggcgctcaaggacagcgcggccatggggtacctggctcccgagtacgcgacgacggggcggtccacggacaagcagggcgacgtgtacgcgttcggcgtggtggtgctgcaggtgctggcggggcggcgcgccgtgtcgccgccccacctccagcagggcggcggcggcggcgggcggctggacgacctcgtggacccgcgcctgcgcgggcggttctcgcgcgccgaggccgccaagctcgccggcgtcgcgctgctctgcaccgccgaggcgcccgcgcagcggcccaccatgaccgccgtgctgcagcagctcggcaccagcagccagtgatcgtcgtcggcggccggtacggtggtgggccggagtcggagctcgctggctacctggccggcgtggtgactgatttgtgttgagttagttaaccgctactgatctcggctactcgcatggtagctgcatttgctccttgtttgagctgagccccggctccttcctcgggagctcggttgatgtagttgtagtaaagtaagccggtgtgattgcattgtgacggagagtttttattagttaactaccgtctcatggcactgatgttgtatcgaattgtactgtctgtacccttaagatctatctatatgtcgaggatttgttggaaacgcggaaatgtcacgacgagttgcgc

SEQ ID NO: 84538 - DNA, 2144 bp, Zea Mays
catgaatggaaggacataatggctggttttgcagcagtttggctgtcgtggatttgattgtacatgctactttggcggatgtttcatgatactccatcttatcctttgccttttctgctgagtaaaacctggttattgacgcaagactatgctgcagctcggctacaaccagctcacagggagcattccaacccagctgggccacctaaacaagctcactgttctcgcccttcagtccaaccagctcagcggcgcgatcccggcatccctcggggacttgccggcgctggcacggctagacttgagctccaaccaactcttcggctcaatcccctccaagctcgctgagatccctcgtcttgcaacgctagacctccggaacaacacactttcaggaagtgttccatctggtctgaagaagctgaacgaggggtttctgtacgagaacaatccggagctctgtggagcgcagttcgattctctgaaagcttgtcctaacgatggcaacgatgacggcagaacgccccggaaacctgaatcgacctctgtcaagccccagcagattcaaaagacggccgacctcaaccggaactgcggcgacggaggctgctcgaagccttcgacgctctctacaggggctgttgttgccggaacagtcgtcatcgtggcaggagcagcggcctgtggcctgtccgcgttctcatggcaccgccgccagaagcagaaggtcggcagcagttcggtcgagcatctggaaggccggcctagcctggaccggtcgaaggaagcataccagagaagcgccgtgtcgtcactgatgaacgtcgagtactccagtggcggctgggacacttcatccgaggggtcacagtcacagcatggggtggcgaggctgtcgtcgtcgacagagggtggttccccgagcgtgaggtcgttcaacctcgaggaggtggagtgcgccacgcagtacttctcggacgcgaacctgatcggcaagagcggtttcgccgcgacgtacaagggggtcttgcgggacgggacggctgttgcggtgaagagcatcagcaagaacagctgcaagtcggaggaggccgacttcctgaggggcctccgcacgctgacgtcgctgcggcacgagaacctcgtcggcctgaggggattctgccggtcccgggcgagcggggggtgcttcctcgtctacgagttcatggccaacggaagcctttctcggtacctcgacgccaaggaaggcgatgcggcggacgccgccgccgtcctcgactggcctacacgggtctccatcatcaaaggcgtcgccaagggcatcgagtacctgcacagcagcaagctggcgcaccagagcatctcggcggacaaggtcctgctcgaccacctctacgcgccgcgcctctccggcgcgggcctgcacaggctgctggccgacgacgtggtgttcgcggcgctcaaggacagcgcggccatggggtacctggctcccgagtacgcgacgacggggcggtccacggacaagcagggcgacgtgtacgcgttcggcgtggtggtgctgcaggtgctggcggggcggcgcgccgtgtcgccgccccacctccagcagggcggcggcggcggcgggcggctggacgacctcgtggacccgcgcctgcgcgggcggttctcgcgcgccgaggccgccaagctcgccggcgtcgcgctgctctgcaccgccgaggcgcccgcgcagcggcccaccatgaccgccgtgctgcagcagctcggcaccagcagccagtgatcgtcgtcggcggccggtacggtggtgggccggagtcggagctcgctggctacctggccggcgtggtgactgatttgtgttgagttagttaaccgctactgatctcggctactcgcatggtagctgcatttgctccttgtttgagctgagccccggctccttcctcgggagctcggttgatgtagttgtagtaaagtaagccggtgtgattgcattgtgacggagagtttttattagttaactaccgtctcatggcactgatgttgtatcgaattgtactgtctgtacccttaagatctatctatatgtcgaggatttgttggaaacgcggaaatgtcacgacgagttgcgc

SEQ ID NO: 84539 - DNA, 4367 bp, Zea Mays
cggaagcaagcggaggcggctggagggacggcagcggatgcggtgaccatctcgcgcacgcctttccccgtgagcgctggtcctggctttccttatctccccgagcaaccccaccgcacccttctcggtggatccgagggctggagtctcggcggcggcatgaagcggcagaggtcgtacggcgacggtctggacgacgaccggcggaggttctacgaccgcggccccccgccgcgggactacgacggcgataggttcgatcgcaggaaggggttcggtggcggcggcgggttccacgacagccggtaccgagactacccctccccaagggggtatggtggggatcgggccttgcaccggtccgagagtttctctggcttccgtcgggagttccccaagggtttccggtcggagcgtgacaggtcgcggcgggatggtgacggcagctcgacgtggcgtcggccgggaagcgggtggacggacgccgagtgttttgaggagtacagggcacccgccaggctgggagcgtcatcgctgcctgggcagccgcggcggtcacggtcacggtcgcccagtgagccgaggaggaggtttgaggttgccaaggcagagaagccgaggaagcacagtgccggcatcaatgaggtggaggaaggtgagctctcaccagttgctgagcccaaggccaggcctgctgccgtggagcatcggaagcaggttgagtcaagtcgtgtaaaggagaagggactggagcaaggtaaggcgaagaaactgaattctggggtccaagcaaatttgggagctcgagctaatggatcctctagtgcatctgatcctaacaatgcagcgagggaggaaggcaagaaaagggatgacatactggtagctgaagcaatggatgaagtgcgtgagaagtcttcaacaatggttacagaggaagtcgtcagtggaggacatcaggtacaagcactacatgcggctaccactgattctagtgagtttgggctaaccacttcacccatgcagcaaggagtgctgcaggaggaagtgaagccacaagaggagactaccaattcggttgacatggttggggagaacacttcctctaccatgctgaaggagggtattcaggaagaagcaacaacaagagataaaactaacaatgataccgatgaagtcagagagagtgcttcatccaattttagtcaagcagtgcaggaagaagtgacggcattacacaagactggcaatgctgctattgaggttggaaagaacatttcacctctcatgcagcaagaagtgctacaggatgcggtggtggagttagacgatactgcacatgcagttgatgaggttgtgaagagtgcttcctctgatatgctgaaggaagttattcaggaagaagtggtgcaacataatggaagtgccgatgttgttgatatggttgacactgacacttctgatctgccatgggaggcaatgcaggaaaaaacagtaatactggatggaaatgaccataattttgatactgtggaacctgtcagttattctggtatgctgaaggaagcgatgcacgaaggagagttgacaagggatgaaactgccattaacactattgtagcaggacaaggtaattcaactgatatggtggatgaagtgatgctcggtaaagcagctgtgcgggaagtaatctccagtgctgttaattcagttggcgagagcaatatgtctaccgggctgcagggagaggtgatggtttctcaaaaccaacaggctcctgaaagtaaagaatttgaaaaaataactgtaatggcagagatggatgagccagcagaagatatcacacctcagcctgtagaagtggaactcgagatacatcattgcaaagaaagaggtacatcagaggaaactcttgtagtagaaaaggatgcatctgctatgcatgacaatgttgagaaagaagtaaaaggatttgatatcgaggccaaagctgaccgtgcctttatgttccataaacccatgaaagaacatgctgggggtagtaaggaaagaagttgccaatccaaatcttatgacaagggatttgactgaaagataaaagaaatggcatagaatttgatgtccttagtaagaaaagttaaaagtagatcattcatgttcactgggaagaggtctttgactcaacattgcagcgtggtgtagaaccaacacaaacatcaaaatctgcttcaaccactgttgtaaagacagaacatgatacaatcaagctagagaagcttgatctgtcattgagcttatcagtttgtttgcagaattctgaatctaagtcttcgattcctaaaactgcttctctagtccatgcagcattctctcagccgttatcatcatcatctttccacaccaactcagatggggttcccaacttcaataccattgaccaattctgaaacacttgatcacaatcctagttgctcactcacccaacaatcattggacaattatgagcattcagtaggcagcaaacctttctttatgggagttgatcagatgagcaatcacacaagaagacaagctcagttgtctagtgaatctacacagaaggggagtgctaccccactccttcagagagtactccaaaatggccatatggcagatactagcacttctgcgataaaaaagcatactagtggaatatccactgacctacagaggcaaatctcaggagttttgttgccaacacatagtcattgttctcacaactctggattggaacataatagacatagaaggcaacttacaagagagagaagtagtaacagccttacaagggatgaacggcaggaggggggacaactagttgttaatggtgctggtgttattgagaggattatttccaaggttgtttcagaacctttgcatcttacaggaaggatgcttcaagaaatgacagaaaattctataacatatttgagggaggccatttctgaaatcatagtcgatccagataaaagaggacagataattgctttgcaggaggcactcaagaaaagatctgacttcaatattgatatgttgcgatcatgtccacgtgtgttgatggagatacttgtttctataaggactggccttccatattttataaagaaaagcagtagtgttgctacatctaatttggtcgacatttttctcaacttgaaatgccgaaatctctcatgccaaagcattcttccagtggacgattgtgattgtaaaatttgtcagaggatgactggtttctgtagttcttgcatgtgcattgtctgctcaaagtttgactcagcatctaatacttgtagttgggttggttgtgatgtatgtcttcattggtgccacacagattgtggtctacgccactctctgattcgaaaggggcaaagtgcttcaagggcatatggaactactgagatgcagtttcactgttctgcctgtggatatccatcggagatgtttggttttgtgaaggaagtatttcgaacatgtgcacaacaatggaggatagacatgctggttagagagttacagtatgtagaaagaattttttctgcaagtgaagatgtaaggggcaagagggtccgggacttcgtgaagcagatgctaattaagtcagaaaacaaggcctatcatgctgaagttgtcagatgtgtcattgcattcttttctgatgatggtgctaaccttggcagtgatccatcagtaccactgaaaggcattccatgcagcatttctgaagctgttgatgggattcctagttcaagtcggaaggcatggataccatttaccttagagggacttccagttttagacaaaacaactcttcctaccacaagcacagggagcccatctgtgcctagaaaatctggtgaagctgagtttcagacaattgataataagcctgccactgatgaactggatagcttgatcaggttaaagcaggctgaagcatatatgtaccaggaacgtgcaaatgatgcacggaatgaggttgacaatctgagacacattgttatggtaaaaaatgcacgaattgaggaagattatggcacccatatcgctgatcttgacataaatgagttacaagagcggcgcaagcgaaggattgaagaactccaagtaattgaaaggacacaccatgaatttctcagcatgaaaactaggatggtagctagcattggggagttattgtcaaaaatggaggcactgaaacaaaaccgaagcacatgaactgaggttactattgcagaaatcgaagttgctcaacttgtttaaggaagcctgcacatattgttggccacctggtaaaccttgatattcacgtacgaatactgctc

SEQ ID NO: 84540 - DNA, 1978 bp, Zea Mays
gtcccggagcccggccccacctccatccagatccacccgtcactccgtcagccccgccgcgcgcaccatggatcccccgccgcggcggctagccgccccgctcctcctcctgctcctcgcagcggcctcccccgccgcgcgcgcgtggaagaaggacgagttccgcaactgcaaccagacgcccttctgcaagcgcgctcgaacccgcgccccgcactcgctcgaggcgccgctctccctcgccgctggctcgctcgccgtctcccccgacggctctatctctgccgagctctcccacccgtcccgcccgcgacccctcgtgctccgcctctccgtgctgcccccgcacgcgctgcggctccagatcgatgaggactactccaccgccactccgtgctggcctggatcatcttcctatcctgacatgctgaatcctgagatacgcgagtggtgggctgacaagttctcctatgaaaattacaagggatcaactccaacactctacatttggaacgatatgaatgagccatctgtcttcaatggccctgaggtcaccatgcccagggatgcgatgcattatggagatgttgaacaccgagaattgcacaatgcatatgggtactacttccatatggctactgcagacggacttctcaagcgagacaaggggaaacatagaccctttgttttgtcaagggctttctttgctggaagtcaacggtatggtgcagtctggacaggcgacaactctgctgattgggatcacctgaaatcttctatcccaatggtcttaattcttggtcttactggtttgcctttctctggcgcggatgttggtggattttttggaaacccagaaccggacctgttggtgcgttggtatcaagtaggagccttttatcctttctttaggggtcacgctcaccatgacaccaagagacgtgagccatggttatttggggagcgaagaactgccataataagggaggcgattcatatgcgaattccctgaagacaaagaaacatataacaatggtgaggcatttatggtcggaccaagccttttagctcaaggaatatatgaagagggccagaaatcagtgtcggtctaccttcctgggaaggagtcgtggtatgacttgagaaatggatctccatacaagggaagtgtgacacacaagctacaggttttagaagatagtattcccagcttccaaagggctggtacaattgtgccaagaaaggacagattcagacgcagttctactcagatggtgaatgatccatacactctggtgatagccctcaatagctctggtgctgcagaaggcgaactttatatggatgacggcaaaagctatgattaccagcaaggggcattcagccatcgccgatttgtctttgcagacaataagctaacttcattcaatatcgcacctgacaatttgagcaagaaatttacaagtggttgcgtgattgaaagaattatagtcctcggtttacgatccggagtgaagaaggctattattgagcctggaaaccaagaagtagaaattgaatcagggccaattagtttaaggagtggttccagcccagttgtgccaacaatccggaggcccaatgttcgcatcgcagacagttggacaatatggatagcgtaagaggttgtccattcacgtctggagcctgatgtctcttttgtttgctgtcaggttgcgaagttaggccaatctttagaagtttagttgtggcctcgatcattgcgcatatcattatggttttgtggcctcaaaatatttacatgtaactggtacttaagctgttccaactgccaattttgacagaaatactgagagagattgctgatgtatatttgtagctttcatacatgagtatttgagtttattatcttgcaaaaatgataaacagttacaaattccgagaacatggcaaccgagttctatttaacgtttcttta

SEQ ID NO: 84541 - DNA, 580 bp, Zea Mays
gttgctttgttttttttttctgttcttagccccggagaagaaacatcgcctcccatctgcttacaatcgcttcatgagggaggagattcagcgcatcaaagctgcgaagccagatatccctcacagggaggccttcagcatggctgccaagaattgggcgaagtgtgacccgcgctgctcgacgactgcctctactgccacttctaacagcgctcctgagcctgctagagtcgtcgtgcccactcctcatgtaactgagccacgctttgatctggaggatagggccaaggagcatgtcattgagagcttcgacatcttcaagcagattgagcgcaacatctagatgtctccatttcgagtaccatcagctctatatataacctatgcatgcatatgcatccccatcttgtactttttacccccatgttactgttgctattattcttgctcttgttggattgtacgcaccctttaattgacagttgctaccctatataatgtttgccatcttatatattgtcgtcgttccttatatagggttatgatcgatatatatgtagtgtgtgcaataatttgcatt

SEQ ID NO: 84542 - DNA, 821 bp, Zea Mays
tctgctactgctgcttcgatcgacagtgccatgttggggttccatgcaagaggctcatggacacggtgactgtcaagtgcggccactgcaacaacctctcctacctcagtccacggccccccatggtgcagccgctctcgccgactgatcatcccttggggccattccagtgtcagggaccctgcagtgagtgcaggaggaaccaaccgctgccgctggcctcgccgacatcgactgacctcaccccgagaatgcccttcgttgtcaagcccccggagaagaaacatcgcctcccatctgcttacaatcgcttcatgagggaggagattcagcgcatcaaagctgcgaagccagatatccctcacagggaggccttcagcatggctgccaagaattgggcgaagtgtgacccgcgctgctcgacgactgcctctactgccacttctaacagcgctcctgagcctgctagagtcgtcgtgcccactcctcatgtaactgagccacgctttgatctggaggatagggccaaggagcatgtcattgagagcttcgacatcttcaagcagattgagcgcaacatctagatgtctccatttcgagtaccatcagctctatatataacctatgcatgcatatgcatccccatcttgtactttttacccccatgttactgttgctattattcttgctcttgttggattgtacgcaccctttaattgacagttgctaccctatataatgtttgccatcttatatattgtcgtcgttccttatatagggttatgatcgatatatatgtagtgtgtgcaataatttgcatt

SEQ ID NO: 84543 - DNA, 868 bp, Zea Mays
gttcaaactggacaagaatcttctgtttactctccggccgctgcctatatcgacttctagagctcatccctcactgcaggttggggttccatgcaagaggctcatggacacggtgactgtcaagtgcggccactgcaacaacctctcctacctcagtccacggccccccatggtgcagccgctctcgccgactgatcatcccttggggccattccagtgtcagggaccctgcagtgagtgcaggaggaaccaaccgctgccgctggcctcgccgacatcgactgacctcaccccgagaatgcccttcgttgtcaagcccccggagaagaaacatcgcctcccatctgcttacaatcgcttcatgagggaggagattcagcgcatcaaagctgcgaagccagatatccctcacagggaggccttcagcatggctgccaagaattgggcgaagtgtgacccgcgctgctcgacgactgcctctactgccacttctaacagcgctcctgagcctgctagagtcgtcgtgcccactcctcatgtaactgagccacgctttgatctggaggatagggccaaggagcatgtcattgagagcttcgacatcttcaagcagattgagcgcaacatctagatgtctccatttcgagtaccatcagctctatatataacctatgcatgcatatgcatccccatcttgtactttttacccccatgttactgttgctattattcttgctcttgttggattgtacgcaccctttaattgacagttgctaccctatataatgtttgccatcttatatattgtcgtcgttccttatatagggttatgatcgatatatatgtagtgtgtgcaataatttgcatt

SEQ ID NO: 84544 - DNA, 869 bp, Zea Mays
cttgccttgagattggatgggcgcacacatatacatcctgacatgcatgactgatgtgccacacatgtttccttggagaggttggggttccatgcaagaggctcatggacacggtgactgtcaagtgcggccactgcaacaacctctcctacctcagtccacggccccccatggtgcagccgctctcgccgactgatcatcccttggggccattccagtgtcagggaccctgcagtgagtgcaggaggaaccaaccgctgccgctggcctcgccgacatcgactgacctcaccccgagaatgcccttcgttgtcaagcccccggagaagaaacatcgcctcccatctgcttacaatcgcttcatgagggaggagattcagcgcatcaaagctgcgaagccagatatccctcacagggaggccttcagcatggctgccaagaattgggcgaagtgtgacccgcgctgctcgacgactgcctctactgccacttctaacagcgctcctgagcctgctagagtcgtcgtgcccactcctcatgtaactgagccacgctttgatctggaggatagggccaaggagcatgtcattgagagcttcgacatcttcaagcagattgagcgcaacatctagatgtctccatttcgagtaccatcagctctatatataacctatgcatgcatatgcatccccatcttgtactttttacccccatgttactgttgctattattcttgctcttgttggattgtacgcaccctttaattgacagttgctaccctatataatgtttgccatcttatatattgtcgtcgttccttatatagggttatgatcgatatatatgtagtgtgtgcaataatttgcatt

SEQ ID NO: 84545 - DNA, 816 bp, Zea Mays
ctccgctcgcctgatcgtcgctgcgtggttggggttccatgcaagaggctcatggacacggtgactgtcaagtgcggccactgcaacaacctctcctacctcagtccacggccccccatggtgcagccgctctcgccgactgatcatcccttggggccattccagtgtcagggaccctgcagtgagtgcaggaggaaccaaccgctgccgctggcctcgccgacatcgactgacctcaccccgagaatgcccttcgttgtcaagcccccggagaagaaacatcgcctcccatctgcttacaatcgcttcatgagggaggagattcagcgcatcaaagctgcgaagccagatatccctcacagggaggccttcagcatggctgccaagaattgggcgaagtgtgacccgcgctgctcgacgactgcctctactgccacttctaacagcgctcctgagcctgctagagtcgtcgtgcccactcctcatgtaactgagccacgctttgatctggaggatagggccaaggagcatgtcattgagagcttcgacatcttcaagcagattgagcgcaacatctagatgtctccatttcgagtaccatcagctctatatataacctatgcatgcatatgcatccccatcttgtactttttacccccatgttactgttgctattattcttgctcttgttggattgtacgcaccctttaattgacagttgctaccctatataatgtttgccatcttatatattgtcgtcgttccttatatagggttatgatcgatatatatgtagtgtgtgcaataatttgcatt

SEQ ID NO: 84546 - DNA, 2226 bp, Zea Mays
cctttagatccgccattagttttgtacatggtcgcactcgcacaattcgcacgtcaggtcaggccctcccctatctgtaacttagacgtcactctttggttccataatctattggctcgcttttattccacaaaaatggtttacagaaagcgagagaagtccgtctgctggtcgcaaccgagcaggatgctgtcattgcccagaacggcggcggcggtgactgtgtatgcgctggtcgctcttatcgccggcgccgccgcggcgggaggtggcgagcagccgctgtcgaggatcgccatccaccgcgccaccgttgcgccccagccgggtgccttcgtcgacgcttcgccggcccttctcggccgggagggggaggacagagaatgggtgaccgtcacatatagtaaccccaggccctcgaaggatgactggattggagtcttctcccctgctaatttcaatgattccatttgtccaccagagaatgaatgggtggagccccctcttttatgcacagctcctatcaagttccaattcgcaaactacacgaatcgtgattatggaaacactggaaagggatcgttgaggcttcagctgataaatcagagagagggtttctcttttgcattgttctctggaggcctgtcgaatccgaagctcatcgcccactcaaagagtgttactttcatcaacccaaagactccggtgtacccgcggttagcacaaggaaaatcctggaacgaatgacatggacaagtggctatggtaccaatgaggctacaccatttgtcagatggggcatagaagggcaaatccaaaccctttctcctgcaggcacccttactttcagtcgcgacaccatgtgtggtcctcctgcaaggacagttggttggcgtgatcctggtttcatacacacaagttttctcaaggacttatggcccaatctcttgtacacataccaagttggtcatcgcatttttaatggttctatagtttggggacatcagtatagcttcaaagcacctccttatcccggggaagactctttgcaacgtgttgtaattttgggggatatgggcaaggctgaggttgatggttcaaatgagttcaatgactttgagcctggttcacttaacacaacaaaccagctaattaaagacttgaagaacattgatgtagttttccatattggagacatcacatatgccaatggctatctttcacaatgggaccaattcaccgcacaggttgagcccattgcttctactgtgccttacatggttgggagtggtaaccacgaaagagattggcctggatcaggatctttctatggaaatcttgactcaggtggtgaatgcggggtaccagctcagaatatgttctacgtgccagcagaaaaccgtgagcagttctggtactcaacggactacggaatgttccgtttctgcgtagccaataccgagttggactggaggccaggaacggagcagtacaggttcatcgagcactgcctgtcatctgttgataggcagaaacagccatggctcatcttcctcgcgcaccgtgtcctgggttactcgtcggccaccttctacgccgacgaaggaacgaccgaggagcccatgggccgtgagagccttcagccactctggcagaagtacaaggtcgacatcgctatgtacggccacgtccacggctacgaacggacctgcccagtatatgagaacgcgtgcgtggccaaggggtccgacctctacgccggcgccttcacggcgacgacgcacgtcgtggtgggcggcggcggcgccagcctcgccgactacacggccgcgcgggcgcgatggagccacgtgcgggaccgcgactttgggttcgtgaagctgacggcgttcaaccacacgaggctgctgttggagtacaagaagagccgggatggcagcgtgcacgaccacttcaccatctcccgcgactaccgcgacgttctggcctgcggcgtcgacaactgccccagcaccaccctggcgtcgtgagcgagcggtggtgtcgattatattcggtttgtgtcgctgttggattttgatttcaagatcgatgcactgtgctgtactgttgtggacggaatgaaatacctgagtgaggaagcagctgctggtgcagcaggtccacatgctgcttcggagtgtccccacggccaaaaatgatcacacccctgaattctttgcttac

SEQ ID NO: 84547 - DNA, 2144 bp, Zea Mays
cctttagatccgccattagttttgtacatggtcgcactcgcacaattcgcacgtcagaaagcgagagaagtccgtctgctggtcgcaaccgagcaggatgctgtcattgcccagaacggcggcggcggtgactgtgtatgcgctggtcgctcttatcgccggcgccgccgcggcgggaggtggcgagcagccgctgtcgaggatcgccatccaccgcgccaccgttgcgccccagccgggtgccttcgtcgacgcttcgccggcccttctcggccgggagggggaggacagagaatgggtgaccgtcacatatagtaaccccaggccctcgaaggatgactggattggagtcttctcccctgctaatttcaatgattccatttgtccaccagagaatgaatgggtggagccccctcttttatgcacagctcctatcaagttccaattcgcaaactacacgaatcgtgattatggaaacactggaaagggatcgttgaggcttcagctgataaatcagagagagggtttctcttttgcattgttctctggaggcctgtcgaatccgaagctcatcgcccactcaaagagtgttactttcatcaacccaaagactccggtgtacccgcggttagcacaaggaaaatcctggaacgaaataacagtgacatggacaagtggctatggtaccaatgaggctacaccatttgtcagatggggcatagaagggcaaatccaaaccctttctcctgcaggcacccttactttcagtcgcgacaccatgtgtggtcctcctgcaaggacagttggttggcgtgatcctggtttcatacacacaagttttctcaaggacttatggcccaatctcttgtacacataccaagttggtcatcgcatttttaatggttctatagtttggggacatcagtatagcttcaaagcacctccttatcccggggaagactctttgcaacgtgttgtaattttgggggatatgggcaaggctgaggttgatggttcaaatgagttcaatgactttgagcctggttcacttaacacaacaaaccagctaattaaagacttgaagaacattgatgtagttttccatattggagacatcacatatgccaatggctatctttcacaatgggaccaattcaccgcacaggttgagcccattgcttctactgtgccttacatggttgggagtggtaaccacgaaagagattggcctggatcaggatctttctatggaaatcttgactcaggtggtgaatgcggggtaccagctcagaatatgttctacgtgccagcagaaaaccgtgagcagttctggtactcaacggactacggaatgttccgtttctgcgtagccaataccgagttggactggaggccaggaacggagcagtacaggttcatcgagcactgcctgtcatctgttgataggcagaaacagccatggctcatcttcctcgcgcaccgtgtcctgggttactcgtcggccaccttctacgccgacgaaggaacgaccgaggagcccatgggccgtgagagccttcagccactctggcagaagtacaaggtcgacatcgctatgtacggccacgtccacggctacgaacggacctgcccagtatatgagaacgcgtgcgtggccaaggggtccgacctctacgccggcgccttcacggcgacgacgcacgtcgtggtgggcggcggcggcgccagcctcgccgactacacggccgcgcgggcgcgatggagccacgtgcgggaccgcgactttgggttcgtgaagctgacggcgttcaaccacacgaggctgctgttggagtacaagaagagccgggatggcagcgtgcacgaccacttcaccatctcccgcgactaccgcgacgttctggcctgcggcgtcgacaactgccccagcaccaccctggcgtcgtgagcgagcggtggtgtcgattatattcggtttgtgtcgctgttggattttgatttcaagatcgatgcactgtgctgtactgttgtggacggaatgaaatacctgagtgaggaagcagctgctggtgcagcaggtccacatgctgcttcggagtgtccccacggccaaaaatgatcacacccctgaattctttgcttac

SEQ ID NO: 84548 - DNA, 1503 bp, Zea Mays
atgtttgcacgattcgcagcccatctctctcctcgactccttccttataacacggaggtccgcatatgggcaaagagagagaaggtgagtgctttgacaagggaaaaaaaaccaggtctgtgtgtgtgtgagagagagagagaggcgcctcatcctctcctccaccgtccccaacccgtctctggcggccgcttcctctgcggtgacgcgatcctccgccgtctcgcaaccggagatggctccacttggtgcacggtctatttcaactcaaatcgtgaggaaccggatgaagagtgtcaggaatatccagaagatcacaaaggctatgaagatggttgcagcatcaaagctccgggcagttcagacaaggactgaaaattcacgtggcttgtggcaaccgttcaccgcccttcttggggatgctcctagtgttgacgtcaagaagaatgtgattgtggccattacctctgataagggactctgtggtggtattaattcaacatcagtgaaagttagcagggcccttcacaaattgacatctggtccagaaaaagaaaccaagtatgttatattaggagaaaagggcaaagttcagctgttgcgtgactcaaaggacagcattgaaatgactgcaactgaactgcagaagaaccctatcaactacacacaggttgccgtgctcgcggatgacatattgaaaaatgtggaatatgatgctctgagggttattttcaacaagttccaatctgtcatatcgtttaagcccacaatggtaacaatactttcccccgaggttgcagaaaaagaatcagaagctggtgggaagatgggtgacctagattcttatgagattgaaggcggcgagacaaaatcagagattttgcagaatctagctgagttccagttttcttgtgtcctgtacaatggtgccctagagaatgcatgcagtgagcttggagcccgtatgtctgccatggacagctctagcagaaatgctggcgatatgcttgatcgtctcactctcacttacaacaggacacgccaagcatccatcaccacagagcttactgagattatatctggtgcatcggcccttgaggggtagtgaagagactgcggacttcttccttttgccgtttgtgttcctctcccatgaaggctttttccctcgggagtctcagtttcagctcctttcatttcacttttccttgagaaacttgctctcatgctttgttgcaataatcaggccaacgacaatgatagtgccgtgcacccttggcacattgcagaaagagtgtaaacagctatggttaatgggtggttttcatgaatggtgatgatcaatatatgtattgttgcacatgatcagcaatgttgtattggtggggtgactaatgcctgccgccaaactgagcgatataacgcgtcattaatgacatttgttcaatctgaactttaaacatttttccacttggagaatctattttgaattttggtatttca

SEQ ID NO: 84549 - DNA, 5973 bp, Zea Mays
ccgcgagctacagctttgcagcgctctctcttggctcgctcgctcgctcgcccgcctcgcctgcgccctctctttcactcctggctcgcttgcgttgtggagctcgagactgtcgccattccgctacgagaaaccctaaccctagccctcgcaccgccgcgggaggccgcgggagagaccgtgtcgcaccgcgccgtcgatcccgatccagacgccgtcgcgccgtgccgcgctgatcgagtgtggaggaatggaggacgggcagaatatcagattgcttgcagctagtttatttttccagcccagggtgaacttctgggtagtgtagtttgtcgtgggtttatcttctgcagaatagaagcaaatatttgtaaaagctgcttatagttctatatgatatgaaagtttgggaactatcaactgcaaattggccactctttctcaggcattagaccctaagggatactcaaggaatgtcacattttcatcccacacagcatgctagtgacaatgattttcagatgtggcaacagcagatgatgttcaagcacttgcaggagtttcagaggcagcaacaactacagcagtctgatcatggagccaggatgcagctctcttttggacagtttcatgctcctgcaaaacctttgcctggtgatcaattgtcgacaatgtcaaatgaaatggtcaacaatgagaccatgaattctggatggccacataattttacaggtggtgacctgagtttgacgagcaactcccagatgttgaacaatggtagcacaaattgggatcagattgttggttctcctgttgtgggcaatttcatgaatggttcaatgtttgtgaatgctcataatcagtcgatgagaccaatgggattagctacccaccaagtggatcaaactttttatccaatgcatgctaccagcagtagagggcctggaaaccagtattcccaatttttagggattcctgctgatcctcagagtgaagcggcaagggttggtccagttcagtcagaaaagacatccagaccattcaactcttcaatgaacgaacttggtcttcatatgcaaggtaccaccagtttgatgcataattttcgtggaaaagggggcttcttaaataacagtctgatgcaaagtcaaggtgataatatcagggcaggcagtccggttacaatgaatcaactacaacatggttttcaaacccaagattttcatggtaggccaaaccaagttgatcttcaagcgggcatgcaagagaaatcagcaatgcaggtagggcaagcgagtcgtggggctagccttgaccctactgaggagaaaatcttatttgggagtgacgaggatagcaactggggagctttgttgaggggtgacaatgacaatgtcaattctttggacaatgacaactatggtggtggctactcatctctacagagcggtagctggagtgcccttatgcaggaagctctccagtctacaaccagtgaaagtcccaaagaagagtggagtggcttgagtttccataaaactgagcaggtgatggctagcaatgcaaatttatcaggccgcaatggtagtaagtttactggattaagtggtgcaaacctagaaaatgcacgtccttcgccagcgtccagctatgctgatggaacaatgaataacccaaaccttgccagttttcagcatgtcataaggcctccatccgagcgaagggaccatatgtctcatgaatcttctaatgctcctgttaacaatcatcaatcaacttctgaagtcaacaaggggtactttcagcaaggcataaaacaaattcactctgatgcaaggcaaggacaagcgcacctagtaaatggaacctggccgcatcaaaagactgaactgctcagaagtaatttgcagtcaactggtgtacatgctacaccacctggtggacatggatttgggatgtcacaacaaattgcaactgatcacaatatcaacagagagtccagtaataatcaaaatgactggaaagctaacaatgcacttggacaagacatgtgcaatagccaaaatatctttaatagcaatgagaactcttggaagtcaactggaggtaatgccaattcagtccagagatttcagcagaggaggtctgatgtaagcgctactaatgaaagttcagatggtaaaaatattagcatgatgagctcaagcatgccaatgatgacacaggatcattaccagatggtcactagtcagagtggtgagcaaattggcatgaaccgtaatctgacacatagagctccagagacctctgagtcaccaggaaaaagcgcagaacaaagaccaggtgatttcaatcaggaatatctaaatgcaatccctaacgaaagagaaacacacatttcaaaccatggtcgacacataacaagtgattctgcccccagaaggcattctgtatctgctgggaaggaatctgaaaatttaggtcagtctagtcagcaagcaatgggatcttacatcttgcagaaccgtgctatggggagttctggaatgaacattggtctgtctccaggcaatccaatgtcaaatagtctgtttccacctcagacacgaaatagtctgcagcatcattttggcacaaactcccatgtttccaatagtatgccgtcagcaagtgaggaacaacttcaatcgcgacatggtctccccaacagctccagtgcatcaactttaggaggagctgatactggtctatcccagaatagagcagttcaaaacagtcaacatatgcttcagcttctgcataaggtggataactcaaggaatagcaatgtggttgctgacatacccaacaattcccttggcgttgtttctgcccagcaacaacttaaccattcttctttgcaaggatttgggttgagactggcaccaccatcccaactccaatcaatttcgggtaatttatggtctagtcagactaatgctgatggcaagcaattttaccaagatggcgaccgcacacagctaccttccacccctagccagtcactgactcctcagcatcaaaattctctatcttcaccatttcacagttcagaaacagaaaatactgggcaaccaattgcgtgtttcccccaattaggatcaggccaacagtatcctatggcagatgatagatctggtcctgcacccatgctgcagcagcagcctcagcaaagcaactctgcaacagtgttcaagaatgtatggacaaacatatcagcacagcgcctaactggtatgcaacctaacaagattacacccaacatcattcagtctatgatgtttccaaataatgctgcagcttccaacttatggagctctcagaaggcagatgatcaagggcagagggcatcaactccatcagatattgcaacaagttcagcgaactcacagaatcaatctccaaaacaagctgctgatagtgatgcaaagttagcatcttcccagaagggaaacctagagttgacaggaactaccgtaacaggaggaaacgaatccttgcagaagccttcttcagatgagaattctatcaatgctgtttcatcctttgcacagttgcgtcagcaaggcatccttggtgctaaacatggggagaacccaggagctaattttcaggctatgaatgtttcccacaataatgctaatcacagtggtggcattgttttacatggaagtccagcacctacaaacattcagcagcaaaattactctcttctacatcaaatgcaaacctcgaggcatatggatgttgatccaggcagtttatctggaaagacgacaaaacctgatattggttctgatgctgcacagattgattggaattctggtcagagatttgctcatgtaaccaataactcaaccaaatcgtctgcagataacattggaagccctggtgtcccagggtcattcacatcggacttgaaaatgttgagttttgcttcaaggaacgaggagagaaatccaaacataccttctcggtttccttccggagagtgcccgtctcctggtatgataaccacacaagatgataatcagaatcaagttcagcatatgggcacaggtgcaatgtcaaattctgatgaaagaagtgagaggccgaggataaaccctcaaatggcaccttcttggtttggacattacggaaactacagaaatggtcagagtgttgctacgcttaatgctgctacgcttaatgcgcagaagcccatggctttgccatttaattttccgaaagcatctcggaacaatgaaaataatagccatgctgaaaatagagttgaacctagccaatctgttaggcctgggcatcatctcccatcagcaagaatggaagctttggttccttccaatgtaaaagtgtcttcaatgatgagaaggcctaagaagcgtaaaactatggactccacacttgtttcttggcataaaataattgaaagcccacgaaaattgaggggcatcagcacacctgagatggactgggcttgggcagctaaccggttaattgagaaggatgaggcagaaactccagacgatgctcctttaaattatttgccgcggaagaggctaattttgacaagccagttgatccagcaacttctccctgctataccagcgaccattctgagagcacaagctgtgtctgcttacggaagtgcgacatacactctatcaatgttgacactaagggatgcatgcagcatggcatcatcatcatataactcttgctcacctgtggaggatgaaaataacccatctgaacaaccaagtgctaagaaaatggaagacagagtgtcaaaggttgtggaagtcttcgttggaagaatccggaagatggaaaatgactttataagtttgaacaagagggcctcgatgctagatgtgcaactggagtgccaagatctggagagaatttctattgtaaatcgtctgggaagatttcatggccggagccatgcagcggcagttgagagttcatcagctccagaaatgactcctcggagaatttttcctgaaagacatgtcatgtcttttgccgtgcctggaaatcttcctgaaggagtgtgctgtttgtcactctagtggaatgatcttcagttattttctagccgcaatgatgatcccgggtcgcgccctgtgattcccagtgctccttgtcccatgcaaagcatggtcaaacagaaggatcatatattgtcaaggggtaacttgagaactggaagcatcacagtaccacgatgaggcaggccggggacatgttccagccgatcaagtcagtgctggctgttgttgatgcaccttatatcaagtataggtccatgtatattgtggaaagtgaaggaaaaaaactgtggatctcccatcatttttctcgatgaagagtaattagcctcagaatttttttagagaagtcgatgcttactagcttagtgcatctggtgggtttcttgggtatttgtcgatctctaagaaatccgtgatgatggagtgttggcaggctagagtggaaataataatgtgagcctttctctgggttctttggttcctttaggatgggatgcaaattggctagtgtgtcctccagtctaactgaccacccctgttagtcagcagttaattattactagttttatgtagtgctgaaagcattcatggaacaattggcgggtaaagtgcttgggaattcttgtaacttgtgtacccgtgatgtttaaacgctaacgggttcttgtaaatttgaagtgccaatattcctgaggttatattttgctttgtgcaaattgaccagcgtctactgtctccagatgcgtcaatgaagctgggcgcttgcggcttccggtgttccgtttcgctagtggaatgatctcgtgatgatacagtctaaattgatcagtgagctgcgattgggtttgcgagtttccgtaggtttagaatgaag

SEQ ID NO: 84550 - DNA, 6002 bp, Zea Mays
gcaccccctctccgcgagctacagctttgcagcgctctctcttggctcgctcgctcgctcgcccgcctcgcctgcgccctctctttcactcctggctcgcttgcgttgtggagctcgagactgtcgccattccgctacgagaaaccctaaccctagccctcgcaccgccgcgggaggccgcgggagagaccgtgtcgcaccgcgccgtcgatcccgatccagacgccgtcgcgccgtgccgcgctgatcgagtgtggaggaatggaggacgggcagaatatcagattgcttgcagctagtttatttttccagcccagggtgaacttctgggtagtgtagtttgtcgtgggtttatcttctgcagaatagaagcaaatatttgtaaaagctgcttatagttctatatgatatgaaagtttgggaactatcaactgcaaattggccactctttctcaggcattagaccctaagggatactcaaggaatgtcacattttcatcccacacagcatgctagtgacaatgattttcagatgtggcaacagcagatgatgttcaagcacttgcaggagtttcagaggcagcaacaactacagcagtctgatcatggagccaggatgcagctctcttttggacagtttcatgctcctgcaaaacctttgcctggtgatcaattgtcgacaatgtcaaatgaaatggtcaacaatgagaccatgaattctggatggccacataattttacaggtggtgacctgagtttgacgagcaactcccagatgttgaacaatggtagcacaaattgggatcagattgttggttctcctgttgtgggcaatttcatgaatggttcaatgtttgtgaatgctcataatcagtcgatgagaccaatgggattagctacccaccaagtggatcaaactttttatccaatgcatgctaccagcagtagagggcctggaaaccagtattcccaatttttagggattcctgctgatcctcagagtgaagcggcaagggttggtccagttcagtcagaaaagacatccagaccattcaactcttcaatgaacgaacttggtcttcatatgcaaggtaccaccagtttgatgcataattttcgtggaaaagggggcttcttaaataacagtctgatgcaaagtcaaggtgataatatcagggcaggcagtccggttacaatgaatcaactacaacatggttttcaaacccaagattttcatggtaggccaaaccaagttgatcttcaagcgggcatgcaagagaaatcagcaatgcaggtagggcaagcgagtcgtggggctagccttgaccctactgaggagaaaatcttatttgggagtgacgaggatagcaactggggagctttgttgaggggtgacaatgacaatgtcaattctttggacaatgacaactatggtggtggctactcatctctacagagcggtagctggagtgcccttatgcaggaagctctccagtctacaaccagtgaaagtcccaaagaagagtggagtggcttgagtttccataaaactgagcaggtgatggctagcaatgcaaatttatcaggccgcaatggtagtaagtttactggattaagtggtgcaaacctagaaaatgcacgtccttcgccagcgtccagctatgctgatggaacaatgaataacccaaaccttgccagttttcagcatgtcataaggcctccatccgagcgaagggaccatatgtctcatgaatcttctaatgctcctgttaacaatcatcaatcaacttctgaagtcaacaaggggtactttcagcaaggcataaaacaaattcactctgatgcaaggcaaggacaagcgcacctagtaaatggaacctggccgcatcaaaagactgaactgctcagaagtaatttgcagtcaactggtgtacatgctacaccacctggtggacatggatttgggatgtcacaacaaattgcaactgatcacaatatcaacagagagtccagtaataatcaaaatgactggaaagctaacaatgcacttggacaagacatgtgcaatagccaaaatatctttaatagcaatgagaactcttggaagtcaactggaggtaatgccaattcagtccagagatttcagcagaggaggtctgatgtaagcgctactaatgaaagttcagatggtaaaaatattagcatgatgagctcaagcatgccaatgatgacacaggatcattaccagatggtcactagtcagagtggtgagcaaattggcatgaaccgtaatctgacacatagagctccagagacctctgagtcaccaggaaaaagcgcagaacaaagaccaggtgatttcaatcaggaatatctaaatgcaatccctaacgaaagagaaacacacatttcaaaccatggtcgacacataacaagtgattctgcccccagaaggcattctgtatctgctgggaaggaatctgaaaatttaggtcagtctagtcagcaagcaatgggatcttacatcttgcagaaccgtgctatggggagttctggaatgaacattggtctgtctccaggcaatccaatgtcaaatagtctgtttccacctcagacacgaaatagtctgcagcatcattttggcacaaactcccatgtttccaatagtatgccgtcagcaagtgagaaaatgatgatggcacaggaacaacttcaatcgcgacatggtctccccaacagctccagtgcatcaactttaggaggagctgatactggtctatcccagaatagagcagttcaaaacagtcaacatatgcttcagcttctgcataaggtggataactcaaggaatagcaatgtggttgctgacatacccaacaattcccttggcgttgtttctgcccagcaacaacttaaccattcttctttgcaaggatttgggttgagactggcaccaccatcccaactccaatcaatttcgggtaatttatggtctagtcagactaatgctgatggcaagcaattttaccaagatggcgaccgcacacagctaccttccacccctagccagtcactgactcctcagcatcaaaattctctatcttcaccatttcacagttcagaaacagaaaatactgggcaaccaattgcgtgtttcccccaattaggatcaggccaacagtatcctatggcagatgatagatctggtcctgcacccatgctgcagcagcagcctcagcaaagcaactctgcaacagtgttcaagaatgtatggacaaacatatcagcacagcgcctaactggtatgcaacctaacaagattacacccaacatcattcagtctatgatgtttccaaataatgctgcagcttccaacttatggagctctcagaaggcagatgatcaagggcagagggcatcaactccatcagatattgcaacaagttcagcgaactcacagaatcaatctccaaaacaagctgctgatagtgatgcaaagttagcatcttcccagaagggaaacctagagttgacaggaactaccgtaacaggaggaaacgaatccttgcagaagccttcttcagatgagaattctatcaatgctgtttcatcctttgcacagttgcgtcagcaaggcatccttggtgctaaacatggggagaacccaggagctaattttcaggctatgaatgtttcccacaataatgctaatcacagtggtggcattgttttacatggaagtccagcacctacaaacattcagcagcaaaattactctcttctacatcaaatgcaaacctcgaggcatatggatgttgatccaggcagtttatctggaaagacgacaaaacctgatattggttctgatgctgcacagattgattggaattctggtcagagatttgctcatgtaaccaataactcaaccaaatcgtctgcagataacattggaagccctggtgtcccagggtcattcacatcggacttgaaaatgttgagttttgcttcaaggaacgaggagagaaatccaaacataccttctcggtttccttccggagagtgcccgtctcctggtatgataaccacacaagatgataatcagaatcaagttcagcatatgggcacaggtgcaatgtcaaattctgatgaaagaagtgagaggccgaggataaaccctcaaatggcaccttcttggtttggacattacggaaactacagaaatggtcagagtgttgctacgcttaatgctgctacgcttaatgcgcagaagcccatggctttgccatttaattttccgaaagcatctcggaacaatgaaaataatagccatgctgaaaatagagttgaacctagccaatctgttaggcctgggcatcatctcccatcagcaagaatggaagctttggttccttccaatgtaaaagtgtcttcaatgatgagaaggcctaagaagcgtaaaactatggactccacacttgtttcttggcataaaataattgaaagcccacgaaaattgaggggcatcagcacacctgagatggactgggcttgggcagctaaccggttaattgagaaggatgaggcagaaactccagacgatgctcctttaaattatttgccgcggaagaggctaattttgacaagccagttgatccagcaacttctccctgctataccagcgaccattctgagagcacaagctgtgtctgcttacggaagtgcgacatacactctatcaatgttgacactaagggatgcatgcagcatggcatcatcatcatataactcttgctcacctgtggaggatgaaaataacccatctgaacaaccaagtgctaagaaaatggaagacagagtgtcaaaggttgtggaagtcttcgttggaagaatccggaagatggaaaatgactttataagtttgaacaagagggcctcgatgctagatgtgcaactggagtgccaagatctggagagaatttctattgtaaatcgtctgggaagatttcatggccggagccatgcagcggcagttgagagttcatcagctccagaaatgactcctcggagaatttttcctgaaagacatgtcatgtcttttgccgtgcctggaaatcttcctgaaggagtgtgctgtttgtcactctagtggaatgatcttcagttattttctagccgcaatgatgatcccgggtcgcgccctgtgattcccagtgctccttgtcccatgcaaagcatggtcaaacagaaggatcatatattgtcaaggggtaacttgagaactggaagcatcacagtaccacgatgaggcaggccggggacatgttccagccgatcaagtcagtgctggctgttgttgatgcaccttatatcaagtataggtccatgtatattgtggaaagtgaaggaaaaaaactgtggatctcccatcatttttctcgatgaagagtaattagcctcagaatttttttagagaagtcgatgcttactagcttagtgcatctggtgggtttcttgggtatttgtcgatctctaagaaatccgtgatgatggagtgttggcaggctagagtggaaataataatgtgagcctttctctgggttctttggttcctttaggatgggatgcaaattggctagtgtgtcctccagtctaactgaccacccctgttagtcagcagttaattattactagttttatgtagtgctgaaagcattcatggaacaattggcgggtaaagtgcttgggaattcttgtaacttgtgtacccgtgatgtttaaacgctaacgggttcttgtaaatttgaagtgccaatattcctgaggttatattttgctttgtgcaaattgaccagcgtctactgtctccagatgcgtcaatgaagctgggcgcttgcggcttccggtgttccgtttcgctagtggaatgatctcgtgatgatacagtctaaattgatcagtgagctgcgattgggtttgcgagtttccgtaggtttagaatgaag

SEQ ID NO: 84551 - DNA, 6563 bp, Zea Mays
gtcatgatgtgtttgacatccgagacctaccccactggccttagcgtggggcatacatggtggagctttatcaagataatcttatggacctattgctgccctgaaatgcaaagcaactaaagttagagataaaaaattccaagctgctaaattggtttgacataataaatctcataagacacacctttgcgcattggaaataggcatctagaatgttagaaaatccaagtggaagactcccatgatgcaatcctatatccactgcaggcaaggaatcatctgcatctccattctccaggaatgtgtagtcgcataaccagtttgaatattgttagggttggcatgaaggttcagcccacgactaggctccacatgtttgtcatcactcagttctttggagtttggacaacccccgagggcaccaaatctaggaggctcttcttcgcactaaaatcacaagaatgcgctcgaaaactgagggcagatttggcaattgaagaacagtgggaacaagaactgagaagaatgctgaagggcatagtaacagatacaagctaaaattgagacacatataaatgaccatgaatgagactgtatgagcctgatcagctcaattctaggttatgtgcattgtttgctcagtagactacagaccataagatgctcgacgttaaacttatgctgtcatgtagatgcttagtcctctcctcgcctttcgcagtcgcaggcgagttaagaagtggactaacttggatgaaccagcagagagtatgttccctagacaacgacaaacaatgttacctctacgtaaattgtggaggaatggaggacgggcagaatatcagattgcttgcagctagtttatttttccagcccagggtgaacttctgggtagtgtagtttgtcgtgggtttatcttctgcagaatagaagcaaatatttgtaaaagctgcttatagttctatatgatatgaaagtttgggaactatcaactgcaaattggccactctttctcaggcattagaccctaagggatactcaaggaatgtcacattttcatcccacacagcatgctagtgacaatgattttcagatgtggcaacagcagatgatgttcaagcacttgcaggagtttcagaggcagcaacaactacagcagtctgatcatggagccaggatgcagctctcttttggacagtttcatgctcctgcaaaacctttgcctggtgatcaattgtcgacaatgtcaaatgaaatggtcaacaatgagaccatgaattctggatggccacataattttacaggtggtgacctgagtttgacgagcaactcccagatgttgaacaatggtagcacaaattgggatcagattgttggttctcctgttgtgggcaatttcatgaatggttcaatgtttgtgaatgctcataatcagtcgatgagaccaatgggattagctacccaccaagtggatcaaactttttatccaatgcatgctaccagcagtagagggcctggaaaccagtattcccaatttttagggattcctgctgatcctcagagtgaagcggcaagggttggtccagttcagtcagaaaagacatccagaccattcaactcttcaatgaacgaacttggtcttcatatgcaaggtaccaccagtttgatgcataattttcgtggaaaagggggcttcttaaataacagtctgatgcaaagtcaaggtgataatatcagggcaggcagtccggttacaatgaatcaactacaacatggttttcaaacccaagattttcatggtaggccaaaccaagttgatcttcaagcgggcatgcaagagaaatcagcaatgcaggtagggcaagcgagtcgtggggctagccttgaccctactgaggagaaaatcttatttgggagtgacgaggatagcaactggggagctttgttgaggggtgacaatgacaatgtcaattctttggacaatgacaactatggtggtggctactcatctctacagagcggtagctggagtgcccttatgcaggaagctctccagtctacaaccagtgaaagtcccaaagaagagtggagtggcttgagtttccataaaactgagcaggtgatggctagcaatgcaaatttatcaggccgcaatggtagtaagtttactggattaagtggtgcaaacctagaaaatgcacgtccttcgccagcgtccagctatgctgatggaacaatgaataacccaaaccttgccagttttcagcatgtcataaggcctccatccgagcgaagggaccatatgtctcatgaatcttctaatgctcctgttaacaatcatcaatcaacttctgaagtcaacaaggggtactttcagcaaggcataaaacaaattcactctgatgcaaggcaaggacaagcgcacctagtaaatggaacctggccgcatcaaaagactgaactgctcagaagtaatttgcagtcaactggtgtacatgctacaccacctggtggacatggatttgggatgtcacaacaaattgcaactgatcacaatatcaacagagagtccagtaataatcaaaatgactggaaagctaacaatgcacttggacaagacatgtgcaatagccaaaatatctttaatagcaatgagaactcttggaagtcaactggaggtaatgccaattcagtccagagatttcagcagaggaggtctgatgtaagcgctactaatgaaagttcagatggtaaaaatattagcatgatgagctcaagcatgccaatgatgacacaggatcattaccagatggtcactagtcagagtggtgagcaaattggcatgaaccgtaatctgacacatagagctccagagacctctgagtcaccaggaaaaagcgcagaacaaagaccaggtgatttcaatcaggaatatctaaatgcaatccctaacgaaagagaaacacacatttcaaaccatggtcgacacataacaagtgattctgcccccagaaggcattctgtatctgctgggaaggaatctgaaaatttaggtcagtctagtcagcaagcaatgggatcttacatcttgcagaaccgtgctatggggagttctggaatgaacattggtctgtctccaggcaatccaatgtcaaatagtctgtttccacctcagacacgaaatagtctgcagcatcattttggcacaaactcccatgtttccaatagtatgccgtcagcaagtgagaaaatgatgatggcacaggaacaacttcaatcgcgacatggtctccccaacagctccagtgcatcaactttaggaggagctgatactggtctatcccagaatagagcagttcaaaacagtcaacatatgcttcagcttctgcataaggtggataactcaaggaatagcaatgtggttgctgacatacccaacaattcccttggcgttgtttctgcccagcaacaacttaaccattcttctttgcaaggatttgggttgagactggcaccaccatcccaactccaatcaatttcgggtaatttatggtctagtcagactaatgctgatggcaagcaattttaccaagatggcgaccgcacacagctaccttccacccctagccagtcactgactcctcagcatcaaaattctctatcttcaccatttcacagttcagaaacagaaaatactgggcaaccaattgcgtgtttcccccaattaggatcaggccaacagtatcctatggcagatgatagatctggtcctgcacccatgctgcagcagcagcctcagcaaagcaactctgcaacagtgttcaagaatgtatggacaaacatatcagcacagcgcctaactggtatgcaacctaacaagattacacccaacatcattcagtctatgatgtttccaaataatgctgcagcttccaacttatggagctctcagaaggcagatgatcaagggcagagggcatcaactccatcagatattgcaacaagttcagcgaactcacagaatcaatctccaaaacaagctgctgatagtgatgcaaagttagcatcttcccagaagggaaacctagagttgacaggaactaccgtaacaggaggaaacgaatccttgcagaagccttcttcagatgagaattctatcaatgctgtttcatcctttgcacagttgcgtcagcaaggcatccttggtgctaaacatggggagaacccaggagctaattttcaggctatgaatgtttcccacaataatgctaatcacagtggtggcattgttttacatggaagtccagcacctacaaacattcagcagcaaaattactctcttctacatcaaatgcaaacctcgaggcatatggatgttgatccaggcagtttatctggaaagacgacaaaacctgatattggttctgatgctgcacagattgattggaattctggtcagagatttgctcatgtaaccaataactcaaccaaatcgtctgcagataacattggaagccctggtgtcccagggtcattcacatcggacttgaaaatgttgagttttgcttcaaggaacgaggagagaaatccaaacataccttctcggtttccttccggagagtgcccgtctcctggtatgataaccacacaagatgataatcagaatcaagttcagcatatgggcacaggtgcaatgtcaaattctgatgaaagaagtgagaggccgaggataaaccctcaaatggcaccttcttggtttggacattacggaaactacagaaatggtcagagtgttgctacgcttaatgctgctacgcttaatgcgcagaagcccatggctttgccatttaattttccgaaagcatctcggaacaatgaaaataatagccatgctgaaaatagagttgaacctagccaatctgttaggcctgggcatcatctcccatcagcaagaatggaagctttggttccttccaatgtaaaagtgtcttcaatgatgagaaggcctaagaagcgtaaaactatggactccacacttgtttcttggcataaaataattgaaagcccacgaaaattgaggggcatcagcacacctgagatggactgggcttgggcagctaaccggttaattgagaaggatgaggcagaaactccagacgatgctcctttaaattatttgccgcggaagaggctaattttgacaagccagttgatccagcaacttctccctgctataccagcgaccattctgagagcacaagctgtgtctgcttacggaagtgcgacatacactctatcaatgttgacactaagggatgcatgcagcatggcatcatcatcatataactcttgctcacctgtggaggatgaaaataacccatctgaacaaccaagtgctaagaaaatggaagacagagtgtcaaaggttgtggaagtcttcgttggaagaatccggaagatggaaaatgactttataagtttgaacaagagggcctcgatgctagatgtgcaactggagtgccaagatctggagagaatttctattgtaaatcgtctgggaagatttcatggccggagccatgcagcggcagttgagagttcatcagctccagaaatgactcctcggagaatttttcctgaaagacatgtcatgtcttttgccgtgcctggaaatcttcctgaaggagtgtgctgtttgtcactctagtggaatgatcttcagttattttctagccgcaatgatgatcccgggtcgcgccctgtgattcccagtgctccttgtcccatgcaaagcatggtcaaacagaaggatcatatattgtcaaggggtaacttgagaactggaagcatcacagtaccacgatgaggcaggccggggacatgttccagccgatcaagtcagtgctggctgttgttgatgcaccttatatcaagtataggtccatgtatattgtggaaagtgaaggaaaaaaactgtggatctcccatcatttttctcgatgaagagtaattagcctcagaatttttttagagaagtcgatgcttactagcttagtgcatctggtgggtttcttgggtatttgtcgatctctaagaaatccgtgatgatggagtgttggcaggctagagtggaaataataatgtgagcctttctctgggttctttggttcctttaggatgggatgcaaattggctagtgtgtcctccagtctaactgaccacccctgttagtcagcagttaattattactagttttatgtagtgctgaaagcattcatggaacaattggcgggtaaagtgcttgggaattcttgtaacttgtgtacccgtgatgtttaaacgctaacgggttcttgtaaatttgaagtgccaatattcctgaggttatattttgctttgtgcaaattgaccagcgtctactgtctccagatgcgtcaatgaagctgggcgcttgcggcttccggtgttccgtttcgctagtggaatgatctcgtgatgatacagtctaaattgatcagtgagctgcgattgggtttgcgagtttccgtaggtttagaatgaag

SEQ ID NO: 84552 - DNA, 6570 bp, Zea Mays
ctcagctagcaacctagcagagagcattagcagtggcttccagtcatgatgtgtttgacatccgagacctaccccactggccttagcgtggggcatacatggtggagctttatcaagataatcttatggacctattgctgccctgaaatgcaaagcaactaaagttagagataaaaaattccaagctgctaaattggtttgacataataaatctcataagacacacctttgcgcattggaaataggcatctagaatgttagaaaatccaagtggaagactcccatgatgcaatcctatatccactgcaggcaaggaatcatctgcatctccattctccaggaatgtgtagtcgcataaccagtttgaatattgttagggttggcatgaagcccacgactaggctccacatgtttgtcatcactcagttctttggagtttggacaacccccgagggcaccaaatctaggaggctcttcttcgcactaaaatcacaagaatgcgctcgaaaactgagggcagatttggcaattgaagaacagtgggaacaagaactgagaagaatgctgaagggcatagtaacagatacaagctaaaattgagacacatataaatgaccatgaatgagactgtatgagcctgatcagctcaattctaggttatgtgcattgtttgctcagtagactacagaccataagtcgcaggcgagttaagaagtggactaacttggatgaaccagcagagagtatgttccctagacaacgacaaacaatgttacctctacgtaaatgtatgtacttagatcttacttttaccgatctgtgtggaggaatggaggacgggcagaatatcagattgcttgcagctagtttatttttccagcccagggtgaacttctgggtagtgtagtttgtcgtgggtttatcttctgcagaatagaagcaaatatttgtaaaagctgcttatagttctatatgatatgaaagtttgggaactatcaactgcaaattggccactctttctcaggcattagaccctaagggatactcaaggaatgtcacattttcatcccacacagcatgctagtgacaatgattttcagatgtggcaacagcagatgatgttcaagcacttgcaggagtttcagaggcagcaacaactacagcagtctgatcatggagccaggatgcagctctcttttggacagtttcatgctcctgcaaaacctttgcctggtgatcaattgtcgacaatgtcaaatgaaatggtcaacaatgagaccatgaattctggatggccacataattttacaggtggtgacctgagtttgacgagcaactcccagatgttgaacaatggtagcacaaattgggatcagattgttggttctcctgttgtgggcaatttcatgaatggttcaatgtttgtgaatgctcataatcagtcgatgagaccaatgggattagctacccaccaagtggatcaaactttttatccaatgcatgctaccagcagtagagggcctggaaaccagtattcccaatttttagggattcctgctgatcctcagagtgaagcggcaagggttggtccagttcagtcagaaaagacatccagaccattcaactcttcaatgaacgaacttggtcttcatatgcaaggtaccaccagtttgatgcataattttcgtggaaaagggggcttcttaaataacagtctgatgcaaagtcaaggtgataatatcagggcaggcagtccggttacaatgaatcaactacaacatggttttcaaacccaagattttcatggtaggccaaaccaagttgatcttcaagcgggcatgcaagagaaatcagcaatgcaggtagggcaagcgagtcgtggggctagccttgaccctactgaggagaaaatcttatttgggagtgacgaggatagcaactggggagctttgttgaggggtgacaatgacaatgtcaattctttggacaatgacaactatggtggtggctactcatctctacagagcggtagctggagtgcccttatgcaggaagctctccagtctacaaccagtgaaagtcccaaagaagagtggagtggcttgagtttccataaaactgagcaggtgatggctagcaatgcaaatttatcaggccgcaatggtagtaagtttactggattaagtggtgcaaacctagaaaatgcacgtccttcgccagcgtccagctatgctgatggaacaatgaataacccaaaccttgccagttttcagcatgtcataaggcctccatccgagcgaagggaccatatgtctcatgaatcttctaatgctcctgttaacaatcatcaatcaacttctgaagtcaacaaggggtactttcagcaaggcataaaacaaattcactctgatgcaaggcaaggacaagcgcacctagtaaatggaacctggccgcatcaaaagactgaactgctcagaagtaatttgcagtcaactggtgtacatgctacaccacctggtggacatggatttgggatgtcacaacaaattgcaactgatcacaatatcaacagagagtccagtaataatcaaaatgactggaaagctaacaatgcacttggacaagacatgtgcaatagccaaaatatctttaatagcaatgagaactcttggaagtcaactggaggtaatgccaattcagtccagagatttcagcagaggaggtctgatgtaagcgctactaatgaaagttcagatggtaaaaatattagcatgatgagctcaagcatgccaatgatgacacaggatcattaccagatggtcactagtcagagtggtgagcaaattggcatgaaccgtaatctgacacatagagctccagagacctctgagtcaccaggaaaaagcgcagaacaaagaccaggtgatttcaatcaggaatatctaaatgcaatccctaacgaaagagaaacacacatttcaaaccatggtcgacacataacaagtgattctgcccccagaaggcattctgtatctgctgggaaggaatctgaaaatttaggtcagtctagtcagcaagcaatgggatcttacatcttgcagaaccgtgctatggggagttctggaatgaacattggtctgtctccaggcaatccaatgtcaaatagtctgtttccacctcagacacgaaatagtctgcagcatcattttggcacaaactcccatgtttccaatagtatgccgtcagcaagtgagaaaatgatgatggcacaggaacaacttcaatcgcgacatggtctccccaacagctccagtgcatcaactttaggaggagctgatactggtctatcccagaatagagcagttcaaaacagtcaacatatgcttcagcttctgcataaggtggataactcaaggaatagcaatgtggttgctgacatacccaacaattcccttggcgttgtttctgcccagcaacaacttaaccattcttctttgcaaggatttgggttgagactggcaccaccatcccaactccaatcaatttcgggtaatttatggtctagtcagactaatgctgatggcaagcaattttaccaagatggcgaccgcacacagctaccttccacccctagccagtcactgactcctcagcatcaaaattctctatcttcaccatttcacagttcagaaacagaaaatactgggcaaccaattgcgtgtttcccccaattaggatcaggccaacagtatcctatggcagatgatagatctggtcctgcacccatgctgcagcagcagcctcagcaaagcaactctgcaacagtgttcaagaatgtatggacaaacatatcagcacagcgcctaactggtatgcaacctaacaagattacacccaacatcattcagtctatgatgtttccaaataatgctgcagcttccaacttatggagctctcagaaggcagatgatcaagggcagagggcatcaactccatcagatattgcaacaagttcagcgaactcacagaatcaatctccaaaacaagctgctgatagtgatgcaaagttagcatcttcccagaagggaaacctagagttgacaggaactaccgtaacaggaggaaacgaatccttgcagaagccttcttcagatgagaattctatcaatgctgtttcatcctttgcacagttgcgtcagcaaggcatccttggtgctaaacatggggagaacccaggagctaattttcaggctatgaatgtttcccacaataatgctaatcacagtggtggcattgttttacatggaagtccagcacctacaaacattcagcagcaaaattactctcttctacatcaaatgcaaacctcgaggcatatggatgttgatccaggcagtttatctggaaagacgacaaaacctgatattggttctgatgctgcacagattgattggaattctggtcagagatttgctcatgtaaccaataactcaaccaaatcgtctgcagataacattggaagccctggtgtcccagggtcattcacatcggacttgaaaatgttgagttttgcttcaaggaacgaggagagaaatccaaacataccttctcggtttccttccggagagtgcccgtctcctggtatgataaccacacaagatgataatcagaatcaagttcagcatatgggcacaggtgcaatgtcaaattctgatgaaagaagtgagaggccgaggataaaccctcaaatggcaccttcttggtttggacattacggaaactacagaaatggtcagagtgttgctacgcttaatgctgctacgcttaatgcgcagaagcccatggctttgccatttaattttccgaaagcatctcggaacaatgaaaataatagccatgctgaaaatagagttgaacctagccaatctgttaggcctgggcatcatctcccatcagcaagaatggaagctttggttccttccaatgtaaaagtgtcttcaatgatgagaaggcctaagaagcgtaaaactatggactccacacttgtttcttggcataaaataattgaaagcccacgaaaattgaggggcatcagcacacctgagatggactgggcttgggcagctaaccggttaattgagaaggatgaggcagaaactccagacgatgctcctttaaattatttgccgcggaagaggctaattttgacaagccagttgatccagcaacttctccctgctataccagcgaccattctgagagcacaagctgtgtctgcttacggaagtgcgacatacactctatcaatgttgacactaagggatgcatgcagcatggcatcatcatcatataactcttgctcacctgtggaggatgaaaataacccatctgaacaaccaagtgctaagaaaatggaagacagagtgtcaaaggttgtggaagtcttcgttggaagaatccggaagatggaaaatgactttataagtttgaacaagagggcctcgatgctagatgtgcaactggagtgccaagatctggagagaatttctattgtaaatcgtctgggaagatttcatggccggagccatgcagcggcagttgagagttcatcagctccagaaatgactcctcggagaatttttcctgaaagacatgtcatgtcttttgccgtgcctggaaatcttcctgaaggagtgtgctgtttgtcactctagtggaatgatcttcagttattttctagccgcaatgatgatcccgggtcgcgccctgtgattcccagtgctccttgtcccatgcaaagcatggtcaaacagaaggatcatatattgtcaaggggtaacttgagaactggaagcatcacagtaccacgatgaggcaggccggggacatgttccagccgatcaagtcagtgctggctgttgttgatgcaccttatatcaagtataggtccatgtatattgtggaaagtgaaggaaaaaaactgtggatctcccatcatttttctcgatgaagagtaattagcctcagaatttttttagagaagtcgatgcttactagcttagtgcatctggtgggtttcttgggtatttgtcgatctctaagaaatccgtgatgatggagtgttggcaggctagagtggaaataataatgtgagcctttctctgggttctttggttcctttaggatgggatgcaaattggctagtgtgtcctccagtctaactgaccacccctgttagtcagcagttaattattactagttttatgtagtgctgaaagcattcatggaacaattggcgggtaaagtgcttgggaattcttgtaacttgtgtacccgtgatgtttaaacgctaacgggttcttgtaaatttgaagtgccaatattcctgaggttatattttgctttgtgcaaattgaccagcgtctactgtctccagatgcgtcaatgaagctgggcgcttgcggcttccggtgttccgtttcgctagtggaatgatctcgtgatgatacagtctaaattgatcagtgagctgcgattgggtttgcgagtttccgtaggtttagaatgaag

SEQ ID NO: 84553 - DNA, 6966 bp, Zea Mays
acgctcagacgtctaggcatctcgcttgctttccttccaggcttccacgattccaccccagtctgcccaccgactcttccctctccccactactgtcggcgcgtgctctttcctcctcacaccgcacacccgctgccggagctcgagagtcccctccgcttgtcggtgcccgttctgtcaacccctcgccggacgcctgccgccggagctagagagggccaatgcagccgccgctgcgtggtgcctagggcgggtcgcaggggacaaggccgagcccaccaccgtcgacgaggcattcatggaacgcagcaagagcttcatcaaggccctccaggagctcaagaacctgcgcccacagctctacaccgcctccgagtactgcgacaagtcctaactccacagtgagcagaagcaaaagcatacatggtggagctttatcaagataatcttatggacctattgctgccctgaaatgcaaagcaactaaagttagagataaaaaattccaaggcatctagaatgttagaaaatccaagtggaagactcccatgatgcaatcctatatccactgcaggcaaggaatcatctgcatctccattctccaggaatgtgtagtcgcataaccagtttgaatattgttagggttggcatgaagcccacgactaggctccacatgtttgtcatcactcagttctttggagtttggacaacccccgagggcaccaaatctaggaggctcttcttcgcactaaaatcacaagaatgcgctcgaaaactgagggcagatttggcaattgaagaacagtgggaacaagaactgagaagaatgctgaagggcatagtaacagatacaagctaaaattgagacacatataaatgaccatgaatgagactgtatgagcctgatcagctcaattctaggttatgtgcattgtttgctcagtagactacagaccataaggtttatctcctcactgatttgatattattatttattatgccagttcttggaagttgaccttgcattatgtctgttcgtgtttgtgtagatgctcgacgttaaacttatgctgtcatgtagatgcttagtcctctcctcgcctttcgcagtcgcaggcgagttaagaagtggactaacttggatgaaccagcagagagtatgttccctagacaacgacaaacaatgttacctctacgtaaatgtatgtacttagatcttacttttaccgatctgtgtggaggaatggaggacgggcagaatatcagattgcttgcagctagtttatttttccagcccagggtgaacttctgggtagtgtagtttgtcgtgggtttatcttctgcagaatagaagcaaatatttgtaaaagctgcttatagttctatatgatatgaaagtttgggaactatcaactgcaaattggccactctttctcaggcattagaccctaagggatactcaaggaatgtcacattttcatcccacacagcatgctagtgacaatgattttcagatgtggcaacagcagatgatgttcaagcacttgcaggagtttcagaggcagcaacaactacagcagtctgatcatggagccaggatgcagctctcttttggacagtttcatgctcctgcaaaacctttgcctggtgatcaattgtcgacaatgtcaaatgaaatggtcaacaatgagaccatgaattctggatggccacataattttacaggtggtgacctgagtttgacgagcaactcccagatgttgaacaatggtagcacaaattgggatcagattgttggttctcctgttgtgggcaatttcatgaatggttcaatgtttgtgaatgctcataatcagtcgatgagaccaatgggattagctacccaccaagtggatcaaactttttatccaatgcatgctaccagcagtagagggcctggaaaccagtattcccaatttttagggattcctgctgatcctcagagtgaagcggcaagggttggtccagttcagtcagaaaagacatccagaccattcaactcttcaatgaacgaacttggtcttcatatgcaaggtaccaccagtttgatgcataattttcgtggaaaagggggcttcttaaataacagtctgatgcaaagtcaaggtgataatatcagggcaggcagtccggttacaatgaatcaactacaacatggttttcaaacccaagattttcatggtaggccaaaccaagttgatcttcaagcgggcatgcaagagaaatcagcaatgcaggtagggcaagcgagtcgtggggctagccttgaccctactgaggagaaaatcttatttgggagtgacgaggatagcaactggggagctttgttgaggggtgacaatgacaatgtcaattctttggacaatgacaactatggtggtggctactcatctctacagagcggtagctggagtgcccttatgcaggaagctctccagtctacaaccagtgaaagtcccaaagaagagtggagtggcttgagtttccataaaactgagcaggtgatggctagcaatgcaaatttatcaggccgcaatggtagtaagtttactggattaagtggtgcaaacctagaaaatgcacgtccttcgccagcgtccagctatgctgatggaacaatgaataacccaaaccttgccagttttcagcatgtcataaggcctccatccgagcgaagggaccatatgtctcatgaatcttctaatgctcctgttaacaatcatcaatcaacttctgaagtcaacaaggggtactttcagcaaggcataaaacaaattcactctgatgcaaggcaaggacaagcgcacctagtaaatggaacctggccgcatcaaaagactgaactgctcagaagtaatttgcagtcaactggtgtacatgctacaccacctggtggacatggatttgggatgtcacaacaaattgcaactgatcacaatatcaacagagagtccagtaataatcaaaatgactggaaagctaacaatgcacttggacaagacatgtgcaatagccaaaatatctttaatagcaatgagaactcttggaagtcaactggaggtaatgccaattcagtccagagatttcagcagaggaggtctgatgtaagcgctactaatgaaagttcagatggtaaaaatattagcatgatgagctcaagcatgccaatgatgacacaggatcattaccagatggtcactagtcagagtggtgagcaaattggcatgaaccgtaatctgacacatagagctccagagacctctgagtcaccaggaaaaagcgcagaacaaagaccaggtgatttcaatcaggaatatctaaatgcaatccctaacgaaagagaaacacacatttcaaaccatggtcgacacataacaagtgattctgcccccagaaggcattctgtatctgctgggaaggaatctgaaaatttaggtcagtctagtcagcaagcaatgggatcttacatcttgcagaaccgtgctatggggagttctggaatgaacattggtctgtctccaggcaatccaatgtcaaatagtctgtttccacctcagacacgaaatagtctgcagcatcattttggcacaaactcccatgtttccaatagtatgccgtcagcaagtgaggaacaacttcaatcgcgacatggtctccccaacagctccagtgcatcaactttaggaggagctgatactggtctatcccagaatagagcagttcaaaacagtcaacatatgcttcagcttctgcataaggtggataactcaaggaatagcaatgtggttgctgacatacccaacaattcccttggcgttgtttctgcccagcaacaacttaaccattcttctttgcaaggatttgggttgagactggcaccaccatcccaactccaatcaatttcgggtaatttatggtctagtcagactaatgctgatggcaagcaattttaccaagatggcgaccgcacacagctaccttccacccctagccagtcactgactcctcagcatcaaaattctctatcttcaccatttcacagttcagaaacagaaaatactgggcaaccaattgcgtgtttcccccaattaggatcaggccaacagtatcctatggcagatgatagatctggtcctgcacccatgctgcagcagcagcctcagcaaagcaactctgcaacagtgttcaagaatgtatggacaaacatatcagcacagcgcctaactggtatgcaacctaacaagattacacccaacatcattcagtctatgatgtttccaaataatgctgcagcttccaacttatggagctctcagaaggcagatgatcaagggcagagggcatcaactccatcagatattgcaacaagttcagcgaactcacagaatcaatctccaaaacaagctgctgatagtgatgcaaagttagcatcttcccagaagggaaacctagagttgacaggaactaccgtaacaggaggaaacgaatccttgcagaagccttcttcagatgagaattctatcaatgctgtttcatcctttgcacagttgcgtcagcaaggcatccttggtgctaaacatggggagaacccaggagctaattttcaggctatgaatgtttcccacaataatgctaatcacagtggtggcattgttttacatggaagtccagcacctacaaacattcagcagcaaaattactctcttctacatcaaatgcaaacctcgaggcatatggatgttgatccaggcagtttatctggaaagacgacaaaacctgatattggttctgatgctgcacagattgattggaattctggtcagagatttgctcatgtaaccaataactcaaccaaatcgtctgcagataacattggaagccctggtgtcccagggtcattcacatcggacttgaaaatgttgagttttgcttcaaggaacgaggagagaaatccaaacataccttctcggtttccttccggagagtgcccgtctcctggtatgataaccacacaagatgataatcagaatcaagttcagcatatgggcacaggtgcaatgtcaaattctgatgaaagaagtgagaggccgaggataaaccctcaaatggcaccttcttggtttggacattacggaaactacagaaatggtcagagtgttgctacgcttaatgctgctacgcttaatgcgcagaagcccatggctttgccatttaattttccgaaagcatctcggaacaatgaaaataatagccatgctgaaaatagagttgaacctagccaatctgttaggcctgggcatcatctcccatcagcaagaatggaagctttggttccttccaatgtaaaagtgtcttcaatgatgagaaggcctaagaagcgtaaaactatggactccacacttgtttcttggcataaaataattgaaagcccacgaaaattgaggggcatcagcacacctgagatggactgggcttgggcagctaaccggttaattgagaaggatgaggcagaaactccagacgatgctcctttaaattatttgccgcggaagaggctaattttgacaagccagttgatccagcaacttctccctgctataccagcgaccattctgagagcacaagctgtgtctgcttacggaagtgcgacatacactctatcaatgttgacactaagggatgcatgcagcatggcatcatcatcatataactcttgctcacctgtggaggatgaaaataacccatctgaacaaccaagtgctaagaaaatggaagacagagtgtcaaaggttgtggaagtcttcgttggaagaatccggaagatggaaaatgactttataagtttgaacaagagggcctcgatgctagatgtgcaactggagtgccaagatctggagagaatttctattgtaaatcgtctgggaagatttcatggccggagccatgcagcggcagttgagagttcatcagctccagaaatgactcctcggagaatttttcctgaaagacatgtcatgtcttttgccgtgcctggaaatcttcctgaaggagtgtgctgtttgtcactctagtggaatgatcttcagttattttctagccgcaatgatgatcccgggtcgcgccctgtgattcccagtgctccttgtcccatgcaaagcatggtcaaacagaaggatcatatattgtcaaggggtaacttgagaactggaagcatcacagtaccacgatgaggcaggccggggacatgttccagccgatcaagtcagtgctggctgttgttgatgcaccttatatcaagtataggtccatgtatattgtggaaagtgaaggaaaaaaactgtggatctcccatcatttttctcgatgaagagtaattagcctcagaatttttttagagaagtcgatgcttactagcttagtgcatctggtgggtttcttgggtatttgtcgatctctaagaaatccgtgatgatggagtgttggcaggctagagtggaaataataatgtgagcctttctctgggttctttggttcctttaggatgggatgcaaattggctagtgtgtcctccagtctaactgaccacccctgttagtcagcagttaattattactagttttatgtagtgctgaaagcattcatggaacaattggcgggtaaagtgcttgggaattcttgtaacttgtgtacccgtgatgtttaaacgctaacgggttcttgtaaatttgaagtgccaatattcctgaggttatattttgctttgtgcaaattgaccagcgtctactgtctccagatgcgtcaatgaagctgggcgcttgcggcttccggtgttccgtttcgctagtggaatgatctcgtgatgatacagtctaaattgatcagtgagctgcgattgggtttgcgagtttccgtaggtttagaatgaag

SEQ ID NO: 84554 - DNA, 6944 bp, Zea Mays
acgctcagacgtctaggcatctcgcttgctttccttccaggcttccacgattccaccccagtctgcccaccgactcttccctctccccactactgtcggcgcgtgctctttcctcctcacaccgcacacccgctgccggagctcgagagtcccctccgcttgtcggtgcccgttctgtcaacccctcgccggacgcctgccgccggagctagagagggccaatgcagccgccgctgcgtggtgcctagggcgggtcgcaggggacaaggccgagcccaccaccgtcgacgaggcattcatggaacgcagcaagagcttcatcaaggccctccaggagctcaagaacctgcgcccacagctctacaccgcctccgagtactgcgacaagtcctaactccacagtgagcagaagcaaaagcatacatggtggagctttatcaagataatcttatggacctattgctgccctgaaatgcaaagcaactaaagttagagataaaaaattccaagctgctaaattggtttgacataataaatctcataagacacacctttgcgcattggaaataggcatctagaatgttagaaaatccaagtggaagactcccatgatgcaatcctatatccactgcaggcaaggaatcatctgcatctccattctccaggaatgtgtagtcgcataaccagtttgaatattgttagggttggcatgaaggttcagcccacgactaggctccacatgtttgtcatcactcagttctttggagtttggacaacccccgagggcaccaaatctaggaggctcttcttcgcactaaaatcacaagaatgcgctcgaaaactgagggcagatttggcaattgaagaacagtgggaacaagaactgagaagaatgctgaagggcatagtaacagatacaagctaaaattgagacacatataaatgaccatgaatgagactgtatgagcctgatcagctcaattctaggttatgtgcattgtttgctcagtagactacagaccataagatgctcgacgttaaacttatgctgtcatgtagatgcttagtcctctcctcgcctttcgcagtcgcaggcgagttaagaagtggactaacttggatgaaccagcagagagtatgttccctagacaacgacaaacaatgttacctctacgtaaatgtatgtacttagatcttacttttaccgatctgtgtggaggaatggaggacgggcagaatatcagattgcttgcagctagtttatttttccagcccagggtgaacttctgggtagtgtagtttgtcgtgggtttatcttctgcagaatagaagcaaatatttgtaaaagctgcttatagttctatatgatatgaaagtttgggaactatcaactgcaaattggccactctttctcaggcattagaccctaagggatactcaaggaatgtcacattttcatcccacacagcatgctagtgacaatgattttcagatgtggcaacagcagatgatgttcaagcacttgcaggagtttcagaggcagcaacaactacagcagtctgatcatggagccaggatgcagctctcttttggacagtttcatgctcctgcaaaacctttgcctggtgatcaattgtcgacaatgtcaaatgaaatggtcaacaatgagaccatgaattctggatggccacataattttacaggtggtgacctgagtttgacgagcaactcccagatgttgaacaatggtagcacaaattgggatcagattgttggttctcctgttgtgggcaatttcatgaatggttcaatgtttgtgaatgctcataatcagtcgatgagaccaatgggattagctacccaccaagtggatcaaactttttatccaatgcatgctaccagcagtagagggcctggaaaccagtattcccaatttttagggattcctgctgatcctcagagtgaagcggcaagggttggtccagttcagtcagaaaagacatccagaccattcaactcttcaatgaacgaacttggtcttcatatgcaaggtaccaccagtttgatgcataattttcgtggaaaagggggcttcttaaataacagtctgatgcaaagtcaaggtgataatatcagggcaggcagtccggttacaatgaatcaactacaacatggttttcaaacccaagattttcatggtaggccaaaccaagttgatcttcaagcgggcatgcaagagaaatcagcaatgcaggtagggcaagcgagtcgtggggctagccttgaccctactgaggagaaaatcttatttgggagtgacgaggatagcaactggggagctttgttgaggggtgacaatgacaatgtcaattctttggacaatgacaactatggtggtggctactcatctctacagagcggtagctggagtgcccttatgcaggaagctctccagtctacaaccagtgaaagtcccaaagaagagtggagtggcttgagtttccataaaactgagcaggtgatggctagcaatgcaaatttatcaggccgcaatggtagtaagtttactggattaagtggtgcaaacctagaaaatgcacgtccttcgccagcgtccagctatgctgatggaacaatgaataacccaaaccttgccagttttcagcatgtcataaggcctccatccgagcgaagggaccatatgtctcatgaatcttctaatgctcctgttaacaatcatcaatcaacttctgaagtcaacaaggggtactttcagcaaggcataaaacaaattcactctgatgcaaggcaaggacaagcgcacctagtaaatggaacctggccgcatcaaaagactgaactgctcagaagtaatttgcagtcaactggtgtacatgctacaccacctggtggacatggatttgggatgtcacaacaaattgcaactgatcacaatatcaacagagagtccagtaataatcaaaatgactggaaagctaacaatgcacttggacaagacatgtgcaatagccaaaatatctttaatagcaatgagaactcttggaagtcaactggaggtaatgccaattcagtccagagatttcagcagaggaggtctgatgtaagcgctactaatgaaagttcagatggtaaaaatattagcatgatgagctcaagcatgccaatgatgacacaggatcattaccagatggtcactagtcagagtggtgagcaaattggcatgaaccgtaatctgacacatagagctccagagacctctgagtcaccaggaaaaagcgcagaacaaagaccaggtgatttcaatcaggaatatctaaatgcaatccctaacgaaagagaaacacacatttcaaaccatggtcgacacataacaagtgattctgcccccagaaggcattctgtatctgctgggaaggaatctgaaaatttaggtcagtctagtcagcaagcaatgggatcttacatcttgcagaaccgtgctatggggagttctggaatgaacattggtctgtctccaggcaatccaatgtcaaatagtctgtttccacctcagacacgaaatagtctgcagcatcattttggcacaaactcccatgtttccaatagtatgccgtcagcaagtgaggaacaacttcaatcgcgacatggtctccccaacagctccagtgcatcaactttaggaggagctgatactggtctatcccagaatagagcagttcaaaacagtcaacatatgcttcagcttctgcataaggtggataactcaaggaatagcaatgtggttgctgacatacccaacaattcccttggcgttgtttctgcccagcaacaacttaaccattcttctttgcaaggatttgggttgagactggcaccaccatcccaactccaatcaatttcgggtaatttatggtctagtcagactaatgctgatggcaagcaattttaccaagatggcgaccgcacacagctaccttccacccctagccagtcactgactcctcagcatcaaaattctctatcttcaccatttcacagttcagaaacagaaaatactgggcaaccaattgcgtgtttcccccaattaggatcaggccaacagtatcctatggcagatgatagatctggtcctgcacccatgctgcagcagcagcctcagcaaagcaactctgcaacagtgttcaagaatgtatggacaaacatatcagcacagcgcctaactggtatgcaacctaacaagattacacccaacatcattcagtctatgatgtttccaaataatgctgcagcttccaacttatggagctctcagaaggcagatgatcaagggcagagggcatcaactccatcagatattgcaacaagttcagcgaactcacagaatcaatctccaaaacaagctgctgatagtgatgcaaagttagcatcttcccagaagggaaacctagagttgacaggaactaccgtaacaggaggaaacgaatccttgcagaagccttcttcagatgagaattctatcaatgctgtttcatcctttgcacagttgcgtcagcaaggcatccttggtgctaaacatggggagaacccaggagctaattttcaggctatgaatgtttcccacaataatgctaatcacagtggtggcattgttttacatggaagtccagcacctacaaacattcagcagcaaaattactctcttctacatcaaatgcaaacctcgaggcatatggatgttgatccaggcagtttatctggaaagacgacaaaacctgatattggttctgatgctgcacagattgattggaattctggtcagagatttgctcatgtaaccaataactcaaccaaatcgtctgcagataacattggaagccctggtgtcccagggtcattcacatcggacttgaaaatgttgagttttgcttcaaggaacgaggagagaaatccaaacataccttctcggtttccttccggagagtgcccgtctcctggtatgataaccacacaagatgataatcagaatcaagttcagcatatgggcacaggtgcaatgtcaaattctgatgaaagaagtgagaggccgaggataaaccctcaaatggcaccttcttggtttggacattacggaaactacagaaatggtcagagtgttgctacgcttaatgctgctacgcttaatgcgcagaagcccatggctttgccatttaattttccgaaagcatctcggaacaatgaaaataatagccatgctgaaaatagagttgaacctagccaatctgttaggcctgggcatcatctcccatcagcaagaatggaagctttggttccttccaatgtaaaagtgtcttcaatgatgagaaggcctaagaagcgtaaaactatggactccacacttgtttcttggcataaaataattgaaagcccacgaaaattgaggggcatcagcacacctgagatggactgggcttgggcagctaaccggttaattgagaaggatgaggcagaaactccagacgatgctcctttaaattatttgccgcggaagaggctaattttgacaagccagttgatccagcaacttctccctgctataccagcgaccattctgagagcacaagctgtgtctgcttacggaagtgcgacatacactctatcaatgttgacactaagggatgcatgcagcatggcatcatcatcatataactcttgctcacctgtggaggatgaaaataacccatctgaacaaccaagtgctaagaaaatggaagacagagtgtcaaaggttgtggaagtcttcgttggaagaatccggaagatggaaaatgactttataagtttgaacaagagggcctcgatgctagatgtgcaactggagtgccaagatctggagagaatttctattgtaaatcgtctgggaagatttcatggccggagccatgcagcggcagttgagagttcatcagctccagaaatgactcctcggagaatttttcctgaaagacatgtcatgtcttttgccgtgcctggaaatcttcctgaaggagtgtgctgtttgtcactctagtggaatgatcttcagttattttctagccgcaatgatgatcccgggtcgcgccctgtgattcccagtgctccttgtcccatgcaaagcatggtcaaacagaaggatcatatattgtcaaggggtaacttgagaactggaagcatcacagtaccacgatgaggcaggccggggacatgttccagccgatcaagtcagtgctggctgttgttgatgcaccttatatcaagtataggtccatgtatattgtggaaagtgaaggaaaaaaactgtggatctcccatcatttttctcgatgaagagtaattagcctcagaatttttttagagaagtcgatgcttactagcttagtgcatctggtgggtttcttgggtatttgtcgatctctaagaaatccgtgatgatggagtgttggcaggctagagtggaaataataatgtgagcctttctctgggttctttggttcctttaggatgggatgcaaattggctagtgtgtcctccagtctaactgaccacccctgttagtcagcagttaattattactagttttatgtagtgctgaaagcattcatggaacaattggcgggtaaagtgcttgggaattcttgtaacttgtgtacccgtgatgtttaaacgctaacgggttcttgtaaatttgaagtgccaatattcctgaggttatattttgctttgtgcaaattgaccagcgtctactgtctccagatgcgtcaatgaagctgggcgcttgcggcttccggtgttccgtttcgctagtggaatgatctcgtgatgatacagtctaaattgatcagtgagctgcgattgggtttgcgagtttccgtaggtttagaatgaag

SEQ ID NO: 84555 - DNA, 6864 bp, Zea Mays
acgctcagacgtctaggcatctcgcttgctttccttccaggcttccacgattccaccccagtctgcccaccgactcttccctctccccactactgtcggcgcgtgctctttcctcctcacaccgcacacccgctgccggagctcgagagtcccctccgcttgtcggtgcccgttctgtcaacccctcgccggacgcctgccgccggagctagagagggccaatgcagccgccgctgcgtggtgcctagggcgggtcgcaggggacaaggccgagcccaccaccgtcgacgaggcattcatggaacgcagcaagagcttcatcaaggccctccagggatccggttggatttctgcttcaggagctcaagaacctgcgcccacagctctacaccgcctccgagtactgcgacaagtcctaactccacagtgagcagaagcaaaagcatacatggtggagctttatcaagataatcttatggacctattgctgccctgaaatgcaaagcaactaaagttagagataaaaaattccaagctgctaaattggtttgacataataaatctcataagacacacctttgcgcattggaaataggcatctagaatgttagaaaatccaagtggaagactcccatgatgcaatcctatatccactgcaggcaaggaatcatctgcatctccattctccaggaatgtgtagtcgcataaccagtttgaatattgttagggttggcatgaagtcacaagaatgcgctcgaaaactgagggcagatttggcaattgaagaacagtgggaacaagaactgagaagaatgctgaagggcatagtaacagatacaagctaaaattgagacacatataaatgaccatgaatgagactgtatgagcctgatcagctcaattctaggttatgtgcattgtttgctcagtagactacagaccataagatgctcgacgttaaacttatgctgtcatgtagatgcttagtcctctcctcgcctttcgcagtcgcaggcgagttaagaagtggactaacttggatgaaccagcagagagtatgttccctagacaacgacaaacaatgttacctctacgtaaatgtatgtacttagatcttacttttaccgatctgtgtggaggaatggaggacgggcagaatatcagattgcttgcagctagtttatttttccagcccagggtgaacttctgggtagtgtagtttgtcgtgggtttatcttctgcagaatagaagcaaatatttgtaaaagctgcttatagttctatatgatatgaaagtttgggaactatcaactgcaaattggccactctttctcaggcattagaccctaagggatactcaaggaatgtcacattttcatcccacacagcatgctagtgacaatgattttcagatgtggcaacagcagatgatgttcaagcacttgcaggagtttcagaggcagcaacaactacagcagtctgatcatggagccaggatgcagctctcttttggacagtttcatgctcctgcaaaacctttgcctggtgatcaattgtcgacaatgtcaaatgaaatggtcaacaatgagaccatgaattctggatggccacataattttacaggtggtgacctgagtttgacgagcaactcccagatgttgaacaatggtagcacaaattgggatcagattgttggttctcctgttgtgggcaatttcatgaatggttcaatgtttgtgaatgctcataatcagtcgatgagaccaatgggattagctacccaccaagtggatcaaactttttatccaatgcatgctaccagcagtagagggcctggaaaccagtattcccaatttttagggattcctgctgatcctcagagtgaagcggcaagggttggtccagttcagtcagaaaagacatccagaccattcaactcttcaatgaacgaacttggtcttcatatgcaaggtaccaccagtttgatgcataattttcgtggaaaagggggcttcttaaataacagtctgatgcaaagtcaaggtgataatatcagggcaggcagtccggttacaatgaatcaactacaacatggttttcaaacccaagattttcatggtaggccaaaccaagttgatcttcaagcgggcatgcaagagaaatcagcaatgcaggtagggcaagcgagtcgtggggctagccttgaccctactgaggagaaaatcttatttgggagtgacgaggatagcaactggggagctttgttgaggggtgacaatgacaatgtcaattctttggacaatgacaactatggtggtggctactcatctctacagagcggtagctggagtgcccttatgcaggaagctctccagtctacaaccagtgaaagtcccaaagaagagtggagtggcttgagtttccataaaactgagcaggtgatggctagcaatgcaaatttatcaggccgcaatggtagtaagtttactggattaagtggtgcaaacctagaaaatgcacgtccttcgccagcgtccagctatgctgatggaacaatgaataacccaaaccttgccagttttcagcatgtcataaggcctccatccgagcgaagggaccatatgtctcatgaatcttctaatgctcctgttaacaatcatcaatcaacttctgaagtcaacaaggggtactttcagcaaggcataaaacaaattcactctgatgcaaggcaaggacaagcgcacctagtaaatggaacctggccgcatcaaaagactgaactgctcagaagtaatttgcagtcaactggtgtacatgctacaccacctggtggacatggatttgggatgtcacaacaaattgcaactgatcacaatatcaacagagagtccagtaataatcaaaatgactggaaagctaacaatgcacttggacaagacatgtgcaatagccaaaatatctttaatagcaatgagaactcttggaagtcaactggaggtaatgccaattcagtccagagatttcagcagaggaggtctgatgtaagcgctactaatgaaagttcagatggtaaaaatattagcatgatgagctcaagcatgccaatgatgacacaggatcattaccagatggtcactagtcagagtggtgagcaaattggcatgaaccgtaatctgacacatagagctccagagacctctgagtcaccaggaaaaagcgcagaacaaagaccaggtgatttcaatcaggaatatctaaatgcaatccctaacgaaagagaaacacacatttcaaaccatggtcgacacataacaagtgattctgcccccagaaggcattctgtatctgctgggaaggaatctgaaaatttaggtcagtctagtcagcaagcaatgggatcttacatcttgcagaaccgtgctatggggagttctggaatgaacattggtctgtctccaggcaatccaatgtcaaatagtctgtttccacctcagacacgaaatagtctgcagcatcattttggcacaaactcccatgtttccaatagtatgccgtcagcaagtgaggaacaacttcaatcgcgacatggtctccccaacagctccagtgcatcaactttaggaggagctgatactggtctatcccagaatagagcagttcaaaacagtcaacatatgcttcagcttctgcataaggtggataactcaaggaatagcaatgtggttgctgacatacccaacaattcccttggcgttgtttctgcccagcaacaacttaaccattcttctttgcaaggatttgggttgagactggcaccaccatcccaactccaatcaatttcgggtaatttatggtctagtcagactaatgctgatggcaagcaattttaccaagatggcgaccgcacacagctaccttccacccctagccagtcactgactcctcagcatcaaaattctctatcttcaccatttcacagttcagaaacagaaaatactgggcaaccaattgcgtgtttcccccaattaggatcaggccaacagtatcctatggcagatgatagatctggtcctgcacccatgctgcagcagcagcctcagcaaagcaactctgcaacagtgttcaagaatgtatggacaaacatatcagcacagcgcctaactggtatgcaacctaacaagattacacccaacatcattcagtctatgatgtttccaaataatgctgcagcttccaacttatggagctctcagaaggcagatgatcaagggcagagggcatcaactccatcagatattgcaacaagttcagcgaactcacagaatcaatctccaaaacaagctgctgatagtgatgcaaagttagcatcttcccagaagggaaacctagagttgacaggaactaccgtaacaggaggaaacgaatccttgcagaagccttcttcagatgagaattctatcaatgctgtttcatcctttgcacagttgcgtcagcaaggcatccttggtgctaaacatggggagaacccaggagctaattttcaggctatgaatgtttcccacaataatgctaatcacagtggtggcattgttttacatggaagtccagcacctacaaacattcagcagcaaaattactctcttctacatcaaatgcaaacctcgaggcatatggatgttgatccaggcagtttatctggaaagacgacaaaacctgatattggttctgatgctgcacagattgattggaattctggtcagagatttgctcatgtaaccaataactcaaccaaatcgtctgcagataacattggaagccctggtgtcccagggtcattcacatcggacttgaaaatgttgagttttgcttcaaggaacgaggagagaaatccaaacataccttctcggtttccttccggagagtgcccgtctcctggtatgataaccacacaagatgataatcagaatcaagttcagcatatgggcacaggtgcaatgtcaaattctgatgaaagaagtgagaggccgaggataaaccctcaaatggcaccttcttggtttggacattacggaaactacagaaatggtcagagtgttgctacgcttaatgctgctacgcttaatgcgcagaagcccatggctttgccatttaattttccgaaagcatctcggaacaatgaaaataatagccatgctgaaaatagagttgaacctagccaatctgttaggcctgggcatcatctcccatcagcaagaatggaagctttggttccttccaatgtaaaagtgtcttcaatgatgagaaggcctaagaagcgtaaaactatggactccacacttgtttcttggcataaaataattgaaagcccacgaaaattgaggggcatcagcacacctgagatggactgggcttgggcagctaaccggttaattgagaaggatgaggcagaaactccagacgatgctcctttaaattatttgccgcggaagaggctaattttgacaagccagttgatccagcaacttctccctgctataccagcgaccattctgagagcacaagctgtgtctgcttacggaagtgcgacatacactctatcaatgttgacactaagggatgcatgcagcatggcatcatcatcatataactcttgctcacctgtggaggatgaaaataacccatctgaacaaccaagtgctaagaaaatggaagacagagtgtcaaaggttgtggaagtcttcgttggaagaatccggaagatggaaaatgactttataagtttgaacaagagggcctcgatgctagatgtgcaactggagtgccaagatctggagagaatttctattgtaaatcgtctgggaagatttcatggccggagccatgcagcggcagttgagagttcatcagctccagaaatgactcctcggagaatttttcctgaaagacatgtcatgtcttttgccgtgcctggaaatcttcctgaaggagtgtgctgtttgtcactctagtggaatgatcttcagttattttctagccgcaatgatgatcccgggtcgcgccctgtgattcccagtgctccttgtcccatgcaaagcatggtcaaacagaaggatcatatattgtcaaggggtaacttgagaactggaagcatcacagtaccacgatgaggcaggccggggacatgttccagccgatcaagtcagtgctggctgttgttgatgcaccttatatcaagtataggtccatgtatattgtggaaagtgaaggaaaaaaactgtggatctcccatcatttttctcgatgaagagtaattagcctcagaatttttttagagaagtcgatgcttactagcttagtgcatctggtgggtttcttgggtatttgtcgatctctaagaaatccgtgatgatggagtgttggcaggctagagtggaaataataatgtgagcctttctctgggttctttggttcctttaggatgggatgcaaattggctagtgtgtcctccagtctaactgaccacccctgttagtcagcagttaattattactagttttatgtagtgctgaaagcattcatggaacaattggcgggtaaagtgcttgggaattcttgtaacttgtgtacccgtgatgtttaaacgctaacgggttcttgtaaatttgaagtgccaatattcctgaggttatattttgctttgtgcaaattgaccagcgtctactgtctccagatgcgtcaatgaagctgggcgcttgcggcttccggtgttccgtttcgctagtggaatgatctcgtgatgatacagtctaaattgatcagtgagctgcgattgggtttgcgagtttccgtaggtttagaatgaag

SEQ ID NO: 84556 - DNA, 6693 bp, Zea Mays
acgctcagacgtctaggcatctcgcttgctttccttccaggcttccacgattccaccccagtctgcccaccgactcttccctctccccactactgtcggcgcgtgctctttcctcctcacaccgcacacccgctgccggagctcgagagtcccctccgcttgtcggtgcccgttctgtcaacccctcgccggacgcctgccgccggagctagagagggccaatgcagccgccgctgcgtggtgcctagggcgggtcgcaggggacaaggccgagcccaccaccgtcgacgaggcattcatggaacgcagcaagagcttcatcaaggccctccaggagctcaagaacctgcgcccacagctctacaccgcctccgagtactgcgacaagtcctaactccacagtgagcagaagcaaaagcatacatggtggagctttatcaagataatcttatggacctattgctgccctgaaatgcaaagcaactaaagttagagataaaaaattccaaggcatctagaatgttagaaaatccaagtggaagactcccatgatgcaatcctatatccactgcaggcaaggaatcatctgcatctccattctccaggaatgtgtagtcgcataaccagtttgaatattgttagggttggcatgaagcccacgactaggctccacatgtttgtcatcactcagttctttggagtttggacaacccccgagggcaccaaatctaggaggctcttcttcgcactaaaatcacaagaatgcgctcgaaaactgagggcagatttggcaattgaagaacagtgggaacaagaactgagaagaatgctgaagggcatagtaacagatacaagctaaaattgagacacatataaatgaccatgaatgagactgtatgagcctgatcagctcaattctaggttatgtgcattgtttgctcagtagactacagaccataagtgtggaggaatggaggacgggcagaatatcagattgcttgcagctagtttatttttccagcccagggtgaacttctgggtagtgtagtttgtcgtgggtttatcttctgcagaatagaagcaaatatttgtaaaagctgcttatagttctatatgatatgaaagtttgggaactatcaactgcaaattggccactctttctcaggcattagaccctaagggatactcaaggaatgtcacattttcatcccacacagcatgctagtgacaatgattttcagatgtggcaacagcagatgatgttcaagcacttgcaggagtttcagaggcagcaacaactacagcagtctgatcatggagccaggatgcagctctcttttggacagtttcatgctcctgcaaaacctttgcctggtgatcaattgtcgacaatgtcaaatgaaatggtcaacaatgagaccatgaattctggatggccacataattttacaggtggtgacctgagtttgacgagcaactcccagatgttgaacaatggtagcacaaattgggatcagattgttggttctcctgttgtgggcaatttcatgaatggttcaatgtttgtgaatgctcataatcagtcgatgagaccaatgggattagctacccaccaagtggatcaaactttttatccaatgcatgctaccagcagtagagggcctggaaaccagtattcccaatttttagggattcctgctgatcctcagagtgaagcggcaagggttggtccagttcagtcagaaaagacatccagaccattcaactcttcaatgaacgaacttggtcttcatatgcaaggtaccaccagtttgatgcataattttcgtggaaaagggggcttcttaaataacagtctgatgcaaagtcaaggtgataatatcagggcaggcagtccggttacaatgaatcaactacaacatggttttcaaacccaagattttcatggtaggccaaaccaagttgatcttcaagcgggcatgcaagagaaatcagcaatgcaggtagggcaagcgagtcgtggggctagccttgaccctactgaggagaaaatcttatttgggagtgacgaggatagcaactggggagctttgttgaggggtgacaatgacaatgtcaattctttggacaatgacaactatggtggtggctactcatctctacagagcggtagctggagtgcccttatgcaggaagctctccagtctacaaccagtgaaagtcccaaagaagagtggagtggcttgagtttccataaaactgagcaggtgatggctagcaatgcaaatttatcaggccgcaatggtagtaagtttactggattaagtggtgcaaacctagaaaatgcacgtccttcgccagcgtccagctatgctgatggaacaatgaataacccaaaccttgccagttttcagcatgtcataaggcctccatccgagcgaagggaccatatgtctcatgaatcttctaatgctcctgttaacaatcatcaatcaacttctgaagtcaacaaggggtactttcagcaaggcataaaacaaattcactctgatgcaaggcaaggacaagcgcacctagtaaatggaacctggccgcatcaaaagactgaactgctcagaagtaatttgcagtcaactggtgtacatgctacaccacctggtggacatggatttgggatgtcacaacaaattgcaactgatcacaatatcaacagagagtccagtaataatcaaaatgactggaaagctaacaatgcacttggacaagacatgtgcaatagccaaaatatctttaatagcaatgagaactcttggaagtcaactggaggtaatgccaattcagtccagagatttcagcagaggaggtctgatgtaagcgctactaatgaaagttcagatggtaaaaatattagcatgatgagctcaagcatgccaatgatgacacaggatcattaccagatggtcactagtcagagtggtgagcaaattggcatgaaccgtaatctgacacatagagctccagagacctctgagtcaccaggaaaaagcgcagaacaaagaccaggtgatttcaatcaggaatatctaaatgcaatccctaacgaaagagaaacacacatttcaaaccatggtcgacacataacaagtgattctgcccccagaaggcattctgtatctgctgggaaggaatctgaaaatttaggtcagtctagtcagcaagcaatgggatcttacatcttgcagaaccgtgctatggggagttctggaatgaacattggtctgtctccaggcaatccaatgtcaaatagtctgtttccacctcagacacgaaatagtctgcagcatcattttggcacaaactcccatgtttccaatagtatgccgtcagcaagtgaggaacaacttcaatcgcgacatggtctccccaacagctccagtgcatcaactttaggaggagctgatactggtctatcccagaatagagcagttcaaaacagtcaacatatgcttcagcttctgcataaggtggataactcaaggaatagcaatgtggttgctgacatacccaacaattcccttggcgttgtttctgcccagcaacaacttaaccattcttctttgcaaggatttgggttgagactggcaccaccatcccaactccaatcaatttcgggtaatttatggtctagtcagactaatgctgatggcaagcaattttaccaagatggcgaccgcacacagctaccttccacccctagccagtcactgactcctcagcatcaaaattctctatcttcaccatttcacagttcagaaacagaaaatactgggcaaccaattgcgtgtttcccccaattaggatcaggccaacagtatcctatggcagatgatagatctggtcctgcacccatgctgcagcagcagcctcagcaaagcaactctgcaacagtgttcaagaatgtatggacaaacatatcagcacagcgcctaactggtatgcaacctaacaagattacacccaacatcattcagtctatgatgtttccaaataatgctgcagcttccaacttatggagctctcagaaggcagatgatcaagggcagagggcatcaactccatcagatattgcaacaagttcagcgaactcacagaatcaatctccaaaacaagctgctgatagtgatgcaaagttagcatcttcccagaagggaaacctagagttgacaggaactaccgtaacaggaggaaacgaatccttgcagaagccttcttcagatgagaattctatcaatgctgtttcatcctttgcacagttgcgtcagcaaggcatccttggtgctaaacatggggagaacccaggagctaattttcaggctatgaatgtttcccacaataatgctaatcacagtggtggcattgttttacatggaagtccagcacctacaaacattcagcagcaaaattactctcttctacatcaaatgcaaacctcgaggcatatggatgttgatccaggcagtttatctggaaagacgacaaaacctgatattggttctgatgctgcacagattgattggaattctggtcagagatttgctcatgtaaccaataactcaaccaaatcgtctgcagataacattggaagccctggtgtcccagggtcattcacatcggacttgaaaatgttgagttttgcttcaaggaacgaggagagaaatccaaacataccttctcggtttccttccggagagtgcccgtctcctggtatgataaccacacaagatgataatcagaatcaagttcagcatatgggcacaggtgcaatgtcaaattctgatgaaagaagtgagaggccgaggataaaccctcaaatggcaccttcttggtttggacattacggaaactacagaaatggtcagagtgttgctacgcttaatgctgctacgcttaatgcgcagaagcccatggctttgccatttaattttccgaaagcatctcggaacaatgaaaataatagccatgctgaaaatagagttgaacctagccaatctgttaggcctgggcatcatctcccatcagcaagaatggaagctttggttccttccaatgtaaaagtgtcttcaatgatgagaaggcctaagaagcgtaaaactatggactccacacttgtttcttggcataaaataattgaaagcccacgaaaattgaggggcatcagcacacctgagatggactgggcttgggcagctaaccggttaattgagaaggatgaggcagaaactccagacgatgctcctttaaattatttgccgcggaagaggctaattttgacaagccagttgatccagcaacttctccctgctataccagcgaccattctgagagcacaagctgtgtctgcttacggaagtgcgacatacactctatcaatgttgacactaagggatgcatgcagcatggcatcatcatcatataactcttgctcacctgtggaggatgaaaataacccatctgaacaaccaagtgctaagaaaatggaagacagagtgtcaaaggttgtggaagtcttcgttggaagaatccggaagatggaaaatgactttataagtttgaacaagagggcctcgatgctagatgtgcaactggagtgccaagatctggagagaatttctattgtaaatcgtctgggaagatttcatggccggagccatgcagcggcagttgagagttcatcagctccagaaatgactcctcggagaatttttcctgaaagacatgtcatgtcttttgccgtgcctggaaatcttcctgaaggagtgtgctgtttgtcactctagtggaatgatcttcagttattttctagccgcaatgatgatcccgggtcgcgccctgtgattcccagtgctccttgtcccatgcaaagcatggtcaaacagaaggatcatatattgtcaaggggtaacttgagaactggaagcatcacagtaccacgatgaggcaggccggggacatgttccagccgatcaagtcagtgctggctgttgttgatgcaccttatatcaagtataggtccatgtatattgtggaaagtgaaggaaaaaaactgtggatctcccatcatttttctcgatgaagagtaattagcctcagaatttttttagagaagtcgatgcttactagcttagtgcatctggtgggtttcttgggtatttgtcgatctctaagaaatccgtgatgatggagtgttggcaggctagagtggaaataataatgtgagcctttctctgggttctttggttcctttaggatgggatgcaaattggctagtgtgtcctccagtctaactgaccacccctgttagtcagcagttaattattactagttttatgtagtgctgaaagcattcatggaacaattggcgggtaaagtgcttgggaattcttgtaacttgtgtacccgtgatgtttaaacgctaacgggttcttgtaaatttgaagtgccaatattcctgaggttatattttgctttgtgcaaattgaccagcgtctactgtctccagatgcgtcaatgaagctgggcgcttgcggcttccggtgttccgtttcgctagtggaatgatctcgtgatgatacagtctaaattgatcagtgagctgcgattgggtttgcgagtttccgtaggtttagaatgaag

SEQ ID NO: 84557 - DNA, 6962 bp, Zea Mays
acgctcagacgtctaggcatctcgcttgctttccttccaggcttccacgattccaccccagtctgcccaccgactcttccctctccccactactgtcggcgcgtgctctttcctcctcacaccgcacacccgctgccggagctcgagagtcccctccgcttgtcggtgcccgttctgtcaacccctcgccggacgcctgccgccggagctagagagggccaatgcagccgccgctgcgtggtgcctagggcgggtcgcaggggacaaggccgagcccaccaccgtcgacgaggcattcatggaacgcagcaagagcttcatcaaggccctccaggagctcaagaacctgcgcccacagctctacaccgcctccgagtactgcgacaagtcctaactccacagtgagcagaagcaaaagcatacatggtggagctttatcaagataatcttatggacctattgctgccctgaaatgcaaagcaactaaagttagagataaaaaattccaagctgctaaattggtttgacataataaatctcataagacacacctttgcgcattggaaataggcatctagaatgttagaaaatccaagtggaagactcccatgatgcaatcctatatccactgcaggcaaggaatcatctgcatctccattctccaggaatgtgtagtcgcataaccagtttgaatattgttagggttggcatgaaggttcagcccacgactaggctccacatgtttgtcatcactcagttctttggagtttggacaacccccgagggcaccaaatctaggaggctcttcttcgcactaaaatcacaagaatgcgctcgaaaactgagggcagatttggcaattgaagaacagtgggaacaagaactgagaagaatgctgaagggcatagtaacagatacaagctaaaattgagacacatataaatgaccatgaatgagactgtatgagcctgatcagctcaattctaggttatgtgcattgtttgctcagtagactacagaccataagatgctcgacgttaaacttatgctgtcatgtagatgcttagtcctctcctcgcctttcgcagtcgcaggcgagttaagaagtggactaacttggatgaaccagcagagagtatgttccctagacaacgacaaacaatgttacctctacgtaaatgtatgtacttagatcttacttttaccgatctgtgtggaggaatggaggacgggcagaatatcagattgcttgcagctagtttatttttccagcccagggtgaacttctgggtagtgtagtttgtcgtgggtttatcttctgcagaatagaagcaaatatttgtaaaagctgcttatagttctatatgatatgaaagtttgggaactatcaactgcaaattggccactctttctcaggcattagaccctaagggatactcaaggaatgtcacattttcatcccacacagcatgctagtgacaatgattttcagatgtggcaacagcagatgatgttcaagcacttgcaggagtttcagaggcagcaacaactacagcagtctgatcatggagccaggatgcagctctcttttggacagtttcatgctcctgcaaaacctttgcctggtgatcaattgtcgacaatgtcaaatgaaatggtcaacaatgagaccatgaattctggatggccacataattttacaggtggtgacctgagtttgacgagcaactcccagatgttgaacaatggtagcacaaattgggatcagattgttggttctcctgttgtgggcaatttcatgaatggttcaatgtttgtgaatgctcataatcagtcgatgagaccaatgggattagctacccaccaagtggatcaaactttttatccaatgcatgctaccagcagtagagggcctggaaaccagtattcccaatttttagggattcctgctgatcctcagagtgaagcggcaagggttggtccagttcagtcagaaaagacatccagaccattcaactcttcaatgaacgaacttggtcttcatatgcaaggtaccaccagtttgatgcataattttcgtggaaaagggggcttcttaaataacagtctgatgcaaagtcaaggtgataatatcagggcaggcagtccggttacaatgaatcaactacaacatggttttcaaacccaagattttcatggtaggccaaaccaagttgatcttcaagcgggcatgcaagagaaatcagcaatgcaggtagggcaagcgagtcgtggggctagccttgaccctactgaggagaaaatcttatttgggagtgacgaggatagcaactggggagctttgttgaggggtgacaatgacaatgtcaattctttggacaatgacaactatggtggtggctactcatctctacagagcggtagctggagtgcccttatgcaggaagctctccagtctacaaccagtgaaagtcccaaagaagagtggagtggcttgagtttccataaaactgagcaggtgatggctagcaatgcaaatttatcaggccgcaatggtagtaagtttactggattaagtggtgcaaacctagaaaatgcacgtccttcgccagcgtccagctatgctgatggaacaatgaataacccaaaccttgccagttttcagcatgtcataaggcctccatccgagcgaagggaccatatgtctcatgaatcttctaatgctcctgttaacaatcatcaatcaacttctgaagtcaacaaggggtactttcagcaaggcataaaacaaattcactctgatgcaaggcaaggacaagcgcacctagtaaatggaacctggccgcatcaaaagactgaactgctcagaagtaatttgcagtcaactggtgtacatgctacaccacctggtggacatggatttgggatgtcacaacaaattgcaactgatcacaatatcaacagagagtccagtaataatcaaaatgactggaaagctaacaatgcacttggacaagacatgtgcaatagccaaaatatctttaatagcaatgagaactcttggaagtcaactggaggtaatgccaattcagtccagagatttcagcagaggaggtctgatgtaagcgctactaatgaaagttcagatggtaaaaatattagcatgatgagctcaagcatgccaatgatgacacaggatcattaccagatggtcactagtcagagtggtgagcaaattggcatgaaccgtaatctgacacatagagctccagagacctctgagtcaccaggaaaaagcgcagaacaaagaccaggtgatttcaatcaggaatatctaaatgcaatccctaacgaaagagaaacacacatttcaaaccatggtcgacacataacaagtgattctgcccccagaaggcattctgtatctgctgggaaggaatctgaaaatttaggtcagtctagtcagcaagcaatgggatcttacatcttgcagaaccgtgctatggggagttctggaatgaacattggtctgtctccaggcaatccaatgtcaaatagtctgtttccacctcagacacgaaatagtctgcagcatcattttggcacaaactcccatgtttccaatagtatgccgtcagcaagtgagaaaatgatgatggcacaggaacaacttcaatcgcgacatggtctccccaacagctccagtgcatcaactttaggaggagctgatactggtctatcccagaatagagcagttcaaaacagtcaacatatgcttcagcttctgcataaggtggataactcaaggaatagcaatgtggttgctgacatacccaacaattcccttggcgttgtttctgcccagcaacaacttaaccattcttctttgcaaggatttgggttgagactggcaccaccatcccaactccaatcaatttcgggtaatttatggtctagtcagactaatgctgatggcaagcaattttaccaagatggcgaccgcacacagctaccttccacccctagccagtcactgactcctcagcatcaaaattctctatcttcaccatttcacagttcagaaacagaaaatactgggcaaccaattgcgtgtttcccccaattaggatcaggccaacagtatcctatggcagatgatagatctggtcctgcacccatgctgcagcagcagcctcagcaaagcaactctgcaacagtgttcaagaatgtatggacaaacatatcagcacagcgcctaactggtatgcaacctaacaagattacacccaacatcattcagtctatgatgtttccaaataatgctgcagcttccaacttatggagctctcagaaggcagatgatcaagggcagagggcatcaactccatcagatattgcaacaagttcagcgaactcacagaatcaatctccaaaacaagctgctgatagtgatgcaaagttagcatcttcccagaagggaaacctagagttgacaggaactaccgtaacaggaggaaacgaatccttgcagaagccttcttcagatgagaattctatcaatgctgtttcatcctttgcacagttgcgtcagcaaggcatccttggtgctaaacatggggagaacccaggagctaattttcaggctatgaatgtttcccacaataatgctaatcacagtggtggcattgttttacatggaagtccagcacctacaaacattcagcagcaaaattactctcttctacatcaaatgcaaacctcgaggcatatggatgttgatccaggcagtttatctggaaagacgacaaaacctgatattggttctgatgctgcacagattgattggaattctggtcagagatttgctcatgtaaccaataactcaaccaaatcgtctgcagataacattggaagccctggtgtcccagggtcattcacatcggacttgaaaatgttgagttttgcttcaaggaacgaggagagaaatccaaacataccttctcggtttccttccggagagtgcccgtctcctggtatgataaccacacaagatgataatcagaatcaagttcagcatatgggcacaggtgcaatgtcaaattctgatgaaagaagtgagaggccgaggataaaccctcaaatggcaccttcttggtttggacattacggaaactacagaaatggtcagagtgttgctacgcttaatgctgctacgcttaatgcgcagaagcccatggctttgccatttaattttccgaaagcatctcggaacaatgaaaataatagccatgctgaaaatagagttgaacctagccaatctgttaggcctgggcatcatctcccatcagcaagaatggaagctttggttccttccaatgtaaaagtgtcttcaatgatgagaaggcctaagaagcgtaaaactatggactccacacttgtttcttggcataaaataattgaaagcccacgaaaattgaggggcatcagcacacctgagatggactgggcttgggcagctaaccggttaattgagaaggatgaggcagaaactccagacgatgctcctttaaattatttgccgcggaagaggctaattttgacaagccagttgatccagcaacttctccctgctataccagcgaccattctgagagcacaagctgtgtctgcttacggaagtgcgacatacactctatcaatgttgacactaagggatgcatgcagcatggcatcatcatcatataactcttgctcacctgtggaggatgaaaataacccatctgaacaaccaagtgctaagaaaatggaagacagagtgtcaaaggttgtggaagtcttcgttggaagaatccggaagatggaaaatgactttataagtttgaacaagagggcctcgatgctagatgtgcaactggagtgccaagatctggagagaatttctattgtaaatcgtctgggaagatttcatggccggagccatgcagcggcagttgagagttcatcagctccagaaatgactcctcggagaatttttcctgaaagacatgtcatgtcttttgccgtgcctggaaatcttcctgaaggagtgtgctgtttgtcactctagtggaatgatcttcagttattttctagccgcaatgatgatcccgggtcgcgccctgtgattcccagtgctccttgtcccatgcaaagcatggtcaaacagaaggatcatatattgtcaaggggtaacttgagaactggaagcatcacagtaccacgatgaggcaggccggggacatgttccagccgatcaagtcagtgctggctgttgttgatgcaccttatatcaagtataggtccatgtatattgtggaaagtgaaggaaaaaaactgtggatctcccatcatttttctcgatgaagagtaattagcctcagaatttttttagagaagtcgatgcttactagcttagtgcatctggtgggtttcttgggtatttgtcgatctctaagaaatccgtgatgatggagtgttggcaggctagagtggaaataataatgtgagcctttctctgggttctttggttcctttaggatgggatgcaaattggctagtgtgtcctccagtctaactgaccacccctgttagtcagcagttaattattactagttttatgtagtgctgaaagcattcatggaacaattggcgggtaaagtgcttgggaattcttgtaacttgtgtacccgtgatgtttaaacgctaacgggttcttgtaaatttgaagtgccaatattcctgaggttatattttgctttgtgcaaattgaccagcgtctactgtctccagatgcgtcaatgaagctgggcgcttgcggcttccggtgttccgtttcgctagtggaatgatctcgtgatgatacagtctaaattgatcagtgagctgcgattgggtttgcgagtttccgtaggtttagaatgaag

SEQ ID NO: 84558 - DNA, 6902 bp, Zea Mays
acgctcagacgtctaggcatctcgcttgctttccttccaggcttccacgattccaccccagtctgcccaccgactcttccctctccccactactgtcggcgcgtgctctttcctcctcacaccgcacacccgctgccggagctcgagagtcccctccgcttgtcggtgcccgttctgtcaacccctcgccggacgcctgccgccggagctagagagggccaatgcagccgccgctgcgtggtgcctagggcgggtcgcaggggacaaggccgagcccaccaccgtcgacgaggcattcatggaacgcagcaagagcttcatcaaggccctccaggagctcaagaacctgcgcccacagctctacaccgcctccgagtactgcgacaagtcctaactccacagtgagcagaagcaaaagcatacatggtggagctttatcaagataatcttatggacctattgctgccctgaaatgcaaagcaactaaagttagagataaaaaattccaaggcatctagaatgttagaaaatccaagtggaagactcccatgatgcaatcctatatccactgcaggcaaggaatcatctgcatctccattctccaggaatgtgtagtcgcataaccagtttgaatattgttagggttggcatgaaggttcagcccacgactaggctccacatgtttgtcatcactcagttctttggagtttggacaacccccgagggcaccaaatctaggaggctcttcttcgcactaaaatcacaagaatgcgctcgaaaactgagggcagatttggcaattgaagaacagtgggaacaagaactgagaagaatgctgaagggcatagtaacagatacaagctaaaattgagacacatataaatgaccatgaatgagactgtatgagcctgatcagctcaattctaggttatgtgcattgtttgctcagtagactacagaccataagatgctcgacgttaaacttatgctgtcatgtagatgcttagtcctctcctcgcctttcgcagtcgcaggcgagttaagaagtggactaacttggatgaaccagcagagagtatgttccctagacaacgacaaacaatgttacctctacgtaaatgtatgtacttagatcttacttttaccgatctgtgtggaggaatggaggacgggcagaatatcagattgcttgcagctagtttatttttccagcccagggtgaacttctgggtagtgtagtttgtcgtgggtttatcttctgcagaatagaagcaaatatttgtaaaagctgcttatagttctatatgatatgaaagtttgggaactatcaactgcaaattggccactctttctcaggcattagaccctaagggatactcaaggaatgtcacattttcatcccacacagcatgctagtgacaatgattttcagatgtggcaacagcagatgatgttcaagcacttgcaggagtttcagaggcagcaacaactacagcagtctgatcatggagccaggatgcagctctcttttggacagtttcatgctcctgcaaaacctttgcctggtgatcaattgtcgacaatgtcaaatgaaatggtcaacaatgagaccatgaattctggatggccacataattttacaggtggtgacctgagtttgacgagcaactcccagatgttgaacaatggtagcacaaattgggatcagattgttggttctcctgttgtgggcaatttcatgaatggttcaatgtttgtgaatgctcataatcagtcgatgagaccaatgggattagctacccaccaagtggatcaaactttttatccaatgcatgctaccagcagtagagggcctggaaaccagtattcccaatttttagggattcctgctgatcctcagagtgaagcggcaagggttggtccagttcagtcagaaaagacatccagaccattcaactcttcaatgaacgaacttggtcttcatatgcaaggtaccaccagtttgatgcataattttcgtggaaaagggggcttcttaaataacagtctgatgcaaagtcaaggtgataatatcagggcaggcagtccggttacaatgaatcaactacaacatggttttcaaacccaagattttcatggtaggccaaaccaagttgatcttcaagcgggcatgcaagagaaatcagcaatgcaggtagggcaagcgagtcgtggggctagccttgaccctactgaggagaaaatcttatttgggagtgacgaggatagcaactggggagctttgttgaggggtgacaatgacaatgtcaattctttggacaatgacaactatggtggtggctactcatctctacagagcggtagctggagtgcccttatgcaggaagctctccagtctacaaccagtgaaagtcccaaagaagagtggagtggcttgagtttccataaaactgagcaggtgatggctagcaatgcaaatttatcaggccgcaatggtagtaagtttactggattaagtggtgcaaacctagaaaatgcacgtccttcgccagcgtccagctatgctgatggaacaatgaataacccaaaccttgccagttttcagcatgtcataaggcctccatccgagcgaagggaccatatgtctcatgaatcttctaatgctcctgttaacaatcatcaatcaacttctgaagtcaacaaggggtactttcagcaaggcataaaacaaattcactctgatgcaaggcaaggacaagcgcacctagtaaatggaacctggccgcatcaaaagactgaactgctcagaagtaatttgcagtcaactggtgtacatgctacaccacctggtggacatggatttgggatgtcacaacaaattgcaactgatcacaatatcaacagagagtccagtaataatcaaaatgactggaaagctaacaatgcacttggacaagacatgtgcaatagccaaaatatctttaatagcaatgagaactcttggaagtcaactggaggtaatgccaattcagtccagagatttcagcagaggaggtctgatgtaagcgctactaatgaaagttcagatggtaaaaatattagcatgatgagctcaagcatgccaatgatgacacaggatcattaccagatggtcactagtcagagtggtgagcaaattggcatgaaccgtaatctgacacatagagctccagagacctctgagtcaccaggaaaaagcgcagaacaaagaccaggtgatttcaatcaggaatatctaaatgcaatccctaacgaaagagaaacacacatttcaaaccatggtcgacacataacaagtgattctgcccccagaaggcattctgtatctgctgggaaggaatctgaaaatttaggtcagtctagtcagcaagcaatgggatcttacatcttgcagaaccgtgctatggggagttctggaatgaacattggtctgtctccaggcaatccaatgtcaaatagtctgtttccacctcagacacgaaatagtctgcagcatcattttggcacaaactcccatgtttccaatagtatgccgtcagcaagtgagaaaatgatgatggcacaggaacaacttcaatcgcgacatggtctccccaacagctccagtgcatcaactttaggaggagctgatactggtctatcccagaatagagcagttcaaaacagtcaacatatgcttcagcttctgcataaggtggataactcaaggaatagcaatgtggttgctgacatacccaacaattcccttggcgttgtttctgcccagcaacaacttaaccattcttctttgcaaggatttgggttgagactggcaccaccatcccaactccaatcaatttcgggtaatttatggtctagtcagactaatgctgatggcaagcaattttaccaagatggcgaccgcacacagctaccttccacccctagccagtcactgactcctcagcatcaaaattctctatcttcaccatttcacagttcagaaacagaaaatactgggcaaccaattgcgtgtttcccccaattaggatcaggccaacagtatcctatggcagatgatagatctggtcctgcacccatgctgcagcagcagcctcagcaaagcaactctgcaacagtgttcaagaatgtatggacaaacatatcagcacagcgcctaactggtatgcaacctaacaagattacacccaacatcattcagtctatgatgtttccaaataatgctgcagcttccaacttatggagctctcagaaggcagatgatcaagggcagagggcatcaactccatcagatattgcaacaagttcagcgaactcacagaatcaatctccaaaacaagctgctgatagtgatgcaaagttagcatcttcccagaagggaaacctagagttgacaggaactaccgtaacaggaggaaacgaatccttgcagaagccttcttcagatgagaattctatcaatgctgtttcatcctttgcacagttgcgtcagcaaggcatccttggtgctaaacatggggagaacccaggagctaattttcaggctatgaatgtttcccacaataatgctaatcacagtggtggcattgttttacatggaagtccagcacctacaaacattcagcagcaaaattactctcttctacatcaaatgcaaacctcgaggcatatggatgttgatccaggcagtttatctggaaagacgacaaaacctgatattggttctgatgctgcacagattgattggaattctggtcagagatttgctcatgtaaccaataactcaaccaaatcgtctgcagataacattggaagccctggtgtcccagggtcattcacatcggacttgaaaatgttgagttttgcttcaaggaacgaggagagaaatccaaacataccttctcggtttccttccggagagtgcccgtctcctggtatgataaccacacaagatgataatcagaatcaagttcagcatatgggcacaggtgcaatgtcaaattctgatgaaagaagtgagaggccgaggataaaccctcaaatggcaccttcttggtttggacattacggaaactacagaaatggtcagagtgttgctacgcttaatgctgctacgcttaatgcgcagaagcccatggctttgccatttaattttccgaaagcatctcggaacaatgaaaataatagccatgctgaaaatagagttgaacctagccaatctgttaggcctgggcatcatctcccatcagcaagaatggaagctttggttccttccaatgtaaaagtgtcttcaatgatgagaaggcctaagaagcgtaaaactatggactccacacttgtttcttggcataaaataattgaaagcccacgaaaattgaggggcatcagcacacctgagatggactgggcttgggcagctaaccggttaattgagaaggatgaggcagaaactccagacgatgctcctttaaattatttgccgcggaagaggctaattttgacaagccagttgatccagcaacttctccctgctataccagcgaccattctgagagcacaagctgtgtctgcttacggaagtgcgacatacactctatcaatgttgacactaagggatgcatgcagcatggcatcatcatcatataactcttgctcacctgtggaggatgaaaataacccatctgaacaaccaagtgctaagaaaatggaagacagagtgtcaaaggttgtggaagtcttcgttggaagaatccggaagatggaaaatgactttataagtttgaacaagagggcctcgatgctagatgtgcaactggagtgccaagatctggagagaatttctattgtaaatcgtctgggaagatttcatggccggagccatgcagcggcagttgagagttcatcagctccagaaatgactcctcggagaatttttcctgaaagacatgtcatgtcttttgccgtgcctggaaatcttcctgaaggagtgtgctgtttgtcactctagtggaatgatcttcagttattttctagccgcaatgatgatcccgggtcgcgccctgtgattcccagtgctccttgtcccatgcaaagcatggtcaaacagaaggatcatatattgtcaaggggtaacttgagaactggaagcatcacagtaccacgatgaggcaggccggggacatgttccagccgatcaagtcagtgctggctgttgttgatgcaccttatatcaagtataggtccatgtatattgtggaaagtgaaggaaaaaaactgtggatctcccatcatttttctcgatgaagagtaattagcctcagaatttttttagagaagtcgatgcttactagcttagtgcatctggtgggtttcttgggtatttgtcgatctctaagaaatccgtgatgatggagtgttggcaggctagagtggaaataataatgtgagcctttctctgggttctttggttcctttaggatgggatgcaaattggctagtgtgtcctccagtctaactgaccacccctgttagtcagcagttaattattactagttttatgtagtgctgaaagcattcatggaacaattggcgggtaaagtgcttgggaattcttgtaacttgtgtacccgtgatgtttaaacgctaacgggttcttgtaaatttgaagtgccaatattcctgaggttatattttgctttgtgcaaattgaccagcgtctactgtctccagatgcgtcaatgaagctgggcgcttgcggcttccggtgttccgtttcgctagtggaatgatctcgtgatgatacagtctaaattgatcagtgagctgcgattgggtttgcgagtttccgtaggtttagaatgaag

SEQ ID NO: 84559 - DNA, 6828 bp, Zea Mays
attggattgggttcaatagaaaacaggtacgctcagacgtctaggcatctcgcttgctttccttccaggcttccacgattccaccccagtctgcccaccgactcttccctctccccactactgtcggcgcgtgctctttcctcctcacaccgcacacccgctgccggagctcgagagtcccctccgcttgtcggtgcccgttctgtcaacccctcgccggacgcctgccgccggagctagagagggccaatgcagccgccgctgcgtggtgcctagggcgggtcgcaggggacaaggccgagcccaccaccgtcgacgaggcattcatggaacgcagcaagagcttcatcaaggccctccaggagctcaagaacctgcgcccacagctctacaccgcctccgagtactgcgacaagtcctaactccacagtgagcagaagcaaaagcatacatggtggagctttatcaagataatcttatggacctattgctgccctgaaatgcaaagcaactaaagttagagataaaaaattccaagctgctaaattggtttgacataataaatctcataagacacacctttgcgcattggaaataggcatctagaatgttagaaaatccaagtggaagactcccatgatgcaatcctatatccactgcaggcaaggaatcatctgcatctccattctccaggaatgtgtagtcgcataaccagtttgaatattgttagggttggcatgaagcccacgactaggctccacatgtttgtcatcactcagttctttggagtttggacaacccccgagggcaccaaatctaggaggctcttcttcgcactaaaatcacaagaatgcgctcgaaaactgagggcagatttggcaattgaagaacagtgggaacaagaactgagaagaatgctgaagggcatagtaacagatacaagctaaaattgagacacatataaatgaccatgaatgagactgtatgagcctgatcagctcaattctaggttatgtgcattgtttgctcagtagactacagaccataagtcgcaggcgagttaagaagtggactaacttggatgaaccagcagagatgtggaggaatggaggacgggcagaatatcagattgcttgcagctagtttatttttccagcccagggtgaacttctgggtagtgtagtttgtcgtgggtttatcttctgcagaatagaagcaaatatttgtaaaagctgcttatagttctatatgatatgaaagtttgggaactatcaactgcaaattggccactctttctcaggcattagaccctaagggatactcaaggaatgtcacattttcatcccacacagcatgctagtgacaatgattttcagatgtggcaacagcagatgatgttcaagcacttgcaggagtttcagaggcagcaacaactacagcagtctgatcatggagccaggatgcagctctcttttggacagtttcatgctcctgcaaaacctttgcctggtgatcaattgtcgacaatgtcaaatgaaatggtcaacaatgagaccatgaattctggatggccacataattttacaggtggtgacctgagtttgacgagcaactcccagatgttgaacaatggtagcacaaattgggatcagattgttggttctcctgttgtgggcaatttcatgaatggttcaatgtttgtgaatgctcataatcagtcgatgagaccaatgggattagctacccaccaagtggatcaaactttttatccaatgcatgctaccagcagtagagggcctggaaaccagtattcccaatttttagggattcctgctgatcctcagagtgaagcggcaagggttggtccagttcagtcagaaaagacatccagaccattcaactcttcaatgaacgaacttggtcttcatatgcaaggtaccaccagtttgatgcataattttcgtggaaaagggggcttcttaaataacagtctgatgcaaagtcaaggtgataatatcagggcaggcagtccggttacaatgaatcaactacaacatggttttcaaacccaagattttcatggtaggccaaaccaagttgatcttcaagcgggcatgcaagagaaatcagcaatgcaggtagggcaagcgagtcgtggggctagccttgaccctactgaggagaaaatcttatttgggagtgacgaggatagcaactggggagctttgttgaggggtgacaatgacaatgtcaattctttggacaatgacaactatggtggtggctactcatctctacagagcggtagctggagtgcccttatgcaggaagctctccagtctacaaccagtgaaagtcccaaagaagagtggagtggcttgagtttccataaaactgagcaggtgatggctagcaatgcaaatttatcaggccgcaatggtagtaagtttactggattaagtggtgcaaacctagaaaatgcacgtccttcgccagcgtccagctatgctgatggaacaatgaataacccaaaccttgccagttttcagcatgtcataaggcctccatccgagcgaagggaccatatgtctcatgaatcttctaatgctcctgttaacaatcatcaatcaacttctgaagtcaacaaggggtactttcagcaaggcataaaacaaattcactctgatgcaaggcaaggacaagcgcacctagtaaatggaacctggccgcatcaaaagactgaactgctcagaagtaatttgcagtcaactggtgtacatgctacaccacctggtggacatggatttgggatgtcacaacaaattgcaactgatcacaatatcaacagagagtccagtaataatcaaaatgactggaaagctaacaatgcacttggacaagacatgtgcaatagccaaaatatctttaatagcaatgagaactcttggaagtcaactggaggtaatgccaattcagtccagagatttcagcagaggaggtctgatgtaagcgctactaatgaaagttcagatggtaaaaatattagcatgatgagctcaagcatgccaatgatgacacaggatcattaccagatggtcactagtcagagtggtgagcaaattggcatgaaccgtaatctgacacatagagctccagagacctctgagtcaccaggaaaaagcgcagaacaaagaccaggtgatttcaatcaggaatatctaaatgcaatccctaacgaaagagaaacacacatttcaaaccatggtcgacacataacaagtgattctgcccccagaaggcattctgtatctgctgggaaggaatctgaaaatttaggtcagtctagtcagcaagcaatgggatcttacatcttgcagaaccgtgctatggggagttctggaatgaacattggtctgtctccaggcaatccaatgtcaaatagtctgtttccacctcagacacgaaatagtctgcagcatcattttggcacaaactcccatgtttccaatagtatgccgtcagcaagtgaggaacaacttcaatcgcgacatggtctccccaacagctccagtgcatcaactttaggaggagctgatactggtctatcccagaatagagcagttcaaaacagtcaacatatgcttcagcttctgcataaggtggataactcaaggaatagcaatgtggttgctgacatacccaacaattcccttggcgttgtttctgcccagcaacaacttaaccattcttctttgcaaggatttgggttgagactggcaccaccatcccaactccaatcaatttcgggtaatttatggtctagtcagactaatgctgatggcaagcaattttaccaagatggcgaccgcacacagctaccttccacccctagccagtcactgactcctcagcatcaaaattctctatcttcaccatttcacagttcagaaacagaaaatactgggcaaccaattgcgtgtttcccccaattaggatcaggccaacagtatcctatggcagatgatagatctggtcctgcacccatgctgcagcagcagcctcagcaaagcaactctgcaacagtgttcaagaatgtatggacaaacatatcagcacagcgcctaactggtatgcaacctaacaagattacacccaacatcattcagtctatgatgtttccaaataatgctgcagcttccaacttatggagctctcagaaggcagatgatcaagggcagagggcatcaactccatcagatattgcaacaagttcagcgaactcacagaatcaatctccaaaacaagctgctgatagtgatgcaaagttagcatcttcccagaagggaaacctagagttgacaggaactaccgtaacaggaggaaacgaatccttgcagaagccttcttcagatgagaattctatcaatgctgtttcatcctttgcacagttgcgtcagcaaggcatccttggtgctaaacatggggagaacccaggagctaattttcaggctatgaatgtttcccacaataatgctaatcacagtggtggcattgttttacatggaagtccagcacctacaaacattcagcagcaaaattactctcttctacatcaaatgcaaacctcgaggcatatggatgttgatccaggcagtttatctggaaagacgacaaaacctgatattggttctgatgctgcacagattgattggaattctggtcagagatttgctcatgtaaccaataactcaaccaaatcgtctgcagataacattggaagccctggtgtcccagggtcattcacatcggacttgaaaatgttgagttttgcttcaaggaacgaggagagaaatccaaacataccttctcggtttccttccggagagtgcccgtctcctggtatgataaccacacaagatgataatcagaatcaagttcagcatatgggcacaggtgcaatgtcaaattctgatgaaagaagtgagaggccgaggataaaccctcaaatggcaccttcttggtttggacattacggaaactacagaaatggtcagagtgttgctacgcttaatgctgctacgcttaatgcgcagaagcccatggctttgccatttaattttccgaaagcatctcggaacaatgaaaataatagccatgctgaaaatagagttgaacctagccaatctgttaggcctgggcatcatctcccatcagcaagaatggaagctttggttccttccaatgtaaaagtgtcttcaatgatgagaaggcctaagaagcgtaaaactatggactccacacttgtttcttggcataaaataattgaaagcccacgaaaattgaggggcatcagcacacctgagatggactgggcttgggcagctaaccggttaattgagaaggatgaggcagaaactccagacgatgctcctttaaattatttgccgcggaagaggctaattttgacaagccagttgatccagcaacttctccctgctataccagcgaccattctgagagcacaagctgtgtctgcttacggaagtgcgacatacactctatcaatgttgacactaagggatgcatgcagcatggcatcatcatcatataactcttgctcacctgtggaggatgaaaataacccatctgaacaaccaagtgctaagaaaatggaagacagagtgtcaaaggttgtggaagtcttcgttggaagaatccggaagatggaaaatgactttataagtttgaacaagagggcctcgatgctagatgtgcaactggagtgccaagatctggagagaatttctattgtaaatcgtctgggaagatttcatggccggagccatgcagcggcagttgagagttcatcagctccagaaatgactcctcggagaatttttcctgaaagacatgtcatgtcttttgccgtgcctggaaatcttcctgaaggagtgtgctgtttgtcactctagtggaatgatcttcagttattttctagccgcaatgatgatcccgggtcgcgccctgtgattcccagtgctccttgtcccatgcaaagcatggtcaaacagaaggatcatatattgtcaaggggtaacttgagaactggaagcatcacagtaccacgatgaggcaggccggggacatgttccagccgatcaagtcagtgctggctgttgttgatgcaccttatatcaagtataggtccatgtatattgtggaaagtgaaggaaaaaaactgtggatctcccatcatttttctcgatgaagagtaattagcctcagaatttttttagagaagtcgatgcttactagcttagtgcatctggtgggtttcttgggtatttgtcgatctctaagaaatccgtgatgatggagtgttggcaggctagagtggaaataataatgtgagcctttctctgggttctttggttcctttaggatgggatgcaaattggctagtgtgtcctccagtctaactgaccacccctgttagtcagcagttaattattactagttttatgtagtgctgaaagcattcatggaacaattggcgggtaaagtgcttgggaattcttgtaacttgtgtacccgtgatgtttaaacgctaacgggttcttgtaaatttgaagtgccaatattcctgaggttatattttgctttgtgcaaattgaccagcgtctactgtctccagatgcgtcaatgaagctgggcgcttgcggcttccggtgttccgtttcgctagtggaatgatctcgtgatgatacagtctaaattgatcagtgagctgcgattgggtttgcgagtttccgtaggtttagaatgaag

SEQ ID NO: 84560 - DNA, 5692 bp, Zea Mays
ccgcgagctacagctttgcagcgctctctcttggctcgctcgctcgctcgcccgcctcgcctgcgccctctctttcactcctggctcgcttgcgttgtggagctcgagactgtcgccattccgctacgagaaaccctaaccctagccctcgcaccgccgcgggaggccgcgggagagaccgtgtcgcaccgcgccgtcgatcccgatccagacgccgtcgcgccgtgccgcgctgatcgaggtaggtctcgcctgaatcgggccggaattcgcggggtttctcccgggtgcgcgtctgcagggtggtgaatcgggcgggcggggcgtcgtgcggagggtccgtgacgtgatcgggtttggggattttttggagggggagaatggtgtgggccttttctccgggggatctgcgcggataggaaaattgggagctcagtgctgctcgatctcgcggcgtcttggtcgccagagctcggcgggacgctaaattttaggtcttaacggtaatttgtgcgtggtgggctggggtttggtgtattcaagcttggggtttcaggttactcgagcttagtctctcgctacaagtggcttatggagcgtttaggctcgcttaacttgagctgctccttgccgcgtgcactgggatttgagcgtcttctagctggggagaagcgtggggatttagggatgcccctgtagatgccgcacgctttgttcctgttttcccccgtttttttcaatgactttcttgctttcacagctccttcgaactttgagctcttagtgtctcgtctagtggacgcggcagtgcaaaccgcttcctctctgtttcttctgcatcttgaaagtcttcggcagctgcatcccgtgtttatggggccaaaagtctggatctttggcctcaacaggtgtatggagtggtgcttcttcaactggatttttaactacactttctcttgtatttgcttgattttatgccccaagtgttctgtgttatgaactgtagctggttttcaagtgtagtccaacgtgcttgtcgtttgtagtgaacactcggatgtagttattgtgctgtgtgggtagtttattcttttgttgaggtcataggtggttattggcttctaattcaggttcctgtcattttgtgaagtgagagaagcctatcctaatcgtgaaacccgttatatcttttcctgtgctttatcttcattcctgtgcctgtgaaagtacgaccactagtattgacgaggagatctaggatactcaagtacttgctcatgagttgtatgttctttgtcactgtggttgcactagtttacttcacttgccacctacattaagcttaattgacatgatcagttacaatcaagtttttttagatatcaatgcataagctcattttttcatttgaagttctaccactgcgaatttctatgactgctctcgtctgacctgtgtgtgcatttgtgcacacctgcattgaagcatgtgtctcatttatcaaccatgcatctaactttaagcacgaggagatccactttgctattgattgttggtttgaaaacttcaattgtttatctttaaattatgtcattaatcttaaatcgataacatagtgctggcacaaatttgggaaaatctgttgtactactagatgctgtgttctggcattaccttgtatgtctctgactctctgttgctcatgaatttctttaatacactaatgtagcttttttgtatggcttgtggtcttgtggattctcctaaattgagacgattttatgcagctaggatatgggttgtttcttcggttgttacatatttatatgttaataatcgtttgatacagtgattcttccacatttgcagtgtggaggaatggaggacgggcagaatatcagattgcttgcagctagtttatttttccagcccagggtgaacttctgggtagtgtagtttgtcgtgggtttatcttctgcagaatagaagcaaatatttgtaaaagctgcttatagttctatatgatatgaaagtttgggaactatcaactgcaaattggccactctttctcaggcattagaccctaagggatactcaaggaatgtcacattttcatcccacacagcatgctagtgacaatgattttcagatgtggcaacagcagatgatgttcaagcacttgcaggagtttcagaggcagcaacaactacagcagtctgatcatggagccaggatgcagctctcttttggacagtttcatgctcctgcaaaacctttgcctggtgatcaattgtcgacaatgtcaaatgaaatggtcaacaatgagaccatgaattctggatggccacataattttacaggtggtgacctgagtttgacgagcaactcccagatgttgaacaatggtagcacaaattgggatcagattgttggttctcctgttgtgggcaatttcatgaatggttcaatgtttgtgaatgctcataatcagtcgatgagaccaatgggattagctacccaccaagtggatcaaactttttatccaatgcatgctaccagcagtagagggcctggaaaccagtattcccaatttttagggattcctgctgatcctcagagtgaagcggcaagggttggtccagttcagtcagaaaagacatccagaccattcaactcttcaatgaacgaacttggtcttcatatgcaaggtaccaccagtttgatgcataattttcgtggaaaagggggcttcttaaataacagtctgatgcaaagtcaaggtgataatatcagggcaggcagtccggttacaatgaatcaactacaacatggttttcaaacccaagattttcatggtaggccaaaccaagttgatcttcaagcgggcatgcaagagaaatcagcaatgcaggtagggcaagcgagtcgtggggctagccttgaccctactgaggagaaaatcttatttgggagtgacgaggatagcaactggggagctttgttgaggggtgacaatgacaatgtcaattctttggacaatgacaactatggtggtggctactcatctctacagagcggtagctggagtgcccttatgcaggaagctctccagtctacaaccagtgaaagtcccaaagaagagtggagtggcttgagtttccataaaactgagcaggtgatggctagcaatgcaaatttatcaggccgcaatggtagtaagtttactggattaagtggtgcaaacctagaaaatgcacgtccttcgccagcgtccagctatgctgatggaacaatgaataacccaaaccttgccagttttcagcatgtcataaggcctccatccgagcgaagggaccatatgtctcatgaatcttctaatgctcctgttaacaatcatcaatcaacttctgaagtcaacaaggggtactttcagcaaggcataaaacaaattcactctgatgcaaggcaaggacaagcgcacctagtaaatggaacctggccgcatcaaaagactgaactgctcagaagtaatttgcagtcaactggtgtacatgctacaccacctggtggacatggatttgggatgtcacaacaaattgcaactgatcacaatatcaacagagagtccagtaataatcaaaatgactggaaagctaacaatgcacttggacaagacatgtgcaatagccaaaatatctttaatagcaatgagaactcttggaagtcaactggaggtaatgccaattcagtccagagatttcagcagaggaggtctgatgtaagcgctactaatgaaagttcagatggtaaaaatattagcatgatgagctcaagcatgccaatgatgacacaggatcattaccagatggtcactagtcagagtggtgagcaaattggcatgaaccgtaatctgacacatagagctccagagacctctgagtcaccaggaaaaagcgcagaacaaagaccaggtgatttcaatcaggaatatctaaatgcaatccctaacgaaagagaaacacacatttcaaaccatggtcgacacataacaagtgattctgcccccagaaggcattctgtatctgctgggaaggaatctgaaaatttaggtcagtctagtcagcaagcaatgggatcttacatcttgcagaaccgtgctatggggagttctggaatgaacattggtctgtctccaggcaatccaatgtcaaatagtctgtttccacctcagacacgaaatagtctgcagcatcattttggcacaaactcccatgtttccaatagtatgccgtcagcaagtgagaaaatgatgatggcacaggaacaacttcaatcgcgacatggtctccccaacagctccagtgcatcaactttaggaggagctgatactggtctatcccagaatagagcagttcaaaacagtcaacatatgcttcagcttctgcataaggtggataactcaaggaatagcaatgtggttgctgacatacccaacaattcccttggcgttgtttctgcccagcaacaacttaaccattcttctttgcaaggatttgggttgagactggcaccaccatcccaactccaatcaatttcgggtaatttatggtctagtcagactaatgctgatggcaagcaattttaccaagatggcgaccgcacacagctaccttccacccctagccagtcactgactcctcagcatcaaaattctctatcttcaccatttcacagttcagaaacagaaaatactgggcaaccaattgcgtgtttcccccaattaggatcaggccaacagtatcctatggcagatgatagatctggtcctgcacccatgctgcagcagcagcctcagcaaagcaactctgcaacagtgttcaagaatgtatggacaaacatatcagcacagcgcctaactggtatgcaacctaacaagattacacccaacatcattcagtctatgatgtttccaaataatgctgcagcttccaacttatggagctctcagaaggcagatgatcaagggcagagggcatcaactccatcagatattgcaacaagttcagcgaactcacagaatcaatctccaaaacaagctgctgatagtgatgcaaagttagcatcttcccagaagggaaacctagagttgacaggaactaccgtaacaggaggaaacgaatccttgcagaagccttcttcagatgagaattctatcaatgctgtttcatcctttgcacagttgcgtcagcaaggcatccttggtgctaaacatggggagaacccaggagctaattttcaggctatgaatgtttcccacaataatgctaatcacagtggtggcattgttttacatggaagtccagcacctacaaacattcagcagcaaaattactctcttctacatcaaatgcaaacctcgaggcatatggatgttgatccaggcagtttatctggaaagacgacaaaacctgatattggttctgatgctgcacagattgattggaattctggtcagagatttgctcatgtaaccaataactcaaccaaatcgtctgcagataacattggaagccctggtgtcccagggtcattcacatcggacttgaaaatgttgagttttgcttcaaggaacgaggagagaaatccaaacataccttctcggtttccttccggagagtgcccgtctcctggt

SEQ ID NO: 84561 - DNA, 1572 bp, Zea Mays
agttcacctttctcttctaatggcttcaagccggcgacagcagcaacaatgcgacgttcatttcaccgtttgcttcccgagatacggtcatacggagccacagtttgtcgttactgctcccagccagcgtgaaccgatcccacggagctcatcccacaggccacagcactcctccggtactcccctcgcacgacttcacgagcgcggtcgactgccgccgccaccaccgccgatctgcaaggtcccgtcgaccaccgccactctgcaagtgaggggaaagaggcaagattgaggagggaagcatcgctggtgtatccgccgccacattcgtcgccgggagccagcccatattcgagacgaggtcgagctttgctgccttggcgagcttcagtcgaatcaaggttgagcctggcggcaggccagtaaacagagcaacgcaaaacccttcgaatcaatggagacctccgcagcaaccccgacccggccgccccacccggcggccgcttccccatcgccgtcgccctcgtcgtcgctgaggctgtggaggtcagcggcgcagcgcaacgtgcgcaatcagtggtcccgtctgagcgccgccaaggagcagtggctggccgccgttgctgatggccgcgcccacgcctccgcgctcgtcaacgcccacctctgccgcaggaacatgccagcgacggatttgggggtgctcaaggatatgccggggatccgcgataaggctaactccaagttggtgcttagagaggagcaatacagtgggatgcttctgtcggcctacaaggagatggtccgtcagctgtcctacttggttgaagcttcccattctatgcgctgtttttctaaagcagctccaaattgctccatcacacagttttctgaccgccaagataatttgaatgattcaggggatggtggaggagccccagtattcaaatggttctccatattagaatttgagactcttgcccaggagcttgttcagatgtttgtttcagagcaaaagttgaagaggctgctactcttggaatttctctcgattgctttaaaggaaggtgtagaactccagacatcattaaattgggaacgtttagggagtcagcgacctggcaatctccctctgcatgaagttttacaggtttatttaaccacttggcatgctaatatgaacatcaaccggagtagaattggtgaaatatttgagcttgttgaggaggagatgaagattaaactgtcttgaagattccgattcattttgtttggctattcatcaaggaagaagaaatggaaaagaaagatcaatcagtttactattcaccaggtttctctatccagtgtctttatctgccttagtagaagtcttcagagcttacctatcatcttagaatatagtactggtctccttgtaacccataatatatttttttaatccaatgttcggttaccctggaatcatattgggaggagagcgttggaccaacatatgttattgaaatgagatttccaagttatcaggatcattcgcctagcttcaggtgagctggtcagtccagcactgac

SEQ ID NO: 84562 - DNA, 879 bp, Zea Mays
taacaccttggccaccaattcagtgagcaatacagtgggatgcttctgtcggcctacaaggagatggtccgtcagctgtcctacttggttgaagcttcccattctatgcgctgtttttctaaagcagctccaaattgctccatcacacagttttctgaccgccaagataatttgaatgattcaggggatggtggaggagccccagtattcaaatggttctccatattagaatttggagcttgttcagatgtttgtttcagagcaaaagttgaagaggctgctactcttggaatttctctcgattgctttaaaggaaggtgtagaactccagacatcattaaattggggtgatgaactatatgatggtgaatcaaatgaacttcagagtattggccttcagtcaggagatgcctactcaccgcctgaaaattggtgtgcagaacgtttagggagtcagcgacctggcaatctccctctgcatgaagttttacaggtttatttaaccacttggcatgctaatatgaacatcaaccggagtagaattggtgaaatatttgagcttgttgaggaggagatgaagattaaactgtcttgaagattccgattcattttgtttggctattcatcaaggaagaagaaatggaaaagaaagatcaatcagtttactattcaccaggtttctctatccagtgtctttatctgccttagtagaagtcttcagagcttacctatcatcttagaatatagtactggtctccttgtaacccataatatatttttttaatccaatgttcggttaccctggaatcatattgggaggagagcgttggaccaacatatgttattgaaatgagatttccaagttatcaggatcattcg

SEQ ID NO: 84563 - DNA, 1257 bp, Zea Mays
ggctctgataccagatgtgacacccctgggccgccggcgcgtgctcgccggggcgtgaggtcgtcggaatcgcccgcgagggacagggttggcacgggagccagcccatattcgagacgaggtcgagctttgctgccttggcgagcttcagtcgaatcaaggttgagcctggcggcaggccagtaaacagagcaacgcaaaacccttcgaatcaatggagacctccgcagcaaccccgacccggccgccccacccggcggccgcttccccatcgccgtcgccctcgtcgtcgctgaggctgtggaggtcagcggcgcagcgcaacgtgcgcaatcagtggtcccgtctgagcgccgccaaggagcagtggctggccgccgttgctgatggccgcgcccacgcctccgcgctcgtcaacgcccacctctgccgcaggaacatgccagcgacggatttgggggtgctcaaggatatgccggggatccgcgataaggctaactccaagttggtgcttagagaggagcaatacagtgggatgcttctgtcggcctacaaggagatggggatggtggaggagccccagtattcaaatggttctccatattagaatttggagcttgttcagatgtttgtttcagagcaaaagttgaagaggctgctactcttggaatttctctcgattgctttaaaggaaggtgtagaactccagacatcattaaattggggtgatgaactatatgatggtgaatcaaatgaacttcagagtattggccttcagtcaggagatgcctactcaccgcctgaaaattggtgtgcagaacgtttagggagtcagcgacctggcaatctccctctgcatgaagttttacaggtttatttaaccacttggcatgctaatatgaacatcaaccggagtagaattggtgaaatatttgagcttgttgaggaggagatgaagattaaactgtcttgaagattccgattcattttgtttggctattcatcaaggaagaagaaatggaaaagaaagatcaatcagtttactattcaccaggtttctctatccagtgtctttatctgccttagtagaagtcttcagagcttacctatcatcttagaatatagtactggtctccttgtaacccataatatatttttttaatccaatgttcggttaccctggaatcatattgggaggagagcgttggaccaacatatgttattgaaatgagatttccaagttatcaggatcattcg

SEQ ID NO: 84564 - DNA, 1773 bp, Zea Mays
agttcacctttctcttctaatggcttcaagccggcgacagcagcaacaatgcgacgttcatttcaccgtttgcttcccgagatacggtcatacggagccacagtttgtcgttactgctcccagccagcgtgaaccgatcccacggagctcatcccacaggccacagcactcctccggtactcccctcgcacgacttcacgagcgcggtcgactgccgccgccaccaccgccgatctgcaaggtcccgtcgaccaccgccactctgcaagtgaggggaaagaggcaagattgaggagggaagcatcgctggtgtatccgccgccacattcgtcgccgggagccagcccatattcgagacgaggtcgagctttgctgccttggcgagcttcagtcgaatcaaggttgagcctggcggcaggccagtaaacagagcaacgcaaaacccttcgaatcaatggagacctccgcagcaaccccgacccggccgccccacccggcggccgcttccccatcgccgtcgccctcgtcgtcgctgaggctgtggaggtcagcggcgcagcgcaacgtgcgcaatcagtggtcccgtctgagcgccgccaaggagcagtggctggccgccgttgctgatggccgcgcccacgcctccgcgctcgtcaacgcccacctctgccgcaggaacatgccagcgacggatttgggggtgctcaaggatatgccggggatccgcgataaggctaactccaagttggtgcttagagaggagcaatacagtgggatgcttctgtcggcctacaaggagatggggatggtggaggagccccagtattcaaatggttctccatattagaatttggtgggtaaatcatctcttctatggattaagtcactactatgatctttcgtctgttgggtgtgacaatgatctccaaacccatctgattgccttttaaaagttcaaaaggtcaaatgagtttgatttaggaagactactcagagcactatatattctcatatttgaggatgccggtcaatatctgagacactgcacatattaatgtttacatgttttaaatccacatgataaaaagatattatgtttcctttaatcacctcagagactcttgcccaggagcttgttcagatgtttgtttcagagcaaaagttgaagaggctgctactcttggaatttctctcgattgctttaaaggaaggtgtagaactccagacatcattaaattggggtgatgaactatatgatggtgaatcaaatgaacttcagagtattggccttcagtcaggagatgcctactcaccgcctgaaaattggtgtgcagaacgtttagggagtcagcgacctggcaatctccctctgcatgaagttttacaggtttatttaaccacttggcatgctaatatgaacatcaaccggagtagaattggtgaaatatttgagcttgttgaggaggagatgaagattaaactgtcttgaagattccgattcattttgtttggctattcatcaaggaagaagaaatggaaaagaaagatcaatcagtttactattcaccaggtttctctatccagtgtctttatctgccttagtagaagtcttcagagcttacctatcatcttagaatatagtactggtctccttgtaacccataatatatttttttaatccaatgttcggttaccctggaatcatattgggaggagagcgttggaccaacatatgttattgaaatgagatttccaagttatcaggatcattcg

SEQ ID NO: 84565 - DNA, 1436 bp, Zea Mays
agttcacctttctcttctaatggcttcaagccggcgacagcagcaacaatgcgacgttcatttcaccgtttgcttcccgagatacggtcatacggagccacagtttgtcgttactgctcccagccagcgtgaaccgatcccacggagctcatcccacaggccacagcactcctccggtactcccctcgcacgacttcacgagcgcggtcgactgccgccgccaccaccgccgatctgcaaggtcccgtcgaccaccgccactctgcaagtgaggggaaagaggcaagattgaggagggaagcatcgctggtgtatccgccgccacattcgtcgccgggagccagcccatattcgagacgaggtcgagctttgctgccttggcgagcttcagtcgaatcaaggttgagcctggcggcaggccagtaaacagagcaacgcaaaacccttcgaatcaatggagacctccgcagcaaccccgacccggccgccccacccggcggccgcttccccatcgccgtcgccctcgtcgtcgctgaggctgtggaggtcagcggcgcagcgcaacgtgcgcaatcagtggtcccgtctgagcgccgccaaggagcagtggctggccgccgttgctgatggccgcgcccacgcctccgcgctcgtcaacgcccacctctgccgcaggaacatgccagcgacggatttgggggtgctcaaggatatgccggggatccgcgataaggctaactccaagttggtgcttagagaggagcaatacagtgggatgcttctgtcggcctacaaggagatggggatggtggaggagccccagtattcaaatggttctccatattagaatttgagactcttgcccaggagcttgttcagatgtttgtttcagagcaaaagttgaagaggctgctactcttggaatttctctcgattgctttaaaggaaggtgtagaactccagacatcattaaattggggtgatgaactatatgatgaacgtttagggagtcagcgacctggcaatctccctctgcatgaagttttacaggtttatttaaccacttggcatgctaatatgaacatcaaccggagtagaattggtgaaatatttgagcttgttgaggaggagatgaagattaaactgtcttgaagattccgattcattttgtttggctattcatcaaggaagaagaaatggaaaagaaagatcaatcagtttactattcaccaggtttctctatccagtgtctttatctgccttagtagaagtcttcagagcttacctatcatcttagaatatagtactggtctccttgtaacccataatatatttttttaatccaatgttcggttaccctggaatcatattgggaggagagcgttggaccaacatatgttattgaaatgagatttccaagttatcaggatcattcg

SEQ ID NO: 84566 - DNA, 1458 bp, Zea Mays
agttcacctttctcttctaatggcttcaagccggcgacagcagcaacaatgcgacgttcatttcaccgtttgcttcccgagatacggtcatacggagccacagtttgtcgttactgctcccagccagcgtgaaccgatcccacggagctcatcccacaggccacagcactcctccggtactcccctcgcacgacttcacgagcgcggtcgactgccgccgccaccaccgccgatctgcaaggtcccgtcgaccaccgccactctgcaagtgaggggaaagaggcaagattgaggagggaagcatcgctggtgtatccgccgccacattcgtcgccgggagccagcccatattcgagacgaggtcgagctttgctgccttggcgagcttcagtcgaatcaaggttgagcctggcggcaggccagtaaacagagcaacgcaaaacccttcgaatcaatggagacctccgcagcaaccccgacccggccgccccacccggcggccgcttccccatcgccgtcgccctcgtcgtcgctgaggctgtggaggtcagcggcgcagcgcaacgtgcgcaatcagtggtcccgtctgagcgccgccaaggagcagtggctggccgccgttgctgatggccgcgcccacgcctccgcgctcgtcaacgcccacctctgccgcaggaacatgccagcgacggatttgggggtgctcaaggatatgccggggatccgcgataaggctaactccaagttggtgcttagagaggagcaatacagtgggatgcttctgtcggcctacaaggagatggggatggtggaggagccccagtattcaaatggttctccatattagaatttgaggctgctactcttggaatttctctcgattgctttaaaggaaggtgtagaactccagacatcattaaattggggtgatgaactatatgatggtgaatcaaatgaacttcagagtattggccttcagtcaggagatgcctactcaccgcctgaaaattggtgtgcagaacgtttagggagtcagcgacctggcaatctccctctgcatgaagttttacaggtttatttaaccacttggcatgctaatatgaacatcaaccggagtagaattggtgaaatatttgagcttgttgaggaggagatgaagattaaactgtcttgaagattccgattcattttgtttggctattcatcaaggaagaagaaatggaaaagaaagatcaatcagtttactattcaccaggtttctctatccagtgtctttatctgccttagtagaagtcttcagagcttacctatcatcttagaatatagtactggtctccttgtaacccataatatatttttttaatccaatgttcggttaccctggaatcatattgggaggagagcgttggaccaacatatgttattgaaatgagatttccaagttatcaggatcattcg

SEQ ID NO: 84567 - DNA, 1805 bp, Zea Mays
cacagcgccacagacctccctcccagtggtcgattctttgcttgtagctagctgtaccagcctctctctctccgtctcttgtgttgaaggggagacagagaagggtaggcgacacgccatggaaccgacaaggctgctgcttcttctcctcgttctcggcgtgtcgctgcaaggatgcattgcgcagggcggcggcggcgccggagggctcacgcgggggagcttccccaagggattcgtcttcggcaccgcctcctccgcttaccagtacgagggagcggtgaaggaggacggcagagggaaaaccatctgggacaagttcgcgcacacgtttgggaaggttgcagacctgagtaacgccgatgtcgcggtcgatcagtaccaccggttcgaggaggatatacagctcatggcggacatggggatggacgcgtaccgcttttcgattgcctggtcgaggattctgcccaatggtaccggccaagtcaaccaggccggcgtcgaccactacaacaggtttatcgatgcactgctatcgaaaggccctggaagacaggtacaacggatggctggacaggcagatagtgtacgacttcgccgagtacgccgagacatgcttcgaggccttcggagaccgcgtgaggcactgggtcacgctcaacgagccgcacacggtcgccgtccagggctacgacgccgggctccaggcgccgggccgctgctccctgctgctccacctctactgcaggtcgggggactcggccaccgagccctacgtcgtcgcccacaacttcatcctggcacacgccaaggtctccgacgtgtacaggaaaaagtacaaggcggctcagaacggagagcttgggatagcgttcgacgtcatgtggttcgagccgatgaccaacactaccgccgacatcgaggctgccaagagagggcaggagttccagctcggatggttcgcggaccccttcttcttcggcgactacccggcgtcgatgaggtcgcgggtcggcgacaggctgcccaggttcacggcggccgaggccgcgctcgtcaagggggcgctcgacttcgtcggcataaaccactacaccacctactacaccaagcacaacagcaccgacctcgtgggccgactgctgcacaacaccctggcggacaccggaaccatcagcctcccgttcaggaacgggaaagccatcggtgacagggccaactcgatctggctgtacatcgtgcccagcgggatgaggagcctgatgaactacgtcaaggaaaggtacaacagcccgccgatttacgtcaccgaaaacgggatggacgacggcaacagccccttcacctccatcaaggacgccctcaaggacagcaagagggtcaagtaccacaacgactacctcaccaacctggctgcctctataaaggatgacgcctgcgacgtgcgtggctacttcgcctggtcgctgctggacaactgggagtggacggccggctactcctccaggttcgggctctacttcgtcgactacaaggacaaccttaagagataccccaagagctcggtgcagtggttcaagaacctgctggcctctagctgaagcctcgatggatatatatatactgcattgtcatttccttctttaatcttcatggcctgcccaagtggccatctgaaaccatgcatgcatgtacgctgtggcgtccccttctggatgccttctcctttcatctatatagccacgatacaatacaagttgcctggaagaaaactatcgaggcgaaataaagtcaaggcaatactt

SEQ ID NO: 84568 - DNA, 1842 bp, Zea Mays
cacagcgccacagacctccctcccagtggtcgattctttgcttgtagctagctgtaccagcctctctctctccgtctcttgtgttgaaggggagacagagaagggtaggcgacacgccatggaaccgacaaggctgctgcttcttctcctcgttctcggcgtgtcgctgcaaggatgcattgcgcagggcggcggcggcgccggagggctcacgcgggggagcttccccaagggattcgtcttcggcaccgcctcctccgcttaccagtacgagggagcggtgaaggaggacggcagagggaaaaccatctgggacaagttcgcgcacacgtttgggaaggttgcagacctgagtaacgccgatgtcgcggtcgatcagtaccaccggttcgaggaggatatacagctcatggcggacatggggatggacgcgtaccgcttttcgattgcctggtcgaggattctgcccaatggtaccggccaagtcaaccaggccggcgtcgaccactacaacaggtttatcgatgcactgctatcgaaagggattgagccatacgtgaccctgtaccactgggacctcccccaggccctggaagacaggtacaacggatggctggacaggcagatagtgtacgacttcgccgagtacgccgagacatgcttcgaggccttcggagaccgcgtgaggcactgggtcacgctcaacgagccgcacacggtcgccgtccagggctacgacgccgggctccaggcgccgggccgctgctccctgctgctccacctctactgcaggtcgggggactcggccaccgagccctacgtcgtcgcccacaacttcatcctggcacacgccaaggtctccgacgtgtacaggaaaaagtacaaggcggctcagaacggagagcttgggatagcgttcgacgtcatgtggttcgagccgatgaccaacactaccgccgacatcgaggctgccaagagagggcaggagttccagctcggatggttcgcggaccccttcttcttcggcgactacccggcgtcgatgaggtcgcgggtcggcgacaggctgcccaggttcacggcggccgaggccgcgctcgtcaagggggcgctcgacttcgtcggcataaaccactacaccacctactacaccaagcacaacagcaccgacctcgtgggccgactgctgcacaacaccctggcggacaccggaaccatcagcctccgaacgggaaagccatcggtgacagggccaactcgatctggctgtacatcgtgcccagcgggatgaggagcctgatgaactacgtcaaggaaaggtacaacagcccgccgatttacgtcaccgaaaacgggatggacgacggcaacagccccttcacctccatcaaggacgccctcaaggacagcaagagggtcaagtaccacaacgactacctcaccaacctggctgcctctataaaggatgacgcctgcgacgtgcgtggctacttcgcctggtcgctgctggacaactgggagtggacggccggctactcctccaggttcgggctctacttcgtcgactacaaggacaaccttaagagataccccaagagctcggtgcagtggttcaagaacctgctggcctctagctgaagcctcgatggatatatatatactgcattgtcatttccttctttaatcttcatggcctgcccaagtggccatctgaaaccatgcatgcatgtacgctgtggcgtccccttctggatgccttctcctttcatctatatagccacgatacaatacaagttgcctggaagaaaactatcgaggcgaaataaagtcaaggcaatactt

SEQ ID NO: 84569 - DNA, 1853 bp, Zea Mays
cacagcgccacagacctccctcccagtggtcgattctttgcttgtagctagctgtaccagcctctctctctccgtctcttgtgttgaaggggagacagagaagggtaggcgacacgccatggaaccgacaaggctgctgcttcttctcctcgttctcggcgtgtcgctgcaaggatgcattgcgcagggcggcggcggcgccggagggctcacgcgggggagcttccccaagggattcgtcttcggcaccgcctcctccgcttaccagtacgagggagcggtgaaggaggacggcagagggaaaaccatctgggacaagttcgcgcacacgtttgggaaggttgcagacctgagtaacgccgatgtcgcggtcgatcagtaccaccggttcgaggaggatatacagctcatggcggacatggggatggacgcgtaccgcttttcgattgcctggtcgaggattctgcccaatggtaccggccaagtcaaccaggccggcgtcgaccactacaacaggtttatcgatgcactgctatcgaaagggattgagccatacgtgaccctgtaccactgggacctcccccaggccctggaagacaggtacaacggatggctggacaggcagatagtgtacgacttcgccgagtacgccgagacatgcttcgaggccttcggagaccgcgtgaggcactgggtcacgctcaacgagccgcacacggtcgccgtccagggctacgacgccgggctccaggcgccgggccgctgctccctgctgctccacctctactgcaggtcgggggactcggccaccgagccctacgtcgtcgcccacaacttcatcctggcacacgccaaggtctccgacgtgtacaggaaaaagtacaaggcggctcagaacggagagcttgggatagcgttcgacgtcatgtggttcgagccgatgaccaacactaccgccgacatcgaggctgccaagagagggcaggagttccagctcggatggttcgcggaccccttcttcttcggcgactacccggcgtcgatgaggtcgcgggtcggcgacaggctgcccaggttcacggcggccgaggccgcgctcgtcaagggggcgctcgacttcgtcggcataaaccactacaccacctactacaccaagcacaacagcaccgacctcgtgggccgactgctgcacaacaccctggcggacaccggaaccatcagcctcccgttcaggaacgggaaagccatcggtgacagggccaactcgatctggctgtacatcgtgcccagcgggatgaggagcctgatgaactacgtcaaggaaaggtacaacagcccgccgatttacgtcaccgaaaacgggatggacgacggcaacagccccttcacctccatcaaggacgccctcaaggacagcaagagggtcaagtaccacaacgactacctcaccaacctggctgcctctataaagcaaggatgacgcctgcgacgtgcgtggctacttcgcctggtcgctgctggacaactgggagtggacggccggctactcctccaggttcgggctctacttcgtcgactacaaggacaaccttaagagataccccaagagctcggtgcagtggttcaagaacctgctggcctctagctgaagcctcgatggatatatatatactgcattgtcatttccttctttaatcttcatggcctgcccaagtggccatctgaaaccatgcatgcatgtacgctgtggcgtccccttctggatgccttctcctttcatctatatagccacgatacaatacaagttgcctggaagaaaactatcgaggcgaaataaagtcaaggcaatactt

SEQ ID NO: 84570 - DNA, 1795 bp, Zea Mays
gcaaaatgaacacaagtcgccttctcgagaaggaagtgaagatggctggcggcttcagggtactgcatctggtcaggccttttcttgctttcttgccagaggtgcagagcgcggataggaagataccgttcagagaaaaagttatctacactgttatttccctcttcattttcctggtctgcagccagctcccactctatggcattcattcaacaactggagctgatcctttctactggatgcgtgttatcctcgcatcaaaccgtggcactgtgatggagttgggtattactccaattgtgacatctgggatggtaatgcaacttcttgttggatcgaagatcattgaagttgacaacagtgtgagagaggatcgtgctctgctgaatggtgcacaaaagttgcttggtatcctgattgctattggggaagctgtggcatatgtcctgtctggaatgtatggcagtgtaagccaacttggaacagggaatgctatcctcattatacttcagcttttctttgctggcatcattgtcatctgtctggatgaacttctccagaaaggttatggcttgggatctggcatttctctgttcattgctaccaatatctgcgagaatatcatctggaaggcatttagccccacaaccatcaacagtggtcgtggtgctgaatttgaaggggctgtcattgcactgtttcatctgttgattacgagaaccgataaagtccgtgctcttcgtgaggctttctaccgccagaaccttccaaatgtgaccaatttgcttgccacagtcttggtcttcctcatagttatctatttccaaggcttccgtgttgtccttccagtgagatcaaagaatgctcgtggccagcaaggctcatatccaattaagctattctacacttcaaacatgcccatcattctgcactctgcactgattaccaacctctatttcatatcccagcttctctacaggaagtacagtggaaacttccttgttaaccttcttgggatgtggaaggagtctgaatactctggccattctgttcctgttggtggtcttgcttactatgtaactgccccatcaagtttggctgatgtccttgcaaatccattccatgcactgttttatgtggtcttcatgctgtcagcttgcgctctgttctcaaaaacgtggattgaagtttctggttcatcagcaaaggatgttgctaagcagctcaaggaacaacaaatggtgatgccaggacatcgtgagtcaaacttgcagaaggaactgaaccgatacatccccactgctgctgcatttggtggagtatgcatcggcgcattgactgtcctggctgatttcatgggtgcaattggttcaggaactggaatactgctggctgtgacaatcatataccaatactttgaaaccttcgagaaggaaagggcaacggagcttggtttctttggtttttgattagtagctgtggaaccttgaaccgatagctgaattttcttggcctaagtcactgtagtgcttagccagttgtaacttaagagagttctgttaggttgccttgtggccacaatcatgtagcagaatctgtccaaagagcgtgttcatcccatccacaatcagtaatccgcactctacagtttgctcataggttaccctggcaactggatgttctgtgttcaatttcagttacttttgaactgtaaggtctgttattactagtttcccagaacttagatgctcacgtgcgctttatttcaatatctattttgtgatgttgcatgatt

SEQ ID NO: 84571 - DNA, 1747 bp, Zea Mays
cccctgcacgtcacgggagtccatggaggccgcccgttctagatcgcacggctcgcgccccgcgacgccatccaaccccgcgcggccccacctacagcgagcggctcgcgccgtgccccagttgccagctccgcctcccttaaaacccaccgctgttcgcgtcctcgtttctctcaatctctctcttctcctcgcctcgccttggtgttcacgccgtcgctagcgcctgccgcggcgaagcttctgccctccccggcgccgggctcgggtcgtcgtcggccaggaagatggctggcggcttcagggtactgcatctggtcaggccttttcttgctttcttgccagaggtgcagagcgcggataggaagataccgttcagagaaaaagttatctacactgttatttccctcttcattttcctggtctgcagccagctcccactctatggcattcattcaacaactggagctgatcctttctactggatgcgtgttatcctcgcatcaaaccgtggcactgtgatggagttgggtattactccaattgtgacatctgggatggtaatgcaacttcttgttggatcgaagatcattgaagttgacaacagtgtgagagaggatcgtgctctgctgaatggtgcacaaaagttgcttggtatcctgattgctattggggaagctgtggcatatgtcctgtctggaatgtatggcagtaaccttccaaatgtgaccaatttgcttgccacagtcttggtcttcctcatagttatctatttccaaggcttccgtgttgtccttccagtgagatcaaagaatgctcgtggccagcaaggctcatatccaattaagctattctacacttcaaacatgcccatcattctgcactctgcactgattaccaacctctatttcatatcccagcttctctacaggaagtacagtggaaacttccttgttaaccttcttgggatgtggaaggagtctgaatactctggccattctgttcctgttggtggtcttgcttactatgtaactgccccatcaagtttggctgatgtccttgcaaatccattccatgcactgttttatgtggtcttcatgctgtcagcttgcgctctgttctcaaaaacgtggattgaagtttctggttcatcagcaaaggatgttgctaagcagctcaaggaacaacaaatggtgatgccaggacatcgtgagtcaaacttgcagaaggaactgaaccgatacatccccactgctgctgcatttggtggagtatgcatcggcgcattgactgtcctggctgatttcatgggtgcaattggttcaggaactggaatactgctggctgtgacaatcatataccaatactttgaaaccttcgagaaggaaagggcaacggagcttggtttctttggtttttgattagtagctgtggaaccttgaaccgatagctgaattttcttggcctaagtcactgtagtgcttagccagttgtaacttaagagagttctgttaggttgccttgtggccacaatcatgtagcagaatctgtccaaagagcgtgttcatcccatccacaatcagtaatccgcactctacagtttgctcataggttaccctggcaactggatgttctgtgttcaatttcagttacttttgaactgtaaggtctgttattactagtttcccagaacttagatgctcacgtgcgctttatttcaatatctattttgtgatgttgcatgatt

SEQ ID NO: 84572 - DNA, 1747 bp, Zea Mays
cccctgcacgtcacgggagtccatggaggccgcccgttctagatcgcacggctcgcgccccgcgacgccatccaaccccgcgcggccccacctacagcgagcggctcgcgccgtgccccagttgccagctccgcctcccttaaaacccaccgctgttcgcgtcctcgtttctctcaatctctctcttctcctcgcctcgccttggtgttcacgccgtcgctagcgcctgccgcggcgaagcttcacgcaaaactccaacgaacttctcatttgctgattacaggaagatggctggcggcttcagggtactgcatctggtcaggccttttcttgctttcttgccagaggtgcagagcgcggataggaagataccgttcagagaaaaagttatctacactgttatttccctcttcattttcctggtctgcagccagctcccactctatggcattcattcaacaactggagctgatcctttctactggatgcgtgttatcctcgcatcaaaccgtggcactgtgatggagttgggtattactccaattgtgacatctgggatggtaatgcaacttcttgttggatcgaagatcattgaagttgacaacagtgtgagagaggatcgtgctctgctgaatggtgcacaaaagttgcttggtatcctgattgctattggggaagctgtggcatatgtcctgtctggaatgtatggcagtaaccttccaaatgtgaccaatttgcttgccacagtcttggtcttcctcatagttatctatttccaaggcttccgtgttgtccttccagtgagatcaaagaatgctcgtggccagcaaggctcatatccaattaagctattctacacttcaaacatgcccatcattctgcactctgcactgattaccaacctctatttcatatcccagcttctctacaggaagtacagtggaaacttccttgttaaccttcttgggatgtggaaggagtctgaatactctggccattctgttcctgttggtggtcttgcttactatgtaactgccccatcaagtttggctgatgtccttgcaaatccattccatgcactgttttatgtggtcttcatgctgtcagcttgcgctctgttctcaaaaacgtggattgaagtttctggttcatcagcaaaggatgttgctaagcagctcaaggaacaacaaatggtgatgccaggacatcgtgagtcaaacttgcagaaggaactgaaccgatacatccccactgctgctgcatttggtggagtatgcatcggcgcattgactgtcctggctgatttcatgggtgcaattggttcaggaactggaatactgctggctgtgacaatcatataccaatactttgaaaccttcgagaaggaaagggcaacggagcttggtttctttggtttttgattagtagctgtggaaccttgaaccgatagctgaattttcttggcctaagtcactgtagtgcttagccagttgtaacttaagagagttctgttaggttgccttgtggccacaatcatgtagcagaatctgtccaaagagcgtgttcatcccatccacaatcagtaatccgcactctacagtttgctcataggttaccctggcaactggatgttctgtgttcaatttcagttacttttgaactgtaaggtctgttattactagtttcccagaacttagatgctcacgtgcgctttatttcaatatctattttgtgatgttgcatgatt

SEQ ID NO: 84573 - DNA, 4045 bp, Zea Mays
aaaaccccaccgctgttcgcgtcctcgtttctctcaatctctctcctctcctcgcctctccttggtgtccgtgttcacgccgtcgctagcgcctgccgcggcgaagcttctgccctccccggcgccgggctcgggtcgtcgtcggccaggcagctgctacgcgtgaacacggtcacaccagtaccacgtgacgtgaacggtgaactcgtgaagaacagagccgccactgaggaaccctagcgacggcggcgtgctaccggtgacattgtccccctcggtccctcctccatccccgacgcagcggcgccagcctgcaggaagcctattcgagacaaggtcgatctttgctgccttggcgagcttcagccgaatcaaggtcgagcatggcggcaggccagtaaatagagcaacacaaaacccttcaaatcaatggagacctctgcagcaaccccgacccggccgccacaccaggcggccacttccccatcgccatcgccctcgtcgtcgttgaggctgtggaggccagcggcgcagcgcaacatgcgcaatcagtggtcccatctgagcgccgccaaggagcagtggctggccgccgttgctgacggtcgtgcccacgcctccgcgctcgtcaacgtccacctctcctgcaggaacatgccggcgatggatttgggggtgctcaaggatatgccggggatccgcgataaggcgaactccaagttggcgcttagagaggagcaatacagcggcatgcttctgtcggcctacaaggagatggtctgtcagctgtcctacttggttgaagcttcccattctatgcgctgtttttctaaagcggctccaaattgctccatcacacagttttctgaccgccaagataatttgaatgattcaggggatggtggaggagccccagtattcaaatggttctccgtattagaatttggtgggttaatcatctcttgcttctatggattaagtcaccactatgatctttcgtctgttgggtgtgacaatgatctcctaacccatctatatctgagactactcagagcactatatattctcacatttgaggatgccgatcaatatctgagacagtacacacattcatgtttacatgttttaaatccacatgataaaaatatattatgtttcctttaatcacctcagagagtcttgcccaggagcttgttcagatgtttgtttcagagcaaaagttgaagaggctgctactcttggaatttctctcgattgctttaaaggaaggtgtagaactccagacatcattaaattggggtgatgaactatatgatggtgaatcaaataaacttcagagtattggccttcagtcaggagatgcctactcaccgcctgaaaattggtgtgcagaacgtttagggagtcagagacctggcaatctccctctgcatgaagttttacaggtttatttaaccacttggcatgctaatatgaacatcaaccggaaattggtgaaatatttgagcttgttgaggaggagatgaagattaaactgtcttgaagattccgattcattttgttgggctatccatcaaggaagaagaaatggaaaagaaagatcaatcagttcactattcaccaggattctatatccagtgtctttatctgccttagtagaagccttcagagcttacctatgatcttagaatatagtactggtctccttgtgacccataatttttttaaaaaatttaatgttgggttacactggaatcatattgggaagagcgttggaccaacatatgttattgaaatgagatttctaagttatcaggatcattcgcctagcttcagggtttagatgggcgtcgaggcagcaatcgaggcaaggaggaggcgggggtgggggatgctacaccgaccgtgacgtcgcctactgtcttggaccttctgtgcgccctccttgacaccctcgacgctccacggagctcggaggcggtgaccgtcgaggaggtcggtccctcgaggcgacccggggaaccggttgaaaagtacatcatcccgcctcctatcgttggggcgggtggcgacctcgttcgtgccggatcggacctctcgacatggggagggccgaccctgaggtggatggccaccgagggcaacccctacttcgtccttaatgacacggaggagagggagatgtgggcggagtttcgagcaatggctcaggggcttatggcgaagtccgtggccaagtcgatctccatccgcagcgagcgcgacatatgggccgtgctgcagcgctatcaggccatgttgtgttgcgcaaacgagtagctgacgctgaagagggccgaggcggcgaacctatcgtcgttgtgtgctgagttgaaagacgaggtcgcgactgagcgcgagaaggtgtcgtcgctggaggaggaggtgcgacgcctgagataaggccttcgggtggtgactggtgaacgagacgagtctcggcatcaagccaccgaggcttctcttcaagctgactctcacgaaggacctgggggccgagtggagtacggtccaaggcctaagggcctaaatgggagagctcgaaagggatttggatgctgccattcacacctctaaaactcacccaggccgtcgaccaaaagatggtcgagctgaaggacctgtccgacgcggtggtggagtttggtcgagacctttgcgtcgcggacgttcccttgggtgagtacttgcggagccgcatgcgagccctgagtggctacgtgcggagcgaactccgtgaggccgtccatcttggggtgaagcaagtgttggtcgtagtcgcctcccactatgagattaatctcgagcgggcatgcgaaggctacgtcttgttggacgagcgcaacctcgccgaggccgagatgcagaggctcaccgatgttgtcgaggggtcgggctcagtgtaacaccccgtccaatcccggaccggcggtacttactcctggcagctctctaggatcatttatcatccacacaaaccaacatgggtcttttgtgcgcactttgtcctcactcatgtgcacccgataaaacttcccagtcggtcactaatcctaaattgctccaagccaaacacgcttaacttggaggttcttttgagatatgcttccgaaaaagaagatgtatcttgttggtatggatactctattaattctattaagccttgggccaggatatcaccatctcagggcctaggatatcacaatccacccccttagaagaccgacgtcctcgtcggtcaacctcaatccaggaacctcccctcttagccacatgtgtgtctagtgtcgtcatattccatgccatgtgaccacttagggcccacatgcgccatgtgccatatatccgaaccccctagcccacacacgctcgtgaaacctcaagggtcggctctgataccacttgtaacaccctatccaatccctagaccggcggtacttactcctggcagctctctaggatcatatatcatctccacagaccaacacaagtctttgtgtgcgctttgttctcactcatgcgcacccgagaaaacttcccggtcggtcacttatcccaaattgctccaagccaaacacacttaacttggaggttctttcgaaataggcttccgaaaaagaagatgcaccttgttggtatggatactctattaattctattaagccttcggccaggatatcaccatcctaggggctaggatatcacacttagcattggcgtgccacttcgaggatgaggtggttctgccggtgcagtcccctcctgtcgaatctcactccgctgtggcgcctcccggcgtccccgaggttgacgctgtgcctcataccgcgcagactcttcatttgccctgaggggttataaggaatattttgagttgcgtgtataagtcgtgtattgaacactttgtttttgtatcttgtttatttgctatgttattttttcgcttgttttgtgcccgccgttttgcctttccacagagtcctcatcggaacgtgagttaccttat

SEQ ID NO: 84574 - DNA, 3536 bp, Zea Mays
aaaaccccaccgctgttcgcgtcctcgtttctctcaatctctctcctctcctcgcctctccttggtgtccgtgttcacgccgtcgctagcgcctgccgcggcgaagcttctgccctccccggcgccgggctcgggtcgtcgtcggccaggaagcctattcgagacaaggtcgatctttgctgccttggcgagcttcagccgaatcaaggtcgagcatggcggcaggccagtaaatagagcaacacaaaacccttcaaatcaatggagacctctgcagcaaccccgacccggccgccacaccaggcggccacttccccatcgccatcgccctcgtcgtcgttgaggctgtggaggccagcggcgcagcgcaacatgcgcaatcagtggtcccatctgagcgccgccaaggagcagtggctggccgccgttgctgacggtcgtgcccacgcctccgcgctcgtcaacgtccacctctcctgcaggaacatgccggcgatggatttgggggtgctcaaggatatgccggggatccgcgataaggcgaactccaagttggcgcttagagaggagcaatacagcggcatgcttctgtcggcctacaaggagatggggatggtggaggagccccagtattcaaatggttctccgtattagaatttgagagtcttgcccaggagcttgttcagatgtttgtttcagagcaaaagttgaagaggctgctactcttggaatttctctcgattgctttaaaggaaggtgtagaactccagacatcattaaattggggtgatgaactatatgatggtgaatcaaataaacttcagagtattggccttcagtcaggagatgcctactcaccgcctgaaaattggtgtgcagaacgtttagggagtcagagacctggcaatctccctctgcatgaagttttacaggtttatttaaccacttggcatgctaatatgaacatcaaccggagtagaattggtgaaatatttgagcttgttgaggaggagatgaagattaaactgtcttgaagattccgattcattttgttgggctatccatcaaggaagaagaaatggaaaagaaagatcaatcagttcactattcaccaggattctatatccagtgtctttatctgccttagtagaagccttcagagcttacctatgatcttagaatatagtactggtctccttgtgacccataatttttttaaaaaatttaatgttgggttacactggaatcatattgggaagagcgttggaccaacatatgttattgaaatgagatttctaagttatcaggatcattcgcctagcttcagggtttagatgggcgtcgaggcagcaatcgaggcaaggaggaggcgggggtgggggatgctacaccgaccgtgacgtcgcctactgtcttggaccttctgtgcgccctccttgacaccctcgacgctccacggagctcggaggcggtgaccgtcgaggaggtcggtccctcgaggcgacccggggaaccggttgaaaagtacatcatcccgcctcctatcgttggggcgggtggcgacctcgttcgtgccggatcggacctctcgacatggggagggccgaccctgaggtggatggccaccgagggcaacccctacttcgtccttaatgacacggaggagagggagatgtgggcggagtttcgagcaatggctcaggggcttatggcgaagtccgtggccaagtcgatctccatccgcagcgagcgcgacatatgggccgtgctgcagcgctatcaggccatgttgtgttgcgcaaacgagtagctgacgctgaagagggccgaggcggcgaacctatcgtcgttgtgtgctgagttgaaagacgaggtcgcgactgagcgcgagaaggtgtcgtcgctggaggaggaggtgcgacgcctgagataaggccttcgggtggtgactggtgaacgagacgagtctcggcatcaagccaccgaggcttctcttcaagctgactctcacgaaggacctgggggccgagtggagtacggtccaaggcctaagggcctaaatgggagagctcgaaagggatttggatgctgccattcacacctctaaaactcacccaggccgtcgaccaaaagatggtcgagctgaaggacctgtccgacgcggtggtggagtttggtcgagacctttgcgtcgcggacgttcccttgggtgagtacttgcggagccgcatgcgagccctgagtggctacgtgcggagcgaactccgtgaggccgtccatcttggggtgaagcaagtgttggtcgtagtcgcctcccactatgagattaatctcgagcgggcatgcgaaggctacgtcttgttggacgagcgcaacctcgccgaggccgagatgcagaggctcaccgatgttgtcgaggggtcgggctcagtgtaacaccccgtccaatcccggaccggcggtacttactcctggcagctctctaggatcatttatcatccacacaaaccaacatgggtcttttgtgcgcactttgtcctcactcatgtgcacccgataaaacttcccagtcggtcactaatcctaaattgctccaagccaaacacgcttaacttggaggttcttttgagatatgcttccgaaaaagaagatgtatcttgttggtatggatactctattaattctattaagccttgggccaggatatcaccatctcagggcctaggatatcacaatccacccccttagaagaccgacgtcctcgtcggtcaacctcaatccaggaacctcccctcttagccacatgtgtgtctagtgtcgtcatattccatgccatgtgaccacttagggcccacatgcgccatgtgccatatatccgaaccccctagcccacacacgctcgtgaaacctcaagggtcggctctgataccacttgtaacaccctatccaatccctagaccggcggtacttactcctggcagctctctaggatcatatatcatctccacagaccaacacaagtctttgtgtgcgctttgttctcactcatgcgcacccgagaaaacttcccggtcggtcacttatcccaaattgctccaagccaaacacacttaacttggaggttctttcgaaataggcttccgaaaaagaagatgcaccttgttggtatggatactctattaattctattaagccttcggccaggatatcaccatcctaggggctaggatatcacacttagcattggcgtgccacttcgaggatgaggtggttctgccggtgcagtcccctcctgtcgaatctcactccgctgtggcgcctcccggcgtccccgaggttgacgctgtgcctcataccgcgcagactcttcatttgccctgaggggttataaggaatattttgagttgcgtgtataagtcgtgtattgaacactttgtttttgtatcttgtttatttgctatgttattttttcgcttgttttgtgcccgccgttttgcctttccacagagtcctcatcggaacgtgagttaccttat

SEQ ID NO: 84575 - DNA, 4038 bp, Zea Mays
aaaaccccaccgctgttcgcgtcctcgtttctctcaatctctctcctctcctcgcctctccttggtgtccgtgttcacgccgtcgctagcgcctgccgcggcgaagcttctgccctccccggcgccgggctcgggtcgtcgtcggccaggcagctgctacgcgtgaacacggtcacaccagtaccacgtgacgtgaacggtgaactcgtgaagaacagagccgccactgaggaaccctagcgacggcggcgtgctaccggtgacattgtccccctcggtccctcctccatccccgacgcagcggcgccagcctgcaggaagcctattcgagacaaggtcgatctttgctgccttggcgagcttcagccgaatcaaggtcgagcatggcggcaggccagtaaatagagcaacacaaaacccttcaaatcaatggagacctctgcagcaaccccgacccggccgccacaccaggcggccacttccccatcgccatcgccctcgtcgtcgttgaggctgtggaggccagcggcgcagcgcaacatgcgcaatcagtggtcccatctgagcgccgccaaggagcagtggctggccgccgttgctgacggtcgtgcccacgcctccgcgctcgtcaacgtccacctctcctgcaggaacatgccggcgatggatttgggggtgctcaaggatatgccggggatccgcgataaggcgaactccaagttggcgcttagagagcggcatgcttctgtcggcctacaaggagatggtctgtcagctgtcctacttggttgaagcttcccattctatgcgctgtttttctaaagcggctccaaattgctccatcacacagttttctgaccgccaagataatttgaatgattcaggggatggtggaggagccccagtattcaaatggttctccgtattagaatttggtgggttaatcatctcttgcttctatggattaagtcaccactatgatctttcgtctgttgggtgtgacaatgatctcctaacccatctatatctgagactactcagagcactatatattctcacatttgaggatgccgatcaatatctgagacagtacacacattcatgtttacatgttttaaatccacatgataaaaatatattatgtttcctttaatcacctcagagagtcttgcccaggagcttgttcagatgtttgtttcagagcaaaagttgaagaggctgctactcttggaatttctctcgattgctttaaaggaaggtgtagaactccagacatcattaaattggggtgatgaactatatgatggtgaatcaaataaacttcagagtattggccttcagtcaggagatgcctactcaccgcctgaaaattggtgtgcagaacgtttagggagtcagagacctggcaatctccctctgcatgaagttttacaggtttatttaaccacttggcatgctaatatgaacatcaaccggagtagaattggtgaaatatttgagcttgttgaggaggagatgaagattaaactgtcttgaagattccgattcattttgttgggctatccatcaaggaagaagaaatggaaaagaaagatcaatcagttcactattcaccaggattctatatccagtgtctttatctgccttagtagaagccttcagagcttacctatgatcttagaatatagtactggtctccttgtgacccataatttttttaaaaaatttaatgttgggttacactggaatcatattgggaagagcgttggaccaacatatgttattgaaatgagatttctaagttatcaggatcattcgcctagcttcagggtttagatgggcgtcgaggcagcaatcgaggcaaggaggaggcgggggtgggggatgctacaccgaccgtgacgtcgcctactgtcttggaccttctgtgcgccctccttgacaccctcgacgctccacggagctcggaggcggtgaccgtcgaggaggtcggtccctcgaggcgacccggggaaccggttgaaaagtacatcatcccgcctcctatcgttggggcgggtggcgacctcgttcgtgccggatcggacctctcgacatggggagggccgaccctgaggtggatggccaccgagggcaacccctacttcgtccttaatgacacggaggagagggagatgtgggcggagtttcgagcaatggctcaggggcttatggcgaagtccgtggccaagtcgatctccatccgcagcgagcgcgacatatgggccgtgctgcagcgctatcaggccatgttgtgttgcgcaaacgagtagctgacgctgaagagggccgaggcggcgaacctatcgtcgttgtgtgctgagttgaaagacgaggtcgcgactgagcgcgagaaggtgtcgtcgctggaggaggaggtgcgacgcctgagataaggccttcgggtggtgactggtgaacgagacgagtctcggcatcaagccaccgaggcttctcttcaagctgactctcacgaaggacctgggggccgagtggagtacggtccaaggcctaagggcctaaatgggagagctcgaaagggatttggatgctgccattcacacctctaaaactcacccaggccgtcgaccaaaagatggtcgagctgaaggacctgtccgacgcggtggtggagtttggtcgagacctttgcgtcgcggacgttcccttgggtgagtacttgcggagccgcatgcgagccctgagtggctacgtgcggagcgaactccgtgaggccgtccatcttggggtgaagcaagtgttggtcgtagtcgcctcccactatgagattaatctcgagcgggcatgcgaaggctacgtcttgttggacgagcgcaacctcgccgaggccgagatgcagaggctcaccgatgttgtcgaggggtcgggctcagtgtaacaccccgtccaatcccggaccggcggtacttactcctggcagctctctaggatcatttatcatccacacaaaccaacatgggtcttttgtgcgcactttgtcctcactcatgtgcacccgataaaacttcccagtcggtcactaatcctaaattgctccaagccaaacacgcttaacttggaggttcttttgagatatgcttccgaaaaagaagatgtatcttgttggtatggatactctattaattctattaagccttgggccaggatatcaccatctcagggcctaggatatcacaatccacccccttagaagaccgacgtcctcgtcggtcaacctcaatccaggaacctcccctcttagccacatgtgtgtctagtgtcgtcatattccatgccatgtgaccacttagggcccacatgcgccatgtgccatatatccgaaccccctagcccacacacgctcgtgaaacctcaagggtcggctctgataccacttgtaacaccctatccaatccctagaccggcggtacttactcctggcagctctctaggatcatatatcatctccacagaccaacacaagtctttgtgtgcgctttgttctcactcatgcgcacccgagaaaacttcccggtcggtcacttatcccaaattgctccaagccaaacacacttaacttggaggttctttcgaaataggcttccgaaaaagaagatgcaccttgttggtatggatactctattaattctattaagccttcggccaggatatcaccatcctaggggctaggatatcacacttagcattggcgtgccacttcgaggatgaggtggttctgccggtgcagtcccctcctgtcgaatctcactccgctgtggcgcctcccggcgtccccgaggttgacgctgtgcctcataccgcgcagactcttcatttgccctgaggggttataaggaatattttgagttgcgtgtataagtcgtgtattgaacactttgtttttgtatcttgtttatttgctatgttattttttcgcttgttttgtgcccgccgttttgcctttccacagagtcctcatcggaacgtgagttaccttat

SEQ ID NO: 84576 - DNA, 4049 bp, Zea Mays
aaaaccccaccgctgttcgcgtcctcgtttctctcaatctctctcctctcctcgcctctccttggtgtccgtgttcacgccgtcgctagcgcctgccgcggcgaagcttctgccctccccggcgccgggctcgggtcgtcgtcggccaggcagctgctacgcgtgaacacggtcacaccagtaccacgtgacgtgaacggtgaactcgtgaagaacagagccgccactgaggaaccctagcgacggcggcgtgctaccggtgacattgtccccctcggtccctcctccatccccgacgcagcggcgccagcctgcaggaagcctattcgagacaaggtcgatctttgctgccttggcgagcttcagccgaatcaaggtcgagcatggcggcaggccagtaaatagagcaacacaaaacccttcaaatcaatggagacctctgcagcaaccccgacccggccgccacaccaggcggccacttccccatcgccatcgccctcgtcgtcgttgaggctgtggaggccagcggcgcagcgcaacatgcgcaatcagtggtcccatctgagcgccgccaaggagcagtggctggccgccgttgctgacggtcgtgcccacgcctccgcgctcgtcaacgtccacctctcctgcaggaacatgccggcgatggatttgggggtgctcaaggatatgccggggatccgcgataaggcgaactccaagttggcgcttagagaggagcaatacagcggcatgcttctgtcggcctacaaggagatggtctgtcagctgtcctacttggttgaagcttcccattctatgcgctgtttttctaaagcggctccaaattgctccatcacacagttttctgaccgccaagataatttgaatgattcaggggatggtggaggagccccagtattcaaatggttctccgtattagaatttggtgggttaatcatctcttgcttctatggattaagtcaccactatgatctttcgtctgttgggtgtgacaatgatctcctaacccatctatatctgagactactcagagcactatatattctcacatttgaggatgccgatcaatatctgagacagtacacacattcatgtttacatgttttaaatccacatgataaaaatatattatgtttcctttaatcacctcagagagtcttgcccaggagcttgttcagatgtttgtttcagagcaaaagttgaagaggctgctactcttggaatttctctcgattgctttaaaggaaggtgtagaactccagacatcattaaattggggtgatgaactatatgatggtgaatcaaataaacttcagagtattggccttcagtcaggagatgcctactcaccgcctgaaaattggtgtgcagaacgtttagggagtcagagacctggcaatctccctctgcatgaagttttacaggtttatttaaccacttggcatgctaatatgaacatcaaccggagtagaattggtgaaatatttgagcttgttgaggaggagatgaagattaaactgtcttgaagattccgattcattttgttgggctatccatcaaggaagaagaaatggaaaagaaagatcaatcagttcactattcaccaggattctatatccagtgtctttatctgccttagtagaagccttcagagcttacctatgatcttagaatatagtactggtctccttgtgacccataatttttttaaaaaatttaatgttgggttacactggaatcatattgggaagagcgttggaccaacatatgttattgaaatgagatttctaagttatcaggatcattcgcctagcttcagggtttagatgggcgtcgaggcagcaatcgaggcaaggaggaggcgggggtgggggatgctacaccgaccgtgacgtcgcctactgtcttggaccttctgtgcgccctccttgacaccctcgacgctccacggagctcggaggcggtgaccgtcgaggaggtcggtccctcgaggcgacccggggaaccggttgaaaagtacatcatcccgcctcctatcgttggggcgggtggcgacctcgttcgtgccggatcggacctctcgacatggggagggccgaccctgaggtggatggccaccgagggcaacccctacttcgtccttaatgacacggaggagagggagatgtgggcggagtttcgagcaatggctcaggggcttatggcgaagtccgtggccaagtcgatctccatccgcagcgagcgcgacatatgggccgtgctgcagcgctatcaggccatgttgtgttgcgcaaacgagtagctgacgctgaagagggccgaggcggcgaacctatcgtcgttgtgtgctgagttgaaagacgaggtcgcgactgagcgcgagaaggtgtcgtcgctggaggaggaggtgcgacgcctgagataaggccttcgggtggtgactggtgaacgagacgagtctcggcatcaagccaccgaggcttctcttcaagctgactctcacgaaggacctgggggccgagtggagtacggtccaaggcctaagggcctaaatgggagagctcgaaagggatttggatgctgccattcacacctctaaaactcacccaggccgtcgaccaaaagatggtcgagctgaaggacctgtccgacgcggtggtggagtttggtcgagacctttgcgtcgcggacgttcccttgggtgagtacttgcggagccgcatgcgagccctgagtggctacgtgcggagcgaactccgtgaggccgtccatcttggggtgaagcaagtgttggtcgtagtcgcctcccactatgagattaatctcgagcgggcatgcgaaggctacgtcttgttggacgagcgcaacctcgccgaggccgagatgcagaggctcaccgatgttgtcgaggggtcgggctcagtgtaacaccccgtccaatcccggaccggcggtacttactcctggcagctctctaggatcatttatcatccacacaaaccaacatgggtcttttgtgcgcactttgtcctcactcatgtgcacccgataaaacttcccagtcggtcactaatcctaaattgctccaagccaaacacgcttaacttggaggttcttttgagatatgcttccgaaaaagaagatgtatcttgttggtatggatactctattaattctattaagccttgggccaggatatcaccatctcagggcctaggatatcacaatccacccccttagaagaccgacgtcctcgtcggtcaacctcaatccaggaacctcccctcttagccacatgtgtgtctagtgtcgtcatattccatgccatgtgaccacttagggcccacatgcgccatgtgccatatatccgaaccccctagcccacacacgctcgtgaaacctcaagggtcggctctgataccacttgtaacaccctatccaatccctagaccggcggtacttactcctggcagctctctaggatcatatatcatctccacagaccaacacaagtctttgtgtgcgctttgttctcactcatgcgcacccgagaaaacttcccggtcggtcacttatcccaaattgctccaagccaaacacacttaacttggaggttctttcgaaataggcttccgaaaaagaagatgcaccttgttggtatggatactctattaattctattaagccttcggccaggatatcaccatcctaggggctaggatatcacacttagcattggcgtgccacttcgaggatgaggtggttctgccggtgcagtcccctcctgtcgaatctcactccgctgtggcgcctcccggcgtccccgaggttgacgctgtgcctcataccgcgcagactcttcatttgccctgaggggttataaggaatattttgagttgcgtgtataagtcgtgtattgaacactttgtttttgtatcttgtttatttgctatgttattttttcgcttgttttgtgcccgccgttttgcctttccacagagtcctcatcggaacgtgagttaccttat

SEQ ID NO: 84577 - DNA, 4129 bp, Zea Mays
aaaaccccaccgctgttcgcgtcctcgtttctctcaatctctctcctctcctcgcctctccttggtgtccgtgttcacgccgtcgctagcgcctgccgcggcgaagcttctgccctccccggcgccgggctcgggtcgtcgtcggccaggcagctgctacgcgtgaacacggtcacaccagtaccacgtgacgtgaacggtgaactcgtgaagaacagagccgccactgaggaaccctagcgacggcggcgtgctaccggtgacattgtccccctcggtccctcctccatccccgacgcagcggcgccagcctgcaggaagcctattcgagacaaggtcgatctttgctgccttggcgagcttcagccgaatcaaggtcgagcatggcggcaggccagtaaatagagcaacacaaaacccttcaaatcaatggagacctctgcagcaaccccgacccggccgccacaccaggcggccacttccccatcgccatcgccctcgtcgtcgttgaggctgtggaggccagcggcgcagcgcaacatgcgcaatcagtggtcccatctgagcgccgccaaggagcagtggctggccgccgttgctgacggtcgtgcccacgcctccgcgctcgtcaacgtccacctctcctgcaggaacatgccggcgatggatttgggggtgctcaaggatatgccggggatccgcgataaggcgaactccaagttggcgcttagagaggagcaatacagcggcatgcttctgtcggcctacaaggagatgttttctgaccgccaagataatttgaatgattcaggggatggtggaggagccccagtattcaaatggttctccgtattagaatttggtgggttaatcatctcttgcttctatggattaagtcaccactatgatctttcgtctgttgggtgtgacaatgatctcctaacccatctatatctgagactactcagagcactatatattctcacatttgaggatgccgatcaatatctgagacagtacacacattcatgtttacatgttttaaatccacatgataaaaatatattatgtttcctttaatcacctcagagagtcttgcccaggagcttgttcagatgtttgtttcagagcaaaagttgaaggtacatcatccctctttatacggtgatcttttccaacaacagaaaaattcttttattcagtatatctgtgtttaggttcttttgtaaatcggatttgttttacttgcctgcattattctcttttggagaagtttcctgacaatgtagatcatttatatctgtagaggctgctactcttggaatttctctcgattgctttaaaggaaggtgtagaactccagacatcattaaattggggtgatgaactatatgatggtgaatcaaataaacttcagagtattggccttcagtcaggagatgcctactcaccgcctgaaaattggtgtgcagaacgtttagggagtcagagacctggcaatctccctctgcatgaagttttacaggtttatttaaccacttggcatgctaatatgaacatcaaccggagtagaattggtgaaatatttgagcttgttgaggaggagatgaagattaaactgtcttgaagattccgattcattttgttgggctatccatcaaggaagaagaaatggaaaagaaagatcaatcagttcactattcaccaggattctatatccagtgtctttatctgccttagtagaagccttcagagcttacctatgatcttagaatatagtactggtctccttgtgacccataatttttttaaaaaatttaatgttgggttacactggaatcatattgggaagagcgttggaccaacatatgttattgaaatgagatttctaagttatcaggatcattcgcctagcttcagggtttagatgggcgtcgaggcagcaatcgaggcaaggaggaggcgggggtgggggatgctacaccgaccgtgacgtcgcctactgtcttggaccttctgtgcgccctccttgacaccctcgacgctccacggagctcggaggcggtgaccgtcgaggaggtcggtccctcgaggcgacccggggaaccggttgaaaagtacatcatcccgcctcctatcgttggggcgggtggcgacctcgttcgtgccggatcggacctctcgacatggggagggccgaccctgaggtggatggccaccgagggcaacccctacttcgtccttaatgacacggaggagagggagatgtgggcggagtttcgagcaatggctcaggggcttatggcgaagtccgtggccaagtcgatctccatccgcagcgagcgcgacatatgggccgtgctgcagcgctatcaggccatgttgtgttgcgcaaacgagtagctgacgctgaagagggccgaggcggcgaacctatcgtcgttgtgtgctgagttgaaagacgaggtcgcgactgagcgcgagaaggtgtcgtcgctggaggaggaggtgcgacgcctgagataaggccttcgggtggtgactggtgaacgagacgagtctcggcatcaagccaccgaggcttctcttcaagctgactctcacgaaggacctgggggccgagtggagtacggtccaaggcctaagggcctaaatgggagagctcgaaagggatttggatgctgccattcacacctctaaaactcacccaggccgtcgaccaaaagatggtcgagctgaaggacctgtccgacgcggtggtggagtttggtcgagacctttgcgtcgcggacgttcccttgggtgagtacttgcggagccgcatgcgagccctgagtggctacgtgcggagcgaactccgtgaggccgtccatcttggggtgaagcaagtgttggtcgtagtcgcctcccactatgagattaatctcgagcgggcatgcgaaggctacgtcttgttggacgagcgcaacctcgccgaggccgagatgcagaggctcaccgatgttgtcgaggggtcgggctcagtgtaacaccccgtccaatcccggaccggcggtacttactcctggcagctctctaggatcatttatcatccacacaaaccaacatgggtcttttgtgcgcactttgtcctcactcatgtgcacccgataaaacttcccagtcggtcactaatcctaaattgctccaagccaaacacgcttaacttggaggttcttttgagatatgcttccgaaaaagaagatgtatcttgttggtatggatactctattaattctattaagccttgggccaggatatcaccatctcagggcctaggatatcacaatccacccccttagaagaccgacgtcctcgtcggtcaacctcaatccaggaacctcccctcttagccacatgtgtgtctagtgtcgtcatattccatgccatgtgaccacttagggcccacatgcgccatgtgccatatatccgaaccccctagcccacacacgctcgtgaaacctcaagggtcggctctgataccacttgtaacaccctatccaatccctagaccggcggtacttactcctggcagctctctaggatcatatatcatctccacagaccaacacaagtctttgtgtgcgctttgttctcactcatgcgcacccgagaaaacttcccggtcggtcacttatcccaaattgctccaagccaaacacacttaacttggaggttctttcgaaataggcttccgaaaaagaagatgcaccttgttggtatggatactctattaattctattaagccttcggccaggatatcaccatcctaggggctaggatatcacacttagcattggcgtgccacttcgaggatgaggtggttctgccggtgcagtcccctcctgtcgaatctcactccgctgtggcgcctcccggcgtccccgaggttgacgctgtgcctcataccgcgcagactcttcatttgccctgaggggttataaggaatattttgagttgcgtgtataagtcgtgtattgaacactttgtttttgtatcttgtttatttgctatgttattttttcgcttgttttgtgcccgccgttttgcctttccacagagtcctcatcggaacgtgagttaccttat

SEQ ID NO: 84578 - DNA, 3704 bp, Zea Mays
aaaaccccaccgctgttcgcgtcctcgtttctctcaatctctctcctctcctcgcctctccttggtgtccgtgttcacgccgtcgctagcgcctgccgcggcgaagcttctgccctccccggcgccgggctcgggtcgtcgtcggccaggcagctgctacgcgtgaacacggtcacaccagtaccacgtgacgtgaacggtgaactcgtgaagaacagagccgccactgaggaaccctagcgacggcggcgtgctaccggtgacattgtccccctcggtccctcctccatccccgacgcagcggcgccagcctgcaggaagcctattcgagacaaggtcgatctttgctgccttggcgagcttcagccgaatcaaggtcgagcatggcggcaggccagtaaatagagcaacacaaaacccttcaaatcaatggagacctctgcagcaaccccgacccggccgccacaccaggcggccacttccccatcgccatcgccctcgtcgtcgttgaggctgtggaggccagcggcgcagcgcaacatgcgcaatcagtggtcccatctgagcgccgccaaggagcagtggctggccgccgttgctgacggtcgtgcccacgcctccgcgctcgtcaacgtccacctctcctgcaggaacatgccggcgatggatttgggggtgctcaaggatatgccggggatccgcgataaggcgaactccaagttggcgcttagagaggagcaatacagcggcatgcttctgtcggcctacaaggagatggggatggtggaggagccccagtattcaaatggttctccgtattagaatttgagagtcttgcccaggagcttgttcagatgtttgtttcagagcaaaagttgaagaggctgctactcttggaatttctctcgattgctttaaaggaaggtgtagaactccagacatcattaaattggggtgatgaactatatgatggtgaatcaaataaacttcagagtattggccttcagtcaggagatgcctactcaccgcctgaaaattggtgtgcagaacgtttagggagtcagagacctggcaatctccctctgcatgaagttttacaggtttatttaaccacttggcatgctaatatgaacatcaaccggagtagaattggtgaaatatttgagcttgttgaggaggagatgaagattaaactgtcttgaagattccgattcattttgttgggctatccatcaaggaagaagaaatggaaaagaaagatcaatcagttcactattcaccaggattctatatccagtgtctttatctgccttagtagaagccttcagagcttacctatgatcttagaatatagtactggtctccttgtgacccataatttttttaaaaaatttaatgttgggttacactggaatcatattgggaagagcgttggaccaacatatgttattgaaatgagatttctaagttatcaggatcattcgcctagcttcagggtttagatgggcgtcgaggcagcaatcgaggcaaggaggaggcgggggtgggggatgctacaccgaccgtgacgtcgcctactgtcttggaccttctgtgcgccctccttgacaccctcgacgctccacggagctcggaggcggtgaccgtcgaggaggtcggtccctcgaggcgacccggggaaccggttgaaaagtacatcatcccgcctcctatcgttggggcgggtggcgacctcgttcgtgccggatcggacctctcgacatggggagggccgaccctgaggtggatggccaccgagggcaacccctacttcgtccttaatgacacggaggagagggagatgtgggcggagtttcgagcaatggctcaggggcttatggcgaagtccgtggccaagtcgatctccatccgcagcgagcgcgacatatgggccgtgctgcagcgctatcaggccatgttgtgttgcgcaaacgagtagctgacgctgaagagggccgaggcggcgaacctatcgtcgttgtgtgctgagttgaaagacgaggtcgcgactgagcgcgagaaggtgtcgtcgctggaggaggaggtgcgacgcctgagataaggccttcgggtggtgactggtgaacgagacgagtctcggcatcaagccaccgaggcttctcttcaagctgactctcacgaaggacctgggggccgagtggagtacggtccaaggcctaagggcctaaatgggagagctcgaaagggatttggatgctgccattcacacctctaaaactcacccaggccgtcgaccaaaagatggtcgagctgaaggacctgtccgacgcggtggtggagtttggtcgagacctttgcgtcgcggacgttcccttgggtgagtacttgcggagccgcatgcgagccctgagtggctacgtgcggagcgaactccgtgaggccgtccatcttggggtgaagcaagtgttggtcgtagtcgcctcccactatgagattaatctcgagcgggcatgcgaaggctacgtcttgttggacgagcgcaacctcgccgaggccgagatgcagaggctcaccgatgttgtcgaggggtcgggctcagtgtaacaccccgtccaatcccggaccggcggtacttactcctggcagctctctaggatcatttatcatccacacaaaccaacatgggtcttttgtgcgcactttgtcctcactcatgtgcacccgataaaacttcccagtcggtcactaatcctaaattgctccaagccaaacacgcttaacttggaggttcttttgagatatgcttccgaaaaagaagatgtatcttgttggtatggatactctattaattctattaagccttgggccaggatatcaccatctcagggcctaggatatcacaatccacccccttagaagaccgacgtcctcgtcggtcaacctcaatccaggaacctcccctcttagccacatgtgtgtctagtgtcgtcatattccatgccatgtgaccacttagggcccacatgcgccatgtgccatatatccgaaccccctagcccacacacgctcgtgaaacctcaagggtcggctctgataccacttgtaacaccctatccaatccctagaccggcggtacttactcctggcagctctctaggatcatatatcatctccacagaccaacacaagtctttgtgtgcgctttgttctcactcatgcgcacccgagaaaacttcccggtcggtcacttatcccaaattgctccaagccaaacacacttaacttggaggttctttcgaaataggcttccgaaaaagaagatgcaccttgttggtatggatactctattaattctattaagccttcggccaggatatcaccatcctaggggctaggatatcacacttagcattggcgtgccacttcgaggatgaggtggttctgccggtgcagtcccctcctgtcgaatctcactccgctgtggcgcctcccggcgtccccgaggttgacgctgtgcctcataccgcgcagactcttcatttgccctgaggggttataaggaatattttgagttgcgtgtataagtcgtgtattgaacactttgtttttgtatcttgtttatttgctatgttattttttcgcttgttttgtgcccgccgttttgcctttccacagagtcctcatcggaacgtgagttaccttat

SEQ ID NO: 84579 - DNA, 3570 bp, Zea Mays
aaaaccccaccgctgttcgcgtcctcgtttctctcaatctctctcctctcctcgcctctccttggtgtccgtgttcacgccgtcgctagcgcctgccgcggcgaagcttctgccctccccggcgccgggctcgggtcgtcgtcggccaggaagcctattcgagacaaggtcgatctttgctgccttggcgagcttcagccgaatcaaggtcgagcatggcggcaggccagtaaatagagcaacacaaaacccttcaaatcaatggagacctctgcagcaaccccgacccggccgccacaccaggcggccacttccccatcgccatcgccctcgtcgtcgttgaggctgtggaggccagcggcgcagcgcaacatgcgcaatcagtggtcccatctgagcgccgccaaggagcagtggctggccgccgttgctgacggtcgtgcccacgcctccgcgctcgtcaacgtccacctctcctgcaggaacatgccggcgatggatttgggggtgctcaaggatatgccggggatccgcgataaggcgaactccaagttggcgcttagagaggagcaatacagcggcatgcttctgtcggcctacaaggagatgttttctgaccgccaagataatttgaatgattcaggggatggtggaggagccccagtattcaaatggttctccgtattagaatttgagagtcttgcccaggagcttgttcagatgtttgtttcagagcaaaagttgaagaggctgctactcttggaatttctctcgattgctttaaaggaaggtgtagaactccagacatcattaaattggggtgatgaactatatgatggtgaatcaaataaacttcagagtattggccttcagtcaggagatgcctactcaccgcctgaaaattggtgtgcagaacgtttagggagtcagagacctggcaatctccctctgcatgaagttttacaggtttatttaaccacttggcatgctaatatgaacatcaaccggagtagaattggtgaaatatttgagcttgttgaggaggagatgaagattaaactgtcttgaagattccgattcattttgttgggctatccatcaaggaagaagaaatggaaaagaaagatcaatcagttcactattcaccaggattctatatccagtgtctttatctgccttagtagaagccttcagagcttacctatgatcttagaatatagtactggtctccttgtgacccataatttttttaaaaaatttaatgttgggttacactggaatcatattgggaagagcgttggaccaacatatgttattgaaatgagatttctaagttatcaggatcattcgcctagcttcagggtttagatgggcgtcgaggcagcaatcgaggcaaggaggaggcgggggtgggggatgctacaccgaccgtgacgtcgcctactgtcttggaccttctgtgcgccctccttgacaccctcgacgctccacggagctcggaggcggtgaccgtcgaggaggtcggtccctcgaggcgacccggggaaccggttgaaaagtacatcatcccgcctcctatcgttggggcgggtggcgacctcgttcgtgccggatcggacctctcgacatggggagggccgaccctgaggtggatggccaccgagggcaacccctacttcgtccttaatgacacggaggagagggagatgtgggcggagtttcgagcaatggctcaggggcttatggcgaagtccgtggccaagtcgatctccatccgcagcgagcgcgacatatgggccgtgctgcagcgctatcaggccatgttgtgttgcgcaaacgagtagctgacgctgaagagggccgaggcggcgaacctatcgtcgttgtgtgctgagttgaaagacgaggtcgcgactgagcgcgagaaggtgtcgtcgctggaggaggaggtgcgacgcctgagataaggccttcgggtggtgactggtgaacgagacgagtctcggcatcaagccaccgaggcttctcttcaagctgactctcacgaaggacctgggggccgagtggagtacggtccaaggcctaagggcctaaatgggagagctcgaaagggatttggatgctgccattcacacctctaaaactcacccaggccgtcgaccaaaagatggtcgagctgaaggacctgtccgacgcggtggtggagtttggtcgagacctttgcgtcgcggacgttcccttgggtgagtacttgcggagccgcatgcgagccctgagtggctacgtgcggagcgaactccgtgaggccgtccatcttggggtgaagcaagtgttggtcgtagtcgcctcccactatgagattaatctcgagcgggcatgcgaaggctacgtcttgttggacgagcgcaacctcgccgaggccgagatgcagaggctcaccgatgttgtcgaggggtcgggctcagtgtaacaccccgtccaatcccggaccggcggtacttactcctggcagctctctaggatcatttatcatccacacaaaccaacatgggtcttttgtgcgcactttgtcctcactcatgtgcacccgataaaacttcccagtcggtcactaatcctaaattgctccaagccaaacacgcttaacttggaggttcttttgagatatgcttccgaaaaagaagatgtatcttgttggtatggatactctattaattctattaagccttgggccaggatatcaccatctcagggcctaggatatcacaatccacccccttagaagaccgacgtcctcgtcggtcaacctcaatccaggaacctcccctcttagccacatgtgtgtctagtgtcgtcatattccatgccatgtgaccacttagggcccacatgcgccatgtgccatatatccgaaccccctagcccacacacgctcgtgaaacctcaagggtcggctctgataccacttgtaacaccctatccaatccctagaccggcggtacttactcctggcagctctctaggatcatatatcatctccacagaccaacacaagtctttgtgtgcgctttgttctcactcatgcgcacccgagaaaacttcccggtcggtcacttatcccaaattgctccaagccaaacacacttaacttggaggttctttcgaaataggcttccgaaaaagaagatgcaccttgttggtatggatactctattaattctattaagccttcggccaggatatcaccatcctaggggctaggatatcacacttagcattggcgtgccacttcgaggatgaggtggttctgccggtgcagtcccctcctgtcgaatctcactccgctgtggcgcctcccggcgtccccgaggttgacgctgtgcctcataccgcgcagactcttcatttgccctgaggggttataaggaatattttgagttgcgtgtataagtcgtgtattgaacactttgtttttgtatcttgtttatttgctatgttattttttcgcttgttttgtgcccgccgttttgcctttccacagagtcctcatcggaacgtgagttaccttat

SEQ ID NO: 84580 - DNA, 4214 bp, Zea Mays
ctaaaccctaaaaccccaccgctgttcgcgtcctcgtttctctcaatctctctcctctcctcgcctctccttggtgtccgtgttcacgccgtcgctagcgcctgccgcggcgaagcttctgccctccccggcgccgggctcgggtcgtcgtcggccaggcagctgctacgcgtgaacacggtcacaccagtaccacgtgacgtgaacggtgaactcgtgaagaacagagccgccactgaggaaccctagcgacggcggcgtgctaccggtgacattgtccccctcggtccctcctccatccccgacgcagcggcgccagcctgcaggaagcctattcgagacaaggtcgatctttgctgccttggcgagcttcagccgaatcaaggtcgagcatggcggcaggccagtaaatagagcaacacaaaacccttcaaatcaatggagacctctgcagcaaccccgacccggccgccacaccaggcggccacttccccatcgccatcgccctcgtcgtcgttgaggctgtggaggccagcggcgcagcgcaacatgcgcaatcagtggtcccatctgagcgccgccaaggagcagtggctggccgccgttgctgacggtcgtgcccacgcctccgcgctcgtcaacgtccacctctcctgcaggaacatgccggcgatggatttgggggtgctcaaggatatgccggggatccgcgataaggcgaactccaagttggcgcttagagaggagcaatacagcggcatgcttctgtcggcctacaaggagatggggatggtggaggagccccagtattcaaatggttctccgtattagaatttggtgggttaatcatctcttgcttctatggattaagtcaccactatgatctttcgtctgttgggtgtgacaatgatctcctaacccatctatatctgagactactcagagcactatatattctcacatttgaggatgccgatcaatatctgagacagtacacacattcatgtttacatgttttaaatccacatgataaaaatatattatgtttcctttaatcacctcagagagtcttgcccaggagcttgttcagatgtttgtttcagagcaaaagttgaagaggctgctactcttggaatttctctcgattgctttaaaggaaggtgtagaactccagacatcattaaattggggtgatgaactatatgatggtgaatcaaataaacttcagagtattggccttcagtcaggagatgcctactcaccgcctgaaaattggtgtgcagaacgtttagggagtcagagacctggcaatctccctctgcatgaagttttacaggtttatttaaccacttggcatgctaatatgaacatcaaccggagtagaattggtgaaatatttgagcttgttgaggaggagatgaagattaaactgtcttgaagattccgattcattttgttgggctatccatcaaggaagaagaaatggaaaagaaagatcaatcagttcactattcaccaggattctatatccagtgtctttatctgccttagtagaagccttcagagcttacctatgatcttagaatatagtactggtctccttgtgacccataatttttttaaaaaatttaatgttgggttacactggaatcatattgggaagagcgttggaccaacatatgttattgaaatgagatttctaagttatcaggatcattcgcctagcttcaggtttgttctgtgctgttgtagatgtgtattatttacttcattggcctgctgtacagatcttggtgacatgctcgtggaaaacgcatattgcttttagtggtttttttattacgcttatggattgtaggtcttctggttattattatttttattgttattgttgttattattattattattattattattattattattattattattattattattattattattattattattattattattattttgttgttgttgttgttgttgttgttagggtttagatgggcgtcgaggcagcaatcgaggcaaggaggaggcgggggtgggggatgctacaccgaccgtgacgtcgcctactgtcttggaccttctgtgcgccctccttgacaccctcgacgctccacggagctcggaggcggtgaccgtcgaggaggtcggtccctcgaggcgacccggggaaccggttgaaaagtacatcatcccgcctcctatcgttggggcgggtggcgacctcgttcgtgccggatcggacctctcgacatggggagggccgaccctgaggtggatggccaccgagggcaacccctacttcgtccttaatgacacggaggagagggagatgtgggcggagtttcgagcaatggctcaggggcttatggcgaagtccgtggccaagtcgatctccatccgcagcgagcgcgacatatgggccgtgctgcagcgctatcaggccatgttgtgttgcgcaaacgagtagctgacgctgaagagggccgaggcggcgaacctatcgtcgttgtgtgctgagttgaaagacgaggtcgcgactgagcgcgagaaggtgtcgtcgctggaggaggaggtgcgacgcctgagataaggccttcgggtggtgactggtgaacgagacgagtctcggcatcaagccaccgaggcttctcttcaagctgactctcacgaaggacctgggggccgagtggagtacggtccaaggcctaagggcctaaatgggagagctcgaaagggatttggatgctgccattcacacctctaaaactcacccaggccgtcgaccaaaagatggtcgagctgaaggacctgtccgacgcggtggtggagtttggtcgagacctttgcgtcgcggacgttcccttgggtgagtacttgcggagccgcatgcgagccctgagtggctacgtgcggagcgaactccgtgaggccgtccatcttggggtgaagcaagtgttggtcgtagtcgcctcccactatgagattaatctcgagcgggcatgcgaaggctacgtcttgttggacgagcgcaacctcgccgaggccgagatgcagaggctcaccgatgttgtcgaggggtcgggctcagtgtaacaccccgtccaatcccggaccggcggtacttactcctggcagctctctaggatcatttatcatccacacaaaccaacatgggtcttttgtgcgcactttgtcctcactcatgtgcacccgataaaacttcccagtcggtcactaatcctaaattgctccaagccaaacacgcttaacttggaggttcttttgagatatgcttccgaaaaagaagatgtatcttgttggtatggatactctattaattctattaagccttgggccaggatatcaccatctcagggcctaggatatcacaatccacccccttagaagaccgacgtcctcgtcggtcaacctcaatccaggaacctcccctcttagccacatgtgtgtctagtgtcgtcatattccatgccatgtgaccacttagggcccacatgcgccatgtgccatatatccgaaccccctagcccacacacgctcgtgaaacctcaagggtcggctctgataccacttgtaacaccctatccaatccctagaccggcggtacttactcctggcagctctctaggatcatatatcatctccacagaccaacacaagtctttgtgtgcgctttgttctcactcatgcgcacccgagaaaacttcccggtcggtcacttatcccaaattgctccaagccaaacacacttaacttggaggttctttcgaaataggcttccgaaaaagaagatgcaccttgttggtatggatactctattaattctattaagccttcggccaggatatcaccatcctaggggctaggatatcacacttagcattggcgtgccacttcgaggatgaggtggttctgccggtgcagtcccctcctgtcgaatctcactccgctgtggcgcctcccggcgtccccgaggttgacgctgtgcctcataccgcgcagactcttcatttgccctgaggggttataaggaatattttgagttgcgtgtataagtcgtgtattgaacactttgtttttgtatcttgtttatttgctatgttattttttcgcttgttttgtgcccgccgttttgcctttccacagagtcctcatcggaacgtgagttaccttat

SEQ ID NO: 84581 - DNA, 3888 bp, Zea Mays
gatgtaaaaaagtgatacaggtaaaatttagagaaaaccggtgtggctgctgatagcctaaaccctaaaaccccaccgctgttcgcgtcctcgtttctctcaatctctctcctctcctcgcctctccttggtgtccgtgttcacgccgtcgctagcgcctgccgcggcgaagcttctgccctccccggcgccgggctcgggtcgtcgtcggccaggcagctgctacgcgtgaacacggtcacaccagtaccacgtgacgtgaacggtgaactcgtgaagaacagagccgccactgaggaaccctagcgacggcggcgtgctaccggtgacattgtccccctcggtccctcctccatccccgacgcagcggcgccagcctgcaggaagcctattcgagacaaggtcgatctttgctgccttggcgagcttcagccgaatcaaggtcgagcatggcggcaggccagtaaatagagcaacacaaaacccttcaaatcaatggagacctctgcagcaaccccgacccggccgccacaccaggcggccacttccccatcgccatcgccctcgtcgtcgttgaggctgtggaggccagcggcgcagcgcaacatgcgcaatcagtggtcccatctgagcgccgccaaggagcagtggctggccgccgttgctgacggtcgtgcccacgcctccgcgctcgtcaacgtccacctctcctgcaggaacatgccggcgatggatttgggggtgctcaaggatatgccggggatccgcgataaggcgaactccaagttggcgcttagagaggagcaatacagcggcatgcttctgtcggcctacaaggagatggtctgtcagctgtcctacttggttgaagcttcccattctatgcgctgtttttctaaagcggctccaaattgctccatcacacagttttctgaccgccaagataatttgaatgattcaggggatggtggaggagccccagtattcaaatggttctccgtattagaatttgagagtcttgcccaggagcttgttcagatgtttgtttcagagcaaaagttgaagaggctgctactcttggaatttctctcgattgctttaaaggaaggtgtagaactccagacatcattaaattggggtgatgaactatatgatggtgaatcaaataaacttcagagtattggccttcagtcaggagatgcctactcaccgcctgaaaattggtgtgcagaacgtttagggagtcagagacctggcaatctccctctgcatgaagttttacaggtttatttaaccacttggcatgctaatatgaacatcaaccggagtagaattggtgaaatatttgagcttgttgaggaggagatgaagattaaactgtcttgaagattccgattcattttgttgggctatccatcaaggaagaagaaatggaaaagaaagatcaatcagttcactattcaccaggattctatatccagtgtctttatctgccttagtagaagccttcagagcttacctatgatcttagaatatagtactggtctccttgtgacccataatttttttaaaaaatttaatgttgggttacactggaatcatattgggaagagcgttggaccaacatatgttattgaaatgagatttctaagttatcaggatcattcgcctagcttcagggtttagatgggcgtcgaggcagcaatcgaggcaaggaggaggcgggggtgggggatgctacaccgaccgtgacgtcgcctactgtcttggaccttctgtgcgccctccttgacaccctcgacgctccacggagctcggaggcggtgaccgtcgaggaggtcggtccctcgaggcgacccggggaaccggttgaaaagtacatcatcccgcctcctatcgttggggcgggtggcgacctcgttcgtgccggatcggacctctcgacatggggagggccgaccctgaggtggatggccaccgagggcaacccctacttcgtccttaatgacacggaggagagggagatgtgggcggagtttcgagcaatggctcaggggcttatggcgaagtccgtggccaagtcgatctccatccgcagcgagcgcgacatatgggccgtgctgcagcgctatcaggccatgttgtgttgcgcaaacgagtagctgacgctgaagagggccgaggcggcgaacctatcgtcgttgtgtgctgagttgaaagacgaggtcgcgactgagcgcgagaaggtgtcgtcgctggaggaggaggtgcgacgcctgagataaggccttcgggtggtgactggtgaacgagacgagtctcggcatcaagccaccgaggcttctcttcaagctgactctcacgaaggacctgggggccgagtggagtacggtccaaggcctaagggcctaaatgggagagctcgaaagggatttggatgctgccattcacacctctaaaactcacccaggccgtcgaccaaaagatggtcgagctgaaggacctgtccgacgcggtggtggagtttggtcgagacctttgcgtcgcggacgttcccttgggtgagtacttgcggagccgcatgcgagccctgagtggctacgtgcggagcgaactccgtgaggccgtccatcttggggtgaagcaagtgttggtcgtagtcgcctcccactatgagattaatctcgagcgggcatgcgaaggctacgtcttgttggacgagcgcaacctcgccgaggccgagatgcagaggctcaccgatgttgtcgaggggtcgggctcagtgtaacaccccgtccaatcccggaccggcggtacttactcctggcagctctctaggatcatttatcatccacacaaaccaacatgggtcttttgtgcgcactttgtcctcactcatgtgcacccgataaaacttcccagtcggtcactaatcctaaattgctccaagccaaacacgcttaacttggaggttcttttgagatatgcttccgaaaaagaagatgtatcttgttggtatggatactctattaattctattaagccttgggccaggatatcaccatctcagggcctaggatatcacaatccacccccttagaagaccgacgtcctcgtcggtcaacctcaatccaggaacctcccctcttagccacatgtgtgtctagtgtcgtcatattccatgccatgtgaccacttagggcccacatgcgccatgtgccatatatccgaaccccctagcccacacacgctcgtgaaacctcaagggtcggctctgataccacttgtaacaccctatccaatccctagaccggcggtacttactcctggcagctctctaggatcatatatcatctccacagaccaacacaagtctttgtgtgcgctttgttctcactcatgcgcacccgagaaaacttcccggtcggtcacttatcccaaattgctccaagccaaacacacttaacttggaggttctttcgaaataggcttccgaaaaagaagatgcaccttgttggtatggatactctattaattctattaagccttcggccaggatatcaccatcctaggggctaggatatcacacttagcattggcgtgccacttcgaggatgaggtggttctgccggtgcagtcccctcctgtcgaatctcactccgctgtggcgcctcccggcgtccccgaggttgacgctgtgcctcataccgcgcagactcttcatttgccctgaggggttataaggaatattttgagttgcgtgtataagtcgtgtattgaacactttgtttttgtatcttgtttatttgctatgttattttttcgcttgttttgtgcccgccgttttgcctttccacagagtcctcatcggaacgtgagttaccttat

SEQ ID NO: 84582 - DNA, 2082 bp, Zea Mays
aaaaccccaccgctgttcgcgtcctcgtttctctcaatctctctcctctcctcgcctctccttggtgtccgtgttcacgccgtcgctagcgcctgccgcggcgaagcttctgccctccccggcgccgggctcgggtcgtcgtcggccaggaagcctattcgagacaaggtcgatctttgctgccttggcgagcttcagccgaatcaaggtcgagcatggcggcaggccagtaaatagagcaacacaaaacccttcaaatcaatggagacctctgcagcaaccccgacccggccgccacaccaggcggccacttccccatcgccatcgccctcgtcgtcgttgaggctgtggaggccagcggcgcagcgcaacatgcgcaatcagtggtcccatctgagcgccgccaaggagcagtggctggccgccgttgctgacggtcgtgcccacgcctccgcgctcgtcaacgtccacctctcctgcaggaacatgccggcgatggatttgggggtgctcaaggatatgccggggatccgcgataaggcgaactccaagttggcgcttagagaggagcaatacagcggcatgcttctgtcggcctacaaggagatggtctgtcagctgtcctacttggttgaagcttcccattctatgcgctgtttttctaaagcggctccaaattgctccatcacacagttttctgaccgccaagataatttgaatgattcaggggatggtggaggagccccagtattcaaatggttctccgtattagaatttggtgggttaatcatctcttgcttctatggattaagtcaccactatgatctttcgtctgttgggtgtgacaatgatctcctaacccatctatatctgagactactcagagcactatatattctcacatttgaggatgccgatcaatatctgagacagtacacacattcatgtttacatgttttaaatccacatgataaaaatatattatgtttcctttaatcacctcagagagtcttgcccaggagcttgttcagatgtttgtttcagagcaaaagttgaagaggctgctactcttggaatttctctcgattgctttaaaggaaggtgtagaactccagacatcattaaattggggtgatgaactatatgatggtgaatcaaataaacttcagagtattggccttcagtcaggagatgcctactcaccgcctgaaaattggtgtgcagaacgtttagggagtcagagacctggcaatctccctctgcatgaagttttacaggtttatttaaccacttggcatgctaatatgaacatcaaccggagtagaattggtgaaatatttgagcttgttgaggaggagatgaagattaaactgtcttgaagattccgattcattttgttgggctatccatcaaggaagaagaaatggaaaagaaagatcaatcagttcactattcaccaggattctatatccagtgtctttatctgccttagtagaagccttcagagcttacctatgatcttagaatatagtactggtctccttgtgacccataatttttttaaaaaatttaatgttgggttacactggaatcatattgggaagagcgttggaccaacatatgttattgaaatgagatttctaagttatcaggatcattcgcctagcttcagggtttagatgggcgtcgaggcagcaatcgaggcaaggaggaggcgggggtgggggatgctacaccgaccgtgacgtcgcctactgtcttggaccttctgtgcgccctccttgacaccctcgacgctccacggagctcggaggcggtgaccgtcgaggaggtcggtccctcgaggcgacccggggaaccggttgaaaagtacatcatcccgcctcctatcgttggggcgggtggcgacctcgttcgtgccggatcggacctctcgacatggggagggccgaccctgaggtggatggccaccgagggcaacccctacttcgtccttaatgacacggaggagagggagatgtgggcggagtttcgagcaatggctcaggggcttatggcgaagtccgtggccaagtcgatctc

SEQ ID NO: 84583 - DNA, 508 bp, Zea Mays
cagatctcttcggtgtgcagttcaaagatgttgctattgctgcgatggggccgatccaaggacttccagactacaactggttcagacgccggacctacatgctccgttactagattaatcagccggtgtacccatgtttaccgtctgcaaaagacaagataaaatttgcctcttttagcgtcagtatattaaggcctcagcactgcacattacgtgctgcgatggaggaattttttgagaatttgttttatttcttgtcgtgtccaaaatccacaaatctgtcaataatgataggcaggttcgactgacgtggctgacttggttggccaccggatgttttcttacaacgagtcatgaaccataccgtcccatcttttgttggaagattttactttggcaaataattttgtggcacgttatatgtaaagatggtacagttttagcttcattgtccacaaatcttgttttgaacgattattgtcgtgtatttagtcaatttcctggcgtt

SEQ ID NO: 84584 - DNA, 2341 bp, Zea Mays
aactcgcacagctattcgaacgcctcgggcggagcgcctaggacgaactagccgttaacctccgggctccagcctccaacgttcccttttcgcatcgccctgccggctgccgctcgcccttttctctgtttcccaattcccatacgcatggaaacatctcgtcgacccaaacccatccacccacaaggcggaatacacgatccagtccgatcctcgccccgcgcgctgctccaaaccctggcgatgtcgacggcggcggccgcgaagactccgatcaaggccctgggctccgcggccgcgggtgccatgactccgaccaaatctcaggcccccgcggcggccaagacgccctgtacctctcgcgcgcggtcctcccacgcatccgagaattccaaccccaacatcccgggcacgccgcctcccccgcagtcgacgccgtccaagcccagcctcaagtccccggcgggcgcgggagccaggtccgccaccgcgaagaaaaagccctccacgcccgcgcccgccgcgccaccgctggagcgggagcgggagcggcgattcctcgtggcgaagaagggcgcgcggcggaggcgcaacgtcgggaccatgggaggcggcgggggcggccgcgggggagagatcgacttcgacaagtgccgcgaggccgctcgcgaggcgctgcgcgcgtcgcagggggagttcttccgcaaggaggtcgccgcatccacagccaccggagaggatcaattgggacaggaggaggaggggaagccgctggctgacgaggatgtgaaaggtggagcattcgaggagcggcaggaggaggagaccgacgcggagctggaggggagcagcaaggttagggcgatgaggacgaaggcgatggctaaggcgatgagcagcgttccgaatcctggctctggccgcgtcaagcatatggtgcaggccttcgagagcctgctcaacatctccggcgccacctccgatgctgaaagggccggtgagggctcatgggcgctgcccgggttgcagctatggaaggaggatgataagggtgatctggggttcccaccagtgtcggtgttctcttctgctgatttccagaatgcagggtctaatcgactctgctcgtcactagatggaaacaccgtcaggtcgagctgggacagcagaacatcgactggcgagtgcagcaggagaaattcatctgagtcactaaggagcagaacatcggctggcgggcgcagaagcaggagaaactcatctgagtcactaaggagcagctggaacaaaaagctcaaggtcaccagccagcatccattcaagttgaggacagagcaaaggggaaagtttaaggaacagcagttcgtccaaaaggtgcaagagatgcttgcagaggaagagaagaagcgtattcatattgcgcaaggattgccatggactaccgatgaacccgagcctgcagtcaaagaaagaactgagccgatagaccttgttttgcatagcgatgtgcgtgctcttgaacgtgcagaatttgatcagcacgttttggataggaacaagtttgctgagcaacaaagattagaatgggaaaggcaacaggaattagacgaagaagaaaggataaggcaactgaggagaaccgagctgattcctaaagctcagcccatgccatactttgaccgcccattcatccccaaaaggtccacaaaacctcctacagttcccatggaaccgaaattctacctcaggccagaaaagttatcctgcaatgtatggaacttggaaagctgaatccacaacatcagtgccaacatccgctgtggcaatcgagaaatgcagagcatcgacacacatgatccaacaactgtttccatttcctggcatcgtcttattcattcttgattcgtcttcttccatgtgcgaagaaattgctatcaagcgtgtttttgtagctttgcttggatcgccttgcctccaagttctgttaatcgctggctctgtgcttcagatgcaatcccaccgaggtttgaaatttgtcgttcaagaaactgataaggaaattcaaggatgaattttctgtggtatattaatatgtactttaatgttggttcttgcccgctatgcatgagcccggcagtcccagtgtgcttttatatggtagtttctatttgtgcttaagtatataatataagagaaaaatatgttgtatatgagtttagaaccaacaattatggttcgaacctttatgtctgcatggttttggcatttaactatgagttagcacaatggccatagaaaccgtgaaactagagaaactggtgttttaatatagtagatagag

SEQ ID NO: 84585 - DNA, 2356 bp, Zea Mays
aactcgcacagctattcgaacgcctcgggcggagcgcctaggacgaactagccgttaacctccgggctccagcctccaacgttcccttttcgcatcgccctgccggctgccgctcgcccttttctctgtttcccaattcccatacgcatggaaacatctcgtcgacccaaacccatccacccacaaggcggaatacacgatccagtccgatcctcgccccgcgcgctgctccaaaccctggcgatgtcgacggcggcggccgcgaagactccgatcaaggccctgggctccgcggccgcgggtgccatgactccgaccaaatctcaggcccccgcggcggccaagacgccctgtacctctcgcgcgcggtcctcccacgcatccgagaattccaaccccaacatcccgggcacgccgcctcccccgcagtcgacgccgtccaagcccagcctcaagtccccggcgggcgcgggagccaggtccgccaccgcgaagaaaaagccctccacgcccgcgcccgccgcgccaccgctggagcgggagcgggagcggcgattcctcgtggcgaagaagggcgcgcggcggaggcgcaacgtcgggaccatgggaggcggcgggggcggccgcgggggagagatcgacttcgacaagtgccgcgaggccgctcgcgaggcgctgcgcgcgtcgcagggggagttcttccgcaaggaggtcgccgcatccacagccaccggagaggatcaattgggacaggaggaggaggggaagccgctggctgacgaggatgtgaaaggtggagcattcgaggagcggcaggaggaggagaccgacgcggagctggaggggagcagcaaggttagggcgatgaggacgaaggcgatggctaaggcgatgagcagcgttccgaatcctggctctggccgcgtcaagcatatggtgcaggccttcgagagcctgctcaacatctccggcgccacctccgatgctgaaagggccggtgagggctcatgggcgctgcccgggttgcagctatggaaggaggatgataagggtgatctggggttcccaccagtgtcggtgttctcttctgctgatttccagaatgcagggtctaatcgactctgctcgtcactagatggaaacaccgtcaggtcgagctgggacagcagaacatcgactggcgagtgcagcaggagaaattcatctgagtcactaaggagcagaacatcggctggcgggcgcagaagcaggagaaaccagtcatctgagtcactaaggagcagctggaacaaaaagctcaaggtcaccagccagcatccattcaagttgaggacagagcaaaggggaaagtttaaggaacagcagttcgtccaaaaggtgcaagagatgcttgcagaggaagagaagaagcgtattcatattgcgcaaggattgccatggactaccgatgaacccgagtgtttgataaagcctgcagtcaaagaaagaactgagccgatagaccttgttttgcatagcgatgtgcgtgctcttgaacgtgcagaatttgatcagcacgttttggataggaacaagtttgctgagcaacaaagattagaatgggaaaggcaacaggaattagacgaagaagaaaggataaggcaactgaggagaaccgagctgattcctaaagctcagcccatgccatactttgaccgcccattcatccccaaaaggtccacaaaacctcctacagttcccatggaaccgaaattctacctcaggccagaaaagttatcctgcaatgtatggaacttggaaagctgaatccacaacatcagtgccaacatccgctgtggcaatcgagaaatgcagagcatcgacacacatgatccaacaactgtttccatttcctggcatcgtcttattcattcttgattcgtcttcttccatgtgcgaagaaattgctatcaagcgtgtttttgtagctttgcttggatcgccttgcctccaagttctgttaatcgctggctctgtgcttcagatgcaatcccaccgaggtttgaaatttgtcgttcaagaaactgataaggaaattcaaggatgaattttctgtggtatattaatatgtactttaatgttggttcttgcccgctatgcatgagcccggcagtcccagtgtgcttttatatggtagtttctatttgtgcttaagtatataatataagagaaaaatatgttgtatatgagtttagaaccaacaattatggttcgaacctttatgtctgcatggttttggcatttaactatgagttagcacaatggccatagaaaccgtgaaactagagaaactggtgttttaatatagtagatagag

SEQ ID NO: 84586 - DNA, 2416 bp, Zea Mays
ttttcttttcccgtttttataaataaatcagcccgaaaaaaggacgcggtcgtggaccgaacaaacctttccccaaaatttccccttccccgcacaccgaacgaactctcgatctgatccctatccttgcagggcccgcctcggctcaccgatccggccccggatccgctcgtcgctcgacgggatctctcgattggtaccagctttgccccctctctttgattccgtaggttcacgagttagggtttgcttgtgtgggtttcgggcctcgatttgctcaattgaggacggattttgcacggggcgtcggatctatgcgtgtcctgtatgttgtacctaggattgttgccaattctcccgtcaattttgcgtgatttttctggttgtcggatgaggggttagggtttcgttcggtccagaggtgttggactcctattcgcgcattcgttagggcttcatgccgcgatatccgagcctcttgcttgaattagttattgcatgaacattgaacagaaacgttgttatgtaacttactggttatagacggcaattcatctgtgcccttcatcatggtagttgaatatggactgtaattcattattttattctaccctctcagtagtttagacaagcatgctgcatcaggagaacagtgagccgttcgtgaggcaccactctgagcagcttgcgtgtggcaacatgaggggagcagataatggtcgtccgaatttccttcctgagaagtgccagattgcagtcacaattggtgccaagtggtgtcaaggaaacaccaatagtggatcaaaacaagagacctgcatccagtgacatgcttgacatagttgaatgcaaacgtctgaagcaggaaggtcaaaaggattttcatgagtaccccacatacacgacttgcagaagaagctttgactcaccactatctgagagcgaggatagtgaagatgaaggccattttgtggaagaactgaagaaggcgaaagtgtcaagtggatcagaaacggtgttgtgccaatgcctgatactggtgcatcgtctttggtgttggaacctgttcactgcaaggcagactgtgagtgtcatgatgaaggttcaatcatttgtgtgaaaaagcatgtgagggaagcaagagaaaagctgaagggttctgttggtgcagacaccttcagggagttgggtttgaatgatatgggtgaagaggttggctcaaggtggacagaagaggaggaacatttgttccagcaggttgtcttgtcaaaccctgcttctctgtgcagaaacttttgggatgaactccctcttgccttcccttccaagtccagcaaagaactagtgagctactacttcaatgtattcatgttgaggaagagggctgagcagaacagatttgacccagtgaacatcgacagtgatgatgacgaatggcaggcaggtgacgatggtgagtatccaatcacaggaagaactgatgaatacttgccaactgagtctcttactgatcaagatgatgttgcatgcaatccagttcctttagaaagggatctctatgaagattctgatgatgaggatgagctggacaatgccagtggagacaggcataatggtgcccagagggctggtatgttgtcagagggtaatcgtgtaatgtcggtcatagaacataatcaacagacgttcaagttagatgcagaggcgcaagacgactcttgcacatcatttgaggctcatcaggttggtgttgaaggtgggacacatactgatattgctgatgacaatcattacaggagtgacggctttggtggtggtgcagaacatgggttcttcggtaatcagtgtgacacaaaagagtgggacttcggtctcagtatcggttgggaaaagcatgattttttgtcaacaaacaatgtcatagaagaggtgttcgggaagtgctgtgacactgctgaccaggaccttatctgagccagacgcggaggcttcttgtcagctgcgaaaactttagggttctctgaattgtacagcagtagttggctattttgatttaatgcctcacttgttcttacaggaatctcatctctgtccttggaacatcatctgcttgtgatttcgtcacatgattaatgtaaatccgtagtctgttgatagcctgtggaatgtatgtatcatctttgttgtgacggtgtctcttgacctgagcgttttttctatgtgctagcgagggtcatgtaataaaagctgttgttgttccttgaccctgtctgcaaataaatgtaacctgccagtcaatgtattccgaaaggtcatttttatctgatctgaaatctgtagtcgtttccgcggctcgttcgtcgtttagtgtcattagtgtattctcgttatggtagccattccgcgggccatcagc

SEQ ID NO: 84587 - DNA, 2269 bp, Zea Mays
ttttcttttcccgtttttataaataaatcagcccgaaaaaaggacgcggtcgtggaccgaacaaacctttccccaaaatttccccttccccgcacaccgaacgaactctcgatctgatccctatccttgcagggcccgcctcggctcaccgatccggccccggatccgctcgtcgctcgacgggatctctcgattgtagtttagacaagcatgctgcatcaggagaacagtgagccgttcgtgaggcaccactctgagcagcttgcgtgtggcaacatgaggggagcagataatggtcgtccgaatttccttcctgagaagtgccagattgcagtttgtcctgaagtttgccagaggggtgaaaaagttagcctatttgatgaagggctgatacatggtgttgatctaaccaatcatattgctcagtcacaattggtgccaagtggtgtcaaggaaacaccaatagtggatcaaaacaagagacctgcatccagtgacatgcttgacatagttgaatgcaaacgtctgaagcaggaaggtcaaatcgtaactaaggaagacaaccatacatctgcagaggattttcatgagtaccccacatacacgacttgcagaagaagctttgactcaccactatctgagagcgaggatagtgaagatgaaggtgtagattcacctctccatttttcacatgctcacacctatgttgaagatgatctatggcctgccagctttcatcatgctctgggcccttttcccttgaggaaacctgttcctatcgggccaaatcatcaggctgaattacctgagtgcaggccattttgtggaagaactgaagaaggcgaaagtgtcaagtggatcagaaacggtgttgtgccaatgcctgatactggtgcatcgtctttggtgttggaacctgttcactgcaaggcagactgtgagtgtcatgatgaaggttcaatcatttgtgtgaaaaagcatgtgagggaagcaagagaaaagctgaagggttctgttggtgcagacaccttcagggagttgggtttgaatgatatgggtgaagaggttggctcaaggtggacagaagaggaggaacatttgttccagcaggttgtcttgtcaaaccctgcttctctgtgcagaaacttttgggatgaactccctcttgccttcccttccaagtccagcaaagaactagtgagctactacttcaatgtattcatgttgaggaagagggctgagcagaacagatttgacccagtgaacatcgacagtgatgatgacgaatggcaggcaggtgacgatggtgagtatccaatcacaggaagaactgatgaatacttgccaactgagtctcttactgatcaagatgatgttgcatgcaatccagttcctttagaaagggatctctatgaagattctgatgatgaggatgagctggacaatgccagtggagacaggcataatggtgcccagagggctggtatgttgtcagagggtaatcgtgtaatgtcggtcatagaacataatcaacagacgttcaagttagatgcagaggcgcaagacgactcttgcacatcatttgaggctcatcaggttggtgttgaaggtgggacacatactgatattgctgatgacaatcattacaggagtgacggctttggtggtggtgcagaacatgggttcttcggtaatcagtgtgacacaaaagagtgggacttcggtctcagtatcggttgggaaaagcatgattttttgtcaacaaacaatgtcatagaagaggtgttcgggaagtgctgtgacactgctgaccaggaccttatctgagccagacgcggaggcttcttgtcagctgcgaaaactttagggttctctgaattgtacagcagtagttggctattttgatttaatgcctcacttgttcttacaggaatctcatctctgtccttggaacatcatctgcttgtgatttcgtcacatgattaatgtaaatccgtagtctgttgatagcctgtggaatgtatgtatcatctttgttgtgacggtgtctcttgacctgagcgttttttctatgtgctagcgagggtcatgtaataaaagctgttgttgttccttgaccctgtctgcaaataaatgtaacctgccagtcaatgtattccgaaaggtcatttttatctgatctgaaatctgtagtcgtttccgcggctcgttcgtcgtttagtgtcattagtgtattctcgttatggtagccattccgcgggccatcagc

SEQ ID NO: 84588 - DNA, 2141 bp, Zea Mays
ttttcttttcccgtttttataaataaatcagcccgaaaaaaggacgcggtcgtggaccgaacaaacctttccccaaaatttccccttccccgcacaccgaacgaactctcgatctgatccctatccttgcagggcccgcctcggctcaccgatccggccccggatccgctcgtcgctcgacgggatctctcgattgtttagacaagcatgctgcatcaggagaacagtgagccgttcgtgaggcaccactctgagcagcttgcgtgtggcaacatgaggggagcagataatggtcgtccgaatttccttcctgagaagtgccagattgcagtcacaattggtgccaagtggtgtcaaggaaacaccaatagtggatcaaaacaagagacctgcatccagtgacatgcttgacatagttgaatgcaaacgtctgaagcaggaaggtcaaaaggattttcatgagtaccccacatacacgacttgcagaagaagctttgactcaccactatctgagagcgaggatagtgaagatgaaggtgtagattcacctctccatttttcacatgctcacacctatgttgaagatgatctatggcctgccagctttcatcatgctctgggcccttttcccttgaggaaacctgttcctatcgggccaaatcatcaggctgaattacctgagtgcaggccattttgtggaagaactgaagaaggcgaaagtgtcaagtggatcagaaacggtgttgtgccaatgcctgatactggtgcatcgtctttggtgttggaacctgttcactgcaaggcagactgtgagtgtcatgatgaaggttcaatcatttgtgtgaaaaagcatgtgagggaagcaagagaaaagctgaagggttctgttggtgcagacaccttcagggagttgggtttgaatgatatgggtgaagaggttggctcaaggtggacagaagaggaggaacatttgttccagcaggttgtcttgtcaaaccctgcttctctgtgcagaaacttttgggatgaactccctcttgccttcccttccaagtccagcaaagaactagtgagctactacttcaatgtattcatgttgaggaagagggctgagcagaacagatttgacccagtgaacatcgacagtgatgatgacgaatggcaggcaggtgacgatggtgagtatccaatcacaggaagaactgatgaatacttgccaactgagtctcttactgatcaagatgatgttgcatgcaatccagttcctttagaaagggatctctatgaagattctgatgatgaggatgagctggacaatgccagtggagacaggcataatggtgcccagagggctggtatgttgtcagagggtaatcgtgtaatgtcggtcatagaacataatcaacagacgttcaagttagatgcagaggcgcaagacgactcttgcacatcatttgaggctcatcaggttggtgttgaaggtgggacacatactgatattgctgatgacaatcattacaggagtgacggctttggtggtggtgcagaacatgggttcttcggtaatcagtgtgacacaaaagagtgggacttcggtctcagtatcggttgggaaaagcatgattttttgtcaacaaacaatgtcatagaagaggtgttcgggaagtgctgtgacactgctgaccaggaccttatctgagccagacgcggaggcttcttgtcagctgcgaaaactttagggttctctgaattgtacagcagtagttggctattttgatttaatgcctcacttgttcttacaggaatctcatctctgtccttggaacatcatctgcttgtgatttcgtcacatgattaatgtaaatccgtagtctgttgatagcctgtggaatgtatgtatcatctttgttgtgacggtgtctcttgacctgagcgttttttctatgtgctagcgagggtcatgtaataaaagctgttgttgttccttgaccctgtctgcaaataaatgtaacctgccagtcaatgtattccgaaaggtcatttttatctgatctgaaatctgtagtcgtttccgcggctcgttcgtcgtttagtgtcattagtgtattctcgttatggtagccattccgcgggccatcagc

SEQ ID NO: 84589 - DNA, 2177 bp, Zea Mays
ttttcttttcccgtttttataaataaatcagcccgaaaaaaggacgcggtcgtggaccgaacaaacctttccccaaaatttccccttccccgcacaccgaacgaactctcgatctgatccctatccttgcagggcccgcctcggctcaccgatccggccccggatccgctcgtcgctcgacgggatctctcgattgtagtttagacaagcatgctgcatcaggagaacagtgagccgttcgtgaggcaccactctgagcagcttgcgtgtggcaacatgaggggagcagataatggtcgtccgaatttccttcctgagaagtgccagattgcagtcacaattggtgccaagtggtgtcaaggaaacaccaatagtggatcaaaacaagagacctgcatccagtgacatgcttgacatagttgaatgcaaacgtctgaagcaggaaggtcaaatcgtaactaaggaagacaaccatacatctgcagaggattttcatgagtaccccacatacacgacttgcagaagaagctttgactcaccactatctgagagcgaggatagtgaagatgaaggtgtagattcacctctccatttttcacatgctcacacctatgttgaagatgatctatggcctgccagctttcatcatgctctgggcccttttcccttgaggaaacctgttcctatcgggccaaatcatcaggctgaattacctgagtgcaggccattttgtggaagaactgaagaaggcgaaagtgtcaagtggatcagaaacggtgttgtgccaatgcctgatactggtgcatcgtctttggtgttggaacctgttcactgcaaggcagactgtgagtgtcatgatgaaggttcaatcatttgtgtgaaaaagcatgtgagggaagcaagagaaaagctgaagggttctgttggtgcagacaccttcagggagttgggtttgaatgatatgggtgaagaggttggctcaaggtggacagaagaggaggaacatttgttccagcaggttgtcttgtcaaaccctgcttctctgtgcagaaacttttgggatgaactccctcttgccttcccttccaagtccagcaaagaactagtgagctactacttcaatgtattcatgttgaggaagagggctgagcagaacagatttgacccagtgaacatcgacagtgatgatgacgaatggcaggcaggtgacgatggtgagtatccaatcacaggaagaactgatgaatacttgccaactgagtctcttactgatcaagatgatgttgcatgcaatccagttcctttagaaagggatctctatgaagattctgatgatgaggatgagctggacaatgccagtggagacaggcataatggtgcccagagggctggtatgttgtcagagggtaatcgtgtaatgtcggtcatagaacataatcaacagacgttcaagttagatgcagaggcgcaagacgactcttgcacatcatttgaggctcatcaggttggtgttgaaggtgggacacatactgatattgctgatgacaatcattacaggagtgacggctttggtggtggtgcagaacatgggttcttcggtaatcagtgtgacacaaaagagtgggacttcggtctcagtatcggttgggaaaagcatgattttttgtcaacaaacaatgtcatagaagaggtgttcgggaagtgctgtgacactgctgaccaggaccttatctgagccagacgcggaggcttcttgtcagctgcgaaaactttagggttctctgaattgtacagcagtagttggctattttgatttaatgcctcacttgttcttacaggaatctcatctctgtccttggaacatcatctgcttgtgatttcgtcacatgattaatgtaaatccgtagtctgttgatagcctgtggaatgtatgtatcatctttgttgtgacggtgtctcttgacctgagcgttttttctatgtgctagcgagggtcatgtaataaaagctgttgttgttccttgaccctgtctgcaaataaatgtaacctgccagtcaatgtattccgaaaggtcatttttatctgatctgaaatctgtagtcgtttccgcggctcgttcgtcgtttagtgtcattagtgtattctcgttatggtagccattccgcgggccatcagc

SEQ ID NO: 84590 - DNA, 2118 bp, Zea Mays
ttttcttttcccgtttttataaataaatcagcccgaaaaaaggacgcggtcgtggaccgaacaaacctttccccaaaatttccccttccccgcacaccgaacgaactctcgatctgatccctatccttgcagggcccgcctcggctcaccgatccggccccggatccgctcgtcgctcgacgggatctctcgattggagaacagtgagccgttcgtgaggcaccactctgagcagcttgcgtgtggcaacatgaggggagcagataatggtcgtccgaatttccttcctgagaagtgccagattgcagtcacaattggtgccaagtggtgtcaaggaaacaccaatagtggatcaaaacaagagacctgcatccagtgacatgcttgacatagttgaatgcaaacgtctgaagcaggaaggtcaaaaggattttcatgagtaccccacatacacgacttgcagaagaagctttgactcaccactatctgagagcgaggatagtgaagatgaaggtgtagattcacctctccatttttcacatgctcacacctatgttgaagatgatctatggcctgccagctttcatcatgctctgggcccttttcccttgaggaaacctgttcctatcgggccaaatcatcaggctgaattacctgagtgcaggccattttgtggaagaactgaagaaggcgaaagtgtcaagtggatcagaaacggtgttgtgccaatgcctgatactggtgcatcgtctttggtgttggaacctgttcactgcaaggcagactgtgagtgtcatgatgaaggttcaatcatttgtgtgaaaaagcatgtgagggaagcaagagaaaagctgaagggttctgttggtgcagacaccttcagggagttgggtttgaatgatatgggtgaagaggttggctcaaggtggacagaagaggaggaacatttgttccagcaggttgtcttgtcaaaccctgcttctctgtgcagaaacttttgggatgaactccctcttgccttcccttccaagtccagcaaagaactagtgagctactacttcaatgtattcatgttgaggaagagggctgagcagaacagatttgacccagtgaacatcgacagtgatgatgacgaatggcaggcaggtgacgatggtgagtatccaatcacaggaagaactgatgaatacttgccaactgagtctcttactgatcaagatgatgttgcatgcaatccagttcctttagaaagggatctctatgaagattctgatgatgaggatgagctggacaatgccagtggagacaggcataatggtgcccagagggctggtatgttgtcagagggtaatcgtgtaatgtcggtcatagaacataatcaacagacgttcaagttagatgcagaggcgcaagacgactcttgcacatcatttgaggctcatcaggttggtgttgaaggtgggacacatactgatattgctgatgacaatcattacaggagtgacggctttggtggtggtgcagaacatgggttcttcggtaatcagtgtgacacaaaagagtgggacttcggtctcagtatcggttgggaaaagcatgattttttgtcaacaaacaatgtcatagaagaggtgttcgggaagtgctgtgacactgctgaccaggaccttatctgagccagacgcggaggcttcttgtcagctgcgaaaactttagggttctctgaattgtacagcagtagttggctattttgatttaatgcctcacttgttcttacaggaatctcatctctgtccttggaacatcatctgcttgtgatttcgtcacatgattaatgtaaatccgtagtctgttgatagcctgtggaatgtatgtatcatctttgttgtgacggtgtctcttgacctgagcgttttttctatgtgctagcgagggtcatgtaataaaagctgttgttgttccttgaccctgtctgcaaataaatgtaacctgccagtcaatgtattccgaaaggtcatttttatctgatctgaaatctgtagtcgtttccgcggctcgttcgtcgtttagtgtcattagtgtattctcgttatggtagccattccgcgggccatcagc

SEQ ID NO: 84591 - DNA, 2110 bp, Zea Mays
ttttcttttcccgtttttataaataaatcagcccgaaaaaaggacgcggtcgtggaccgaacaaacctttccccaaaatttccccttccccgcacaccgaacgaactctcgatctgatccctatccttgcagggcccgcctcggctcaccgatccggccccggatccgctcgtcgctcgacgggatctctcgattgtgagccgttcgtgaggcaccactctgagcagcttgcgtgtggcaacatgaggggagcagataatggtcgtccgaatttccttcctgagaagtgccagattgcagtcacaattggtgccaagtggtgtcaaggaaacaccaatagtggatcaaaacaagagacctgcatccagtgacatgcttgacatagttgaatgcaaacgtctgaagcaggaaggtcaaaaggattttcatgagtaccccacatacacgacttgcagaagaagctttgactcaccactatctgagagcgaggatagtgaagatgaaggtgtagattcacctctccatttttcacatgctcacacctatgttgaagatgatctatggcctgccagctttcatcatgctctgggcccttttcccttgaggaaacctgttcctatcgggccaaatcatcaggctgaattacctgagtgcaggccattttgtggaagaactgaagaaggcgaaagtgtcaagtggatcagaaacggtgttgtgccaatgcctgatactggtgcatcgtctttggtgttggaacctgttcactgcaaggcagactgtgagtgtcatgatgaaggttcaatcatttgtgtgaaaaagcatgtgagggaagcaagagaaaagctgaagggttctgttggtgcagacaccttcagggagttgggtttgaatgatatgggtgaagaggttggctcaaggtggacagaagaggaggaacatttgttccagcaggttgtcttgtcaaaccctgcttctctgtgcagaaacttttgggatgaactccctcttgccttcccttccaagtccagcaaagaactagtgagctactacttcaatgtattcatgttgaggaagagggctgagcagaacagatttgacccagtgaacatcgacagtgatgatgacgaatggcaggcaggtgacgatggtgagtatccaatcacaggaagaactgatgaatacttgccaactgagtctcttactgatcaagatgatgttgcatgcaatccagttcctttagaaagggatctctatgaagattctgatgatgaggatgagctggacaatgccagtggagacaggcataatggtgcccagagggctggtatgttgtcagagggtaatcgtgtaatgtcggtcatagaacataatcaacagacgttcaagttagatgcagaggcgcaagacgactcttgcacatcatttgaggctcatcaggttggtgttgaaggtgggacacatactgatattgctgatgacaatcattacaggagtgacggctttggtggtggtgcagaacatgggttcttcggtaatcagtgtgacacaaaagagtgggacttcggtctcagtatcggttgggaaaagcatgattttttgtcaacaaacaatgtcatagaagaggtgttcgggaagtgctgtgacactgctgaccaggaccttatctgagccagacgcggaggcttcttgtcagctgcgaaaactttagggttctctgaattgtacagcagtagttggctattttgatttaatgcctcacttgttcttacaggaatctcatctctgtccttggaacatcatctgcttgtgatttcgtcacatgattaatgtaaatccgtagtctgttgatagcctgtggaatgtatgtatcatctttgttgtgacggtgtctcttgacctgagcgttttttctatgtgctagcgagggtcatgtaataaaagctgttgttgttccttgaccctgtctgcaaataaatgtaacctgccagtcaatgtattccgaaaggtcatttttatctgatctgaaatctgtagtcgtttccgcggctcgttcgtcgtttagtgtcattagtgtattctcgttatggtagccattccgcgggccatcagc

SEQ ID NO: 84592 - DNA, 2144 bp, Zea Mays
ttttcttttcccgtttttataaataaatcagcccgaaaaaaggacgcggtcgtggaccgaacaaacctttccccaaaatttccccttccccgcacaccgaacgaactctcgatctgatccctatccttgcagggcccgcctcggctcaccgatccggccccggatccgctcgtcgctcgacgggatctctcgattgtagtttagacaagcatgctgcatcaggagaacagtgagccgttcgtgaggcaccactctgagcagcttgcgtgtggcaacatgaggggagcagataatggtcgtccgaatttccttcctgagaagtgccagattgcagtcacaattggtgccaagtggtgtcaaggaaacaccaatagtggatcaaaacaagagacctgcatccagtgacatgcttgacatagttgaatgcaaacgtctgaagcaggaaggtcaaaaggattttcatgagtaccccacatacacgacttgcagaagaagctttgactcaccactatctgagagcgaggatagtgaagatgaaggtgtagattcacctctccatttttcacatgctcacacctatgttgaagatgatctatggcctgccagctttcatcatgctctgggcccttttcccttgaggaaacctgttcctatcgggccaaatcatcaggctgaattacctgagtgcaggccattttgtggaagaactgaagaaggcgaaagtgtcaagtggatcagaaacggtgttgtgccaatgcctgatactggtgcatcgtctttggtgttggaacctgttcactgcaaggcagactgtgagtgtcatgatgaaggttcaatcatttgtgtgaaaaagcatgtgagggaagcaagagaaaagctgaagggttctgttggtgcagacaccttcagggagttgggtttgaatgatatgggtgaagaggttggctcaaggtggacagaagaggaggaacatttgttccagcaggttgtcttgtcaaaccctgcttctctgtgcagaaacttttgggatgaactccctcttgccttcccttccaagtccagcaaagaactagtgagctactacttcaatgtattcatgttgaggaagagggctgagcagaacagatttgacccagtgaacatcgacagtgatgatgacgaatggcaggcaggtgacgatggtgagtatccaatcacaggaagaactgatgaatacttgccaactgagtctcttactgatcaagatgatgttgcatgcaatccagttcctttagaaagggatctctatgaagattctgatgatgaggatgagctggacaatgccagtggagacaggcataatggtgcccagagggctggtatgttgtcagagggtaatcgtgtaatgtcggtcatagaacataatcaacagacgttcaagttagatgcagaggcgcaagacgactcttgcacatcatttgaggctcatcaggttggtgttgaaggtgggacacatactgatattgctgatgacaatcattacaggagtgacggctttggtggtggtgcagaacatgggttcttcggtaatcagtgtgacacaaaagagtgggacttcggtctcagtatcggttgggaaaagcatgattttttgtcaacaaacaatgtcatagaagaggtgttcgggaagtgctgtgacactgctgaccaggaccttatctgagccagacgcggaggcttcttgtcagctgcgaaaactttagggttctctgaattgtacagcagtagttggctattttgatttaatgcctcacttgttcttacaggaatctcatctctgtccttggaacatcatctgcttgtgatttcgtcacatgattaatgtaaatccgtagtctgttgatagcctgtggaatgtatgtatcatctttgttgtgacggtgtctcttgacctgagcgttttttctatgtgctagcgagggtcatgtaataaaagctgttgttgttccttgaccctgtctgcaaataaatgtaacctgccagtcaatgtattccgaaaggtcatttttatctgatctgaaatctgtagtcgtttccgcggctcgttcgtcgtttagtgtcattagtgtattctcgttatggtagccattccgcgggccatcagc

SEQ ID NO: 84593 - DNA, 2266 bp, Zea Mays
ttttcttttcccgtttttataaataaatcagcccgaaaaaaggacgcggtcgtggaccgaacaaacctttccccaaaatttccccttccccgcacaccgaacgaactctcgatctgatccctatccttgcagggcccgcctcggctcaccgatccggccccggatccgctcgtcgctcgacgggatctctcgattgtttagacaagcatgctgcatcaggagaacagtgagccgttcgtgaggcaccactctgagcagcttgcgtgtggcaacatgaggggagcagataatggtcgtccgaatttccttcctgagaagtgccagattgcagtttgtcctgaagtttgccagaggggtgaaaaagttagcctatttgatgaagggctgatacatggtgttgatctaaccaatcatattgctcagtcacaattggtgccaagtggtgtcaaggaaacaccaatagtggatcaaaacaagagacctgcatccagtgacatgcttgacatagttgaatgcaaacgtctgaagcaggaaggtcaaatcgtaactaaggaagacaaccatacatctgcagaggattttcatgagtaccccacatacacgacttgcagaagaagctttgactcaccactatctgagagcgaggatagtgaagatgaaggtgtagattcacctctccatttttcacatgctcacacctatgttgaagatgatctatggcctgccagctttcatcatgctctgggcccttttcccttgaggaaacctgttcctatcgggccaaatcatcaggctgaattacctgagtgcaggccattttgtggaagaactgaagaaggcgaaagtgtcaagtggatcagaaacggtgttgtgccaatgcctgatactggtgcatcgtctttggtgttggaacctgttcactgcaaggcagactgtgagtgtcatgatgaaggttcaatcatttgtgtgaaaaagcatgtgagggaagcaagagaaaagctgaagggttctgttggtgcagacaccttcagggagttgggtttgaatgatatgggtgaagaggttggctcaaggtggacagaagaggaggaacatttgttccagcaggttgtcttgtcaaaccctgcttctctgtgcagaaacttttgggatgaactccctcttgccttcccttccaagtccagcaaagaactagtgagctactacttcaatgtattcatgttgaggaagagggctgagcagaacagatttgacccagtgaacatcgacagtgatgatgacgaatggcaggcaggtgacgatggtgagtatccaatcacaggaagaactgatgaatacttgccaactgagtctcttactgatcaagatgatgttgcatgcaatccagttcctttagaaagggatctctatgaagattctgatgatgaggatgagctggacaatgccagtggagacaggcataatggtgcccagagggctggtatgttgtcagagggtaatcgtgtaatgtcggtcatagaacataatcaacagacgttcaagttagatgcagaggcgcaagacgactcttgcacatcatttgaggctcatcaggttggtgttgaaggtgggacacatactgatattgctgatgacaatcattacaggagtgacggctttggtggtggtgcagaacatgggttcttcggtaatcagtgtgacacaaaagagtgggacttcggtctcagtatcggttgggaaaagcatgattttttgtcaacaaacaatgtcatagaagaggtgttcgggaagtgctgtgacactgctgaccaggaccttatctgagccagacgcggaggcttcttgtcagctgcgaaaactttagggttctctgaattgtacagcagtagttggctattttgatttaatgcctcacttgttcttacaggaatctcatctctgtccttggaacatcatctgcttgtgatttcgtcacatgattaatgtaaatccgtagtctgttgatagcctgtggaatgtatgtatcatctttgttgtgacggtgtctcttgacctgagcgttttttctatgtgctagcgagggtcatgtaataaaagctgttgttgttccttgaccctgtctgcaaataaatgtaacctgccagtcaatgtattccgaaaggtcatttttatctgatctgaaatctgtagtcgtttccgcggctcgttcgtcgtttagtgtcattagtgtattctcgttatggtagccattccgcgggccatcagc

SEQ ID NO: 84594 - DNA, 3765 bp, Zea Mays
attgtttttttctagaaaaaaatggcttacgcatgtatctgtattcgctcaatactagatatagtaccctgtatccgttaccaagttggtgtaccccaaaaccaaggtaccattctctttgaaattgattggtcttcaatcgactattgcaattcgagggcaaaagtaaccctgcatcgcagcacaagaacctgcaaattaacccacatgaacactgataactgaagcagaaaaataaatgtgctccatggttccaggccttggatgcacacaattaccatctcctggtctgtttctttcaaagaatatttttcttggttatgtgctctcaaaagatttttgtctcccctttctctctctttcttcttttggtgacatattgttgggttttaactctaacctaccccaacttgcttgggactaaaagactatgttgctatatatggtgtcattatacacagggaagaaaaagatcttcatgttacagggaactttgatctatgagatttgttggatgtggttcggttcttgtaagtaaattcttcagattagtttgaaggacctatgttgtagtatttcgatatggtattaaatatgcaagcatatgtatcaattatgccagccctgattgtgaccacacattctgatattagagtattctgtgcaaggttgttactatgtactaggaagaaagtggcttttccatttgtagggatggcaattttacccgcgagtttagatatccgtcggatatctgacccgtcgagttcaggtacgggcacaaatgttgacccgtgataaaatcggatcgagcacggattccagtttttgcccacgggttccccgcgggtattcgtaatctactacttattaaggcggtaaggggtaggctgccattccgtgttctgtcattctcattcccgtctttctcattctcccctcccgcaaagctctcattcccggctctcattttgtgttctgccattcccgtactgtctttctcattttccctccccgcaaagcccattgccattcccacgtgcatcccacgcctagcgaaaattaaattaaaaaacacaaatggtctcaaggggattcgaacccgcgacccctcaagcaaatatactcgtagctaccattacaccacatatgtgtttatgtctacatctattacaataaaaacatctactacatctctcccgaagcccacctgctatccttgcacgatgtgtagtagtagataattatcaccgagatttttgaattatatttttggatggagggagtagtatttaaagaagagtcttgcatgcaattccttttgtttgaataatgttttcaacttaaattcattttttgcatgtgtgacatttattctccgtaatattttttccatagatttgacttatgagtcattttcataaaccaacgccaaagatgaatccatgtttcttacttggaaaccccgaacaaacaccactggcaggaggcgctcgcgttggcgtcgctcattgacgacgagaagaagcttggcgactgccagttcgacctctggaagcagtactacgcggccgcatgcgtcgctttgttcggcaagctccggcatagccgccgcttggacgcggtccagagcggctgcaccgcgctgtccatcttcaaacagggggacctcatggtcgtcgccaacgccagcgactctcgggttgttctgggcatcgcatccgacaacgacgccgtcacgccgtccagctcatcatccacctgaagctcaacctgccacgtaagtctctactgaccggccatgaattcttgtgcgctgggacgatagccgttgctgacgttgtgtgagtgtcctcgaacaagatgtatgtagaggagtagcacatccggtggtgcaacggctaggtgtactacctcgctgatgaacccggggtgcacttagtttgacagcctagccaagagttattggtactcgccatgtcgtgcgcgttcgacgactactatatcaaggattatggcgtcatcttggcgccagaggtgacgcagaggaggaccgacaacaatgaccactcgccatcgtcggggtagcttttgtgccggcctgcctttaattctcttcgcaaacacacacttgtctttttgtttaagcaagcatgtatggtggtgcgtacctgatgactgataatatacgagggaacttctaccggcaggtgtggcacatgctcttcaatgatgtgagaccatataaatcgtgacatatatcgaagtctgcatgatactgttggttgcaatgtagtagtgaaacagctaaattaaaataacaaaaattatgtatggctaggattacaaatagattatgaaacattttcttataacaatataagatatattttgtatataagttattatgttattatatatttatgttgcaacgtacgggcactcacctagtaataaaaaaaagacaaagggcaaaggcccatcaaacgtctcttaagtcaccgaatctttgcgagaggcgacctcgcccatatgtctaaccctaaataactccactcgaccactccagtaattcagctccactctgcggctgtgcctccggccggcgactttttagtctcagttcccactcgatggttgattcctatcatcctcacaatcgctcctccatccagtcccgcatcgggacctgcacgcgcacgagcacacgacggcggacggtcgcacctcctccgctcggccgctccacagcttggcgctccggcgggcgctggcacctccggctacgtcctgctgcctgcgcgcggtagccacctgttgtacccgtgctggcctgctctctctgacctgatactctgactctgcaatcggcttgctctctccaggctttctggaatcacatttcttgagaactatctgttggagagctaaactaggctcttgttcatattatggatcagcaagctaagattgatgctgattttcttgaaccaactgtactcttagatgagacacattaccaggaggggtacagaaatggctataatgatggtttggcatctggaaaggaagaggggaggcaggttggtttaaagatgggtttccaggtcggtgaagaactgggtttctttcagggctgtctggatgtgtggacgtctgcaattctcattgatcagaatgccttcacagctcgggtcaggaagaatatcgagcaactggctgcactggtgggcagttatccgctgtccgatccggagaatgaacaaattcaagacgtgatggagaagataaggctgaaattcagggtcatcactgcaagcttaggggtgaagttagagtatgaagggcaccccaaatcatctaaacaggatgctgaggatctgtagcggtgattgaaattacattttagtttctccgcccttgctgtttaaagctcttcaactcattggcatcatgaggaactgcagtgagacatcaatggtcagagtccgaccataaccacatatatagttttaacaatgtctcaagttttgtgttattacctgctgtctgctgtctgccatatgtaatagtttcctttcaaaaggcaaatgcacttccttcccattttctttgaagtacttgtatcaaacactctgcgatgagaatcctgaatttcgttcttttctgaagaatatatgtactcctttctcatagttgttgggggcagttcctactccaggcttcatcttgaatattgatgcatgtatcttcctctctctctat

SEQ ID NO: 84595 - DNA, 1370 bp, Zea Mays
gtcccggtcgcccaccccactaccccagccgccactcccagtcgtcccagcctcccagccttccctggaggccaggaccccagcgccccacgcggccacgccggcacgcggcactgcggcagtcccaggcccccagccgcgcgcccccgcccaggctcccaggcggcggccaggcccccgccccgcgcccccgcccagcaggcagcagccagtccgcctccgcccgctaggacggctcctagtcggccagtcttcaggcttcagcccgctgccccgctgcgacgctgccccgagcggtcgagctacgcctgcgcggctgcgaccggcgaccgtccccaagctgcgactgcgactgcgaccggcgaccgtccccaacctgcggcgtccccgagccctaggcccgacccgctgccatccctaccgctgccacctgcgtcgtccgcaagggatccatcgccggcgaaggaagccctccgaaagccgcacgaagctcatttgatgacgcccgcacacgcgacgagctcgttcacctaccagcggtttaccggcggtgtggtggctacggatcaacggctttctggaatcacatttcttgagaactatctgttggagagctaaactaggctcttgttcatattatggatcagcaagctaagattgatgctgattttcttgaaccaactgtactcttagatgagacacattaccaggaggggtacagaaatggctataatgatggtttggcatctggaaaggaagaggggaggcaggttggtttaaagatgggtttccagctcgggtcaggaagaatatcgagcaactggctgcactggtgggcagttatccgctgtccgatccggagaatgaacaaattcaagacgtgatggagaagataaggctgaaattcagggtcatcactgcaagcttaggggtgaagttagagtatgaagggcaccccaaatcatctaaacaggatgctgaggatctgtagcggtgattgaaattacattttagtttctccgcccttgctgtttaaagctcttcaactcattggcatcatgaggaactgcagtgagacatcaatggtcagagtccgaccataaccacatatatagttttaacaatgtctcaagttttgtgttattacctgctgtctgctgtctgccatatgtaatagtttcctttcaaaaggcaaatgcacttccttcccattttctttgaagtacttgtatcaaacactctgcgatgagaatcctgaatttcgttcttttctgaagaatatatgtactcctttctcatagttgttgggggcagttcctactccaggcttcatcttgaatattgatgcatgtatcttcctctctctctat

SEQ ID NO: 84596 - DNA, 3017 bp, Zea Mays
ctttgttgcgcgcacgactgctcctccccctccaaagaagagaaggttggctgccggccagctgactacctgcccagcgaaccacgttgcctccgccaccgctgtccgctacctctcgtcctcaaccccgtcgctgcttcgttttcctctgcggcctcgggcctctgccttctctaaaaggccaatttcccaacatggaatttgaaagcactctttaacaattgttgattgaacagcacagtgcctggttttaaaaggttcaaaaggaagaaaattcatctgacaccagcactatcacagccactgaaagacctcaatgtccaaagatttggaaaaatgttcacctagtggcaccacacctacgacttcagtttcacctgtagagtcaaaaaagcatgagaagactgtaccaaattatctcagagctactagaggttcgtgccatgatttttgcaagtatggacataaaaacccttctgaagaggaggcgggtatttcaggaggaagaagaaagaaaattcctgctcatctgattaatttgacactacacagatcagctattttggatagatccaaggatataaaaaataggagtgtttcactaaccaagtcgagcatatctctgggtgaagctgaacggtttgcacccaagaaagcatcagcaagtcgaaaaggagttctatccagtgagcatatggttcccaggacagctacaccatctcaacataaatctctgaactctgatagaagaaagatgcattcaattgttgcacagaaggctccaacaaatctaaggtgttcaaatggagttccaaaaattgataaaaaagaaacaacgccagccaagggggctatatttcctgcgaaattgaagtttccagagaagaccttgctggagaaatctagaaatgtggatagagtcacaatggccaatcaatcattgcacaagaggccagcttcttctctcactaagctcaacatggttaaacaggggcctgttgcatctcaggcttctagtaagcatctactttcaaaacataaaaatactctggaggaacctgttgcagcaaatattacaagaatgcgtgctaaagctggacaaagtcctagaaggacgagcaatccttctaatataaatgggaaggaaggctcagatatgcccagatcacccctctctttgcaacccaagttgactgcttctatggaattacagatggatgattcacaaattacagggaattacaacgattcagcattggctgaactatctccagctattacagaatacagagacttttctcaaccagcactagaagaaacaagtaaaactatttcagaggacgatggggtgggaagaactgaaaagagcaaaatattaggaggtgaagccttcctggaaagcaccattgcccttcagctgcagcaatcattagatggaaaggaattcagcgttatcctagctgaatctgatctagaacagaaactatcagagcataatattgttcatagtcaagcttcaaaggattataatagccaaacagattatgcagctctttgtcaattaccagaacaagtaacaactgtggaaactgcagatgtgtttgactttatgtcaactcaaagtaattcaaaaactgaggatgatcaagttaaagtcaatgcgtctgtggagtctctaatccctgaaggtaaggaagaaatgagagttcatgaagattttgaaatatctccagaactactggtacttgacaaaaaacatgataaggagcctgagtcttgtcttgatcttgcttctggaaatatagcagagaatgataaggatggtaaagtttttgacagtaggatgaacaacagtgcttctcactgccaatcaatttcagaaacttcatcagatggtggactccttgaggaacctaagtccatgctaattgaacctagtgtttttgctggtgatgagttagcaagtatcagtaatgaaaatacctctgaacatggcggactgaaatcaaggatgtttattccccatcaatcaccagaagaactatcagataatgaattttatgaagagtatggttttgaattaagtgaatcagatgaatctggtacagaagatgaggagacaacaatcaagaaaaataggaatgaatcattgaagtctggtggccaaagatcaagaagaacctcagcacttgaattggatgatgctagtctcacaccttataagttaaagtttaagaggggtaaaattgtagaactcccactagacagcatgggcccaaggaggctgaaatttagaagaaagtctgcaaatgaagcttcaaatcgtgaaagccaaccagctagaaggatttatagaaggaacaacaccagtactgctgttcctactgatgtggaatctcctggtgtgaaactgagacatcaagatgcacaagagaagaaagatgcacaaggattgttcaataatgtaattgaagaaactgcaagcaagttagttgagtccaggaaaagcaaggtaaaagctttagttggcgcttttgaaacagtgatttctctccaggatggcaaacccacatcatcgacagcgcaagctggtaattcacaagatttaattcctgatgacgggggaaatgcacctgaggaaactggatagaatttgcatgcctctgaaatgttgcaatctttgcactcatgtttgggtctcctcctttatttggttccagaatcggatctgattggaagcattttgttcagtgtatacaacagatttctcctgtagaacgacagttgcggaagtggttttttcagacagtatatagtaatgtgttcaatggaacaagtgctttgaagtctacttcactgtaaatcaaatgagacattgtaagaccaattgtgtttttgttcggcttggttttcctaaatgcaatattaaaagagttggttttgctgcacctacctctagtttggttttcactggggtggtggtggtattgtttgtatttctatctattatatgaaag

SEQ ID NO: 84597 - DNA, 3330 bp, Zea Mays
ctctcttcggttttacgccttctttgttgcgcgcacgactgctcctccccctccaaagaagagaaggttggctgccggccagctgactacctgcccagcgaaccacgttgcctccgccaccgctgtccgctacctctcgtcctcaaccccgtcgctgcttcgttttcctctgcggcctcgggcctctgccttctctaaaagttttgagctggaaaggctgatgctggagcagtgtggtctagactctagacagcttggctaggaaaaaatggcttctgtttaatgatcggttaattggatgacgtatttatggaggagtgggatcttggatatgatgtctgcccaattctgttggttgtttgtacaggtggattgccctacatttagttcaaacttcaaacagcctcctagaccgatctcttcctctattttcatcctgactagtagtggagtggccaattctgctcttcctatcctaggagaacgatccaaggccaatttcccaacatggaatttgaaagcactctttaacaattgttgattgaacagcacagtgcctggttttaaaaggttcaaaaggaagaaaattcatctgacaccagcactatcacagccactgaaagacctcaatgtccaaagatttggaaaaatgttcacctagtggcaccacacctacgacttcagtttcacctgtagagtcaaaaaagcatgagaagactgtaccaaattatctcagagctactagaggttcgtgccatgatttttgcaagtatggacataaaaacccttctgaagaggaggcgggtatttcaggaggaagaagaaagaaaattcctgctcatctgattaatttgacactacacagatcagctattttggatagatccaaggatataaaaaataggagtgtttcactaaccaagtcgagcatatctctgggtgaagctgaacggtttgcacccaagaaagcatcagcaagtcgaaaaggagttctatccagtgagcatatggttcccaggacagctacaccatctcaacataaatctctgaactctgatagaagaaagatgcattcaattgttgcacagaaggctccaacaaatctaaggtgttcaaatggagttccaaaaattgataaaaaagaaacaacgccagccaagggggctatatttcctgcgaaattgaagtttccagagaagaccttgctggagaaatctagaaatgtggatagagtcacaatggccaatcaatcattgcacaagaggccagcttcttctctcactaagctcaacatggttaaacaggggcctgttgcatctcaggcttctagtaagcatctactttcaaaacataaaaatactctggaggaacctgttgcagcaaatattacaagaatgcgtgctaaagctggacaaagtcctagaaggacgagcaatccttctaatataaatgggaaggaaggctcagatatgcccagatcacccctctctttgcaacccaagttgactgcttctatggaattacagatggatgattcacaaattacagggaattacaacgattcagcattggctgaactatctccagctattacagaatacagagacttttctcaaccagcactagaagaaacaagtaaaactatttcagaggacgatggggtgggaagaactgaaaagagcaaaatattaggaggtgaagccttcctggaaagcaccattgcccttcagctgcagcaatcattagatggaaaggaattcagcgttatcctagctgaatctgatctagaacagaaactatcagagcataatattgttcatagtcaagcttcaaaggattataatagccaaacagattatgcagctctttgtcaattaccagaacaagtaacaactgtggaaactgcagatgtgtttgactttatgtcaactcaaagtaattcaaaaactgaggatgatcaagttaaagtcaatgcgtctgtggagtctctaatccctgaaggtaaggaagaaatgagagttcatgaagattttgaaatatctccagaactactggtacttgacaaaaaacatgataaggagcctgagtcttgtcttgatcttgcttctggaaatatagcagagaatgataaggatggtaaagtttttgacagtaggatgaacaacagtgcttctcactgccaatcaatttcagaaacttcatcagatggtggactccttgaggaacctaagtccatgctaattgaacctagtgtttttgctggtgatgagttagcaagtatcagtaatgaaaatacctctgaacatggcggactgaaatcaaggatgtttattccccatcaatcaccagaagaactatcagataatgaattttatgaagagtatggttttgaattaagtgaatcagatgaatctggtacagaagatgaggagacaacaatcaagaaaaataggaatgaatcattgaagtctggtggccaaagatcaagaagaacctcagcacttgaattggatgatgctagtctcacaccttataagttaaagtttaagaggggtaaaattgtagaactcccactagacagcatgggcccaaggaggctgaaatttagaagaaagtctgcaaatgaagcttcaaatcgtgaaagccaaccagctagaaggatttatagaaggaacaacaccagtactgctgttcctactgatgtggaatctcctggtgtgaaactgagacatcaagatgcacaagagaagaaagatgcacaaggattgttcaataatgtaattgaagaaactgcaagcaagttagttgagtccaggaaaagcaaggtaaaagctttagttggcgcttttgaaacagtgatttctctccaggatggcaaacccacatcatcgacagcgcaagctggtaattcacaagatttaattcctgatgacgggggaaatgcacctgaggaaactggatagaatttgcatgcctctgaaatgttgcaatctttgcactcatgtttgggtctcctcctttatttggttccagaatcggatctgattggaagcattttgttcagtgtatacaacagatttctcctgtagaacgacagttgcggaagtggttttttcagacagtatatagtaatgtgttcaatggaacaagtgctttgaagtctacttcactgtaaatcaaatgagacattgtaagaccaattgtgtttttgttcggcttggttttcctaaatgcaatattaaaagagttggttttgctgcacctacctctagtttggttttcactggggtggtggtggtattgtttgtatttctatctattatatgaaag

SEQ ID NO: 84598 - DNA, 1198 bp, Zea Mays
ctttctaatggcagattagcaatgagacaaaccgtccaaaggagggagcgagcgacccagatcttgcacacggcacgcaccggccacacggcaacagtgtgcgtcttgtgccgcaggggcgtgggccttcttcctcctcttccggcactccactgctccgtctcccggcctctcgcctctcggcctctccatcgttcgacctcgcgacgcgtcaagtaggggggcggcggccttcgcggagatgaccaccttcctgatcaccggaggcgatttcccgcgacactcctcccccctccccgtgctctgctagacagatagatccgggctcttccttgagaggaaggccttgattgtccaatatgctgggaatccttcaacctcgtggagaatgttccctatgtcttgtggtgtggccacacaatgtgcaaaaactgcatccttggtcttcactgggcagttgtcaagttcccgtcccttcctatccagctgcctttgttcatctcatgcccctggtgcaacctgctgtctttccgcctggtttacaagggcaacctcaggttcccacgcaagaactactttctgctctggatggtcgagagcatgaacggtgggagagcaaaattccattccactaaccatgacgagcatcattccacgtggcattcaagtgccggcacaagctccagccatcaacagcgaagaaatgctgctgtaggatcagagagctcttctggcagagagacaggcgtaggccgcaacattttccacaccgacaacattagtgcttctctgcaaaagcttatggtgtgcttcatgcagctgacggccaagttcccactcgtgataatctttctgctgatagtcctttatgctgtccctgcaagtgctgctgttctggttctctacgcccttgtcacgtttttgtttgcactgccctcatttttgatcctctactttgcctaccccagcttggattggcttgtcagagagatcttcgcttaattcgtgctgtctgaaatgtccgcgcagtttgtatccctgcgacaaatgatatatattggtatatgtattccatgggccacctgccctcgtaggccctgtatagtttcttcttattctctgtccttgtagcactctatttctgttgtaactaacagcttattaaaaatgctctgcaatgcttttatttgtggttcta

SEQ ID NO: 84599 - DNA, 1090 bp, Zea Mays
gcccttagcgtgagatgatccagcaaaaggttttttccactcattgcccaagtggctttttgtatgctttgtcagcccacctctggttcctgcggtggctcttgagcttgcgcccaactcccataccacgtgtcttcctgtgatgtgaattcaagatcgatatgttaactcacataaatcgcaggctctgcaaaaccctaaacaacatggtagcagaaggccatatgtctcactacagataaaggcaaacaaaaaagaaaaatatagattgcggcaaagtatacaatataatcctctttcaaatataaaatatagcagtatacataaccgaaatgctgctaatgatataaccgaagtgcatgcaaaaataatataatgctgctaatgatcatttcagtactgatttctataaatgtttactaaccgaaactggtagtaagtggtatggtatactgctataatatacattgtttgataattattttctgcaagttatgtatactctagcgggagactacactgcacagatcattccaacaggacaagtcattcgacccacatactggtcaacgccagcacacagtacacctgtttaaaccaacaaacattaacccttgcaatttattttgagaacatgaatcaattagacctcaattttttttcacatatcctgcattgagttacagattatttcaaacgggaacaaaggaaaccgagcgaaacttactatacaaacagtagcaacacaaaggagcagaatcgtagaaaccaatgaatactgaaagatagggggcggacccaatcctgggtggcatcaagggctcatttgtatgatctatggctcatttgtagagtagacatcaccagtttccttccataccatccagccatttgcttgatctatggtggcatttattgcaccatctcttatgcccttggctacaatgctctccacatcagcaacagggttctcagagtctagttccctgcagacttgtattgttgttcagctttgtagatatctagagctagttccctgcagacttcataccagtttgcataaaactcaacaacagtgggcttgccattt

SEQ ID NO: 84600 - DNA, 297 bp, Zea Mays
ccaaactgaccttcataaggaaataataatgtcgtgtaacagagctatcaatgttaacaaaaaggtacagctcagaattaacagctctgttgctagcagaactttaactttgacaacagagccttgggcagtttacactgtaacataactgtcaatgttaacaaaaaggtacagctcagaattaacagctctgttgctagcaaaactttaactttgacaacagagccttgggcagtttacaccattcttgactaccaaaagtgatctaagaccttggcttcttctccttgaagagtg

SEQ ID NO: 84601 - DNA, 1519 bp, Zea Mays
gcccacggccctcttttgaacctggttctcctgtcgctgtcgcccatcttgcggcatcccaccacggcaccaccgccacagaagagcggccgagcggtgcagagaaccagccagctgatctgagcggccgcgcttccggtgggaggatggagaaggctctcaccaaactgggcagcttcaccatctcccgcaaggccaagcaggagctctccgccatcggcgacgacatctctcgtttttcgagcacggtggaggagaaggcaaaatgggtcttcgaaaagctcaaaggacacaagaagtccctctctgatctactgcgcgagcacaacctccctccaggcctcttccctcgtaacatcatctgctatgagtacgacgaatcgacatcgaagctgatggtgcacctgtcgaagccctgcgaggtgagcttcaaggattcctccgcgatacggtatgctcctcgcgtcaaggcgactctgtcccgaggcaagctttctggggttgaaggcatgaagaccaaggtggtggtgtgggtgaaggtggctagcgttagcatcgacagctacaagtccgacaagatatgcttcctcgccggtgtgaagaagctgaggcagaaggatgcttatgaggtccctcgtgaagccgtctctgttgatgagttctgagctcgattgatttcccttatccgtagtatcattcgttcgtagcatttttttgggtcccatgtcatcggcaattgatgtgctgcggttttgtagatttggaatcacatggatctgttgtgcctggcagaagacaacccgttcatgttatctgacgagacattcacatgtgtgatgtttcagtaatgtgtacatttagcatgtgttctggttcaagaagtccaaggtgctgcaggacctgctcgagaagagcaggaagaacaaagagaagaacgagaggatgatccaggacaagtactgtctgcggggcgccgagtggggcgtcggggactgctccacggagggcatgtcagaccaggagagggaggacttcatttcggagctcaagaagagagctggagcagagtagcgagctgaggacgtcattcagtttcaacagacgaagtatgggcacacttcgccactgtagcagtccagggaatggccattttactcgtcataccctgattaccaagggaaatacgcaaacaatgtagaccagcccataggccactgggagtgcgagaatgttcaccaacatcatgcgagctcagaatttgcaatacatatgtacccattgtaaaatgcatttagcacgagcaaattaccagctacactgattcttaagatccctaaattcctcttatttttttaacactgatgtaacctataaagctgccgctctctgcataactgaatgatcatagatgaaacagccctgaaaaccaacacgcgggcagagaaacatgcgaacatcccaacacacagcacacatggaaaggaaacgaggaagattgacatggataacttttttactc

SEQ ID NO: 84602 - DNA, 2553 bp, Zea Mays
gcccacggccctcttttgaacctggttctcctgtcgctgtcgcccatcttgcggcatcccaccacggcaccaccgccacagaagagcggccgagcggtgcagagaaccagccagctgatctgagcggccgcgcttccggtgggaggatggagaaggctctcaccaaactgggcagcttcaccatctcccgcaaggccaagcaggagctctccgccatcggcgacgacatctctcgtttttcgagcacggtggaggagaaggcaaaatgggtcttcgaaaagctcaaaggtacagttgttctgttccattgcattttgtggctctgaaaataagagtgtctcttaagagatgtatgtagatgatgaattagaaccttctggctgcatgttaagttgttatgacatcatcatgacggcaactatgaactatccattgcggctaccttttctttgccttatgcgtaaaaccaaagcaatgcaggaaagagatgtttatccaatatgattatatgtactggcttcctgattcctagcatttcctctgattggatctagcttgtcttggatttcctgtacccctttgatctgtaaagtagagtgcacatgggggtcgaaactgaaatgacttttgtgacatcctgctgcacgcactgtattggttggcgtcgggccatccccccccccccctctctctcgttgatgccattattcacaagtccgaagactagcaatggatagggaacatgctcacctaacagcttgttttacgtgcagtcttggtattgttggtcctccttgatcctcatgtctttggccgtattagcaacactgtgcagtgtatgtcgacctggtcgtcggaagcaccaactatagccgattgatttgacagactgcactgtgatgtccattaagcagcgtctaatttgttgtggctagaagaacaaaagcaattgataatgtagctagacaatttaatttctcttgtcaaaagctttgcaggacaggataccgttgttctgaatacactgcatgcaattactgtttgatgtcttcctcctgatttgttggtggatcacagttatcttatatgatgaataattgaaatattttagtctctgttgcgtcataattttttcaggtgctatatatcgtttcacattctaagtcaaaattgcttgatgaagttagattttcactcaagagtgggcactttctgattctgaattatgctcctgtatctcttcgttaacctcatcctgtagcaactttgcacagttgtataatcgatatttcaaaaaattgcacttacttcagtttcttctgtccaggacacaagaagtccctctctgatctactgcgcgagcacaacctccctccaggcctcttccctcgtaacatcatctgctatgagtacgacgaatcgacatcgaagctgatggtgcacctgtcgaagccctgcgaggtgagcttcaaggattcctccgcgatacggtatgctcctcgcgtcaaggcgactctgtcccgaggcaagctttctggggttgaaggcatgaagaccaaggtggtggtgtgggtgaaggtggctagcgttagcatcgacagctacaagtccgacaagatatgcttcctcgccggtgtgaagaagctgaggcagaaggatgcttatgaggtccctcgtgaagccgtctctgttgatgagttctgagctcgattgatttcccttatccgtagtatcattcgttcgtagcatttttttgggtcccatgtcatcggcaattgatgtgctgcggttttgtagatttggaatcacatggatctgttgtgcctggcagaagacaacccgttcatgttatctgacgagacattcacatgtgtgatgtttcagtaatgtgtacatttagcatgtgttctggttctgcattggttgctcctagaattcatttcttcatgttttactgtaatacgtggtattgggctattggccgagttgcacagtttgttccgacaggtaatcctatatagctatctccagcagttgtatatggatctgtacctatatttagttcgcaatgtctccaacaacatacgctatcacatccgataagatagcggagccacccagcgtcctctatactggtctgcttcgcctgctaaacactgtgcccgtacctttctcatttaattcacttgatttcatgtgcggggatgcgatgtatgcgtatgtgtggtgtttcatgtgcggggatgtgatgtatgcgtatgtgtggtgtacgacacgagacgaggtcacaaggatacgatggtgatggaggaatgtttagaaattagttgtaataatgaaaaaatatgtaaataaataaataatttatttttatgagtcgtcaaaattactgttaatatagttggcgaaataaaaaaaacaatgtatttaatgaagtctgttaatacggtagatatagaggaccgaatttagaggacgctgcaccattcaagctagtagcggaggacaaaacaaaataaatgtaagactagtttgtaagggaaaaaaagaaaa

SEQ ID NO: 84603 - DNA, 1654 bp, Zea Mays
ggggggagctacggcgggaagatagaagagagaatggggaagattctagctcggcgccaaaatctatggcgccgagctagggagccacgtaagcaaacacgtcatccatcgacgccaccgccacgtcagcacttgacgccataagctatggcgtcgagctatgtaaactcggcgtcataggctaaggcgccgagattcgggtacaaatactgaaataaaacattcaggatctaaatgcttacttttttcataaagaaggtaaaaaaaaaatcggccctgcagatgcccaccacaaggccatctcaaaacttctaaccgcatcaatcttcccacttcccaggaccccaaacgaaccctggcgcttcactcattgcccgacccgaaccaaaccatgcaaacccaagcggaaagccaaggcaatcggaggaacgaatccggatccggaggtcggactcagaggcgatgaagaacaagggaaactctgcgtctccgcgcactcggcgccgcctctcaataggccacgggggaagcgcaaggccctggccgagctcgccacgtccagcggagcgaacatgaaccacgactcggcgccgcggccatcgaagccgagaacgcggtcggcggcgcggattgagggcgaggcggaggaggcgaggaaacggcgggagtccggactccggagactccgcgcgctggctgttggacacgaagccgccttaccctgaagcggcggttgcgccgtacgtcggagacatcgaccggtacctccggtccctggaggttgaaccgttgaggaggccaagccctggctactttcaggatatccagaaagacatctgccccaaaatgagggctgtcgttgtggactggttggtggtgttggctgaagaattcgagcttcacgcagaaactctccacctcgcggtttcctacgtggaccgcttcctcacaatgaatgtcgttgctcgggacaagctgcaactactggctgtcactgcattgctcgttgctgccaagtatgaagaaattgagtctgctgagatgaaggtggtgaagatggaggctgacttactgaaatctcttaactttcagattgggggtcccactgtaacaacatttttacgaacttgacacttgaacaaaacacggggtataaagtctttgatctgcagaaatccatttatgtcatacatgaactgcagttgacaataaggtgcccagatcaggaagccaccaggaagaagtacaaggaccccaagtttgggtgcgtgtcgacaatggtttcaccacgagaaatccctacatctttccctgaagattgccataagtgaagtctggacttggagaaaggtttttgcagtaatgctgctggcgatgtagaaaatagcttgattgtaggatagttggtataatacgtgctagttcacattagaatagtaagactgaattaagcttacctgttgagtctgagatcttgaacaagccatacagtcaaggttttgctcagtaacctagttcacgattctctctttagcagtaatggatgagacatttttactattagaaagggatgttaaactaagaacacagattttaaagctcttctattaaaaaacgcaaccgctggtatagatcttcatccttacaagaggag

SEQ ID NO: 84604 - DNA, 2084 bp, Zea Mays
ctcaaaaattcaaaccgcatcaagcttcccaagaccccagacgaacgccggcgcttcacacatcgcccgacccgaaccaaacccttcaaaccccagcgaaaagcgaaggcaatcggaggaacgaatccgcgcgaccaacacgttggcagcagcattaggatccggatccgaagaccgccagaccggagccggaggcgatgaagagaaaggaaaactccgcgcactcggcgccgcctctcaacaggccgcgcgggaagcgcaaggccctggccgagctccccaagtccaacggactgaacatgaaccacgactcggcgccgcggccgtcgaagccgagaacgcggtcggcggcgcgagctgaggccgaggcggaggcggcgatgaaacggcggaaggccggagacgccgcgcgctggccgatggacacgaggcagcctgacgctgaagcggcggttgcgccatacgtcggggacatcgaccggtacctccggtccctggaggttgaaccgttgaggaggccaagccatagctattttcaggatatccagaaaaacatctgccccaaaatgagggctatccttgtggactggttggtggaggtggctgaagaattcaagcttcacgcagaaacactccaccttgcggtttcctacgtggaccgctttctcacaatgaatgtcgttgctcggaacaagctgcaactactgggtgtcactgcattgctcgttgctgctaagtatgaagaaattgagtcttctaagatgaaggtgaaaagatacaccgatatcacggataacacttacaccaagcagcaagtggtcaagatggagactgacttactaaaatctcttagctttcagattgggggtcccacagtgacaacatttctacggtatgtcttctccatcattgtttcctgtgcttagaacaagcatagcatttgacgtaacttccctttgtatgttaccatataagaattatgccctggacttaaagaagttcagaatctaatactagataactgtttgttttaggcaatttatagcttcgtgtcgtggaggcaatgtaagcggtactttggagcatgtgcatttacttctcttaatgttttttttcgataaatctgttttttttattcaaaattcagagtgcaagcagaggaaaacttgagtttgtgtgcagctaccttgcggaattgagcttgctggattatgactgcataagctatctaccctcagtagttgctgctgcctgcttgtttgtagccagattcataatccacccaaagactcgtccttgggtaaagacaacatgacctttattgccaactacaccctcggtccccgaaaaatatcattctagtagtagctatgaatctagatgaataacaataattatccagattcgtagctagaatgtcacattattttgggacagagggtgtatctaagctgtagggtttttctgacatcagtgtgtatagttctctttttctgacttcagtgtttataattccgcagaacttgtcacttgaacaaagcacgggttatagagtctttgatctgcagaaatccatttatgtcatacatgaattgcagttgacaataaggtgcccaaatcaggtagccatcagggagaagtacaaggaccccaaggttgccataagtgaagtccggacttggacttggagaagggtttttgcagtaatgctgctggcgagtggcgatgcagaaaatagcttgatggtaggataatttaagggtaggtcggaaaatataccatggccagcgttgtagatcgttggtacggtactggtctcacagttggtagaatatgcaattgaaggctttttgtacaggagttaggctagtccgtgacacacacgtgtgcatcctctatggtctgtctttgcgcacattatgccgagcgccgaccatctcgtgctgttggcctgtctcaattaccaccagacatttgacacgtggaatctttttaagattcaatttttaaaaattgtatttctcaagctgtaacttcgattcacgaacggtttgaagcgtgtcattgagaaaaatataacgaac

SEQ ID NO: 84605 - DNA, 1650 bp, Zea Mays
ctcaaaaattcaaaccgcatcaagcttcccaagaccccagacgaacgccggcgcttcacacatcgcccgacccgaaccaaacccttcaaaccccagcgaaaagcgaaggcaatcggaggaacgaatccgcgcgaccaacacgttggcagcagcattaggatccggatccgaagaccgccagaccggagccggaggcgatgaagagaaaggaaaactccgcgcactcggcgccgcctctcaacaggccgcgcgggaagcgcaaggccctggccgagctccccaagtccaacggactgaacatgaaccacgactcggcgccgcggccgtcgaagccgagaacgcggtcggcggcgcgagctgaggccgaggcggaggcggcgatgaaacggcggaaggccggagacgccgcgcgctggccgatggacacgaggcagcctgacgctgaagcggcggttgcgccatacgtcggggacatcgaccggtacctccggtccctggaggttgaaccgttgaggaggccaagccatagctattttcaggatatccagaaaaacatctgccccaaaatgagggctatccttgtggactggttggtggaggtggctgaagaattcaagcttcacgcagaaacactccaccttgcggtttcctacgtggaccgctttctcacaatgaatgtcgttgctcggaacaagctgcaactactgggtgtcactgcattgctcgttgctgctaagtatgaagaaattgagtcttctaagatgaaggtggtcaagatggagactgacttactaaaatctcttagctttcagattgggggtcccacagtgacaacatttctacggcaatttatagcttcgtgtcgtggaggcaatagtgcaagcagaggaaaacttgagtttgtgtgcagctaccttgcggaattgagcttgctggattatgactgcataagctatctaccctcagtagttgctgctgcctgcttgtttgtagccagattcataatccacccaaagactcgtccttggaacttgtcacttgaacaaagcacgggttatagagtctttgatctgcagaaatccatttatgtcatacatgaattgcagttgacaataaggtgcccaaatcaggtagccatcagggagaagtacaaggaccccaagtttgggtgcgtgtcgacaatggtttcaccacgagaaatccctacgtctttccttgaaggttgccataagtgaagtccggacttggacttggagaagggtttttgcagtaatgctgctggcgagtggcgatgcagaaaatagcttgatggtaggataatttaagggtaggtcggaaaatataccatggccagcgttgtagatcgttggtacggtactggtctcacagttggtagaatatgcaattgaaggctttttgtacaggagttaggctagtccgtgacacacacgtgtgcatcctctatggtctgtctttgcgcacattatgccgagcgccgaccatctcgtgctgttggcctgtctcaattaccaccagacatttgacacgtggaatctttttaagattcaatttttaaaaattgtatttctcaagctgtaacttcgattcacgaacggtttgaagcgtgtcattgagaaaaatataacgaac

SEQ ID NO: 84606 - DNA, 1122 bp, Zea Mays
ctcaaaaattcaaaccgcatcaagcttcccaagaccccagacgaacgccggcgcttcacacatcgcccgacccgaaccaaacccttcaaaccccagcgaaaagcgaaggcaatcggaggaacgaatccgcgcgaccaacacgttggcagcagcattaggatccggatccgaagaccgccagaccggagccggaggcgatgaagagaaaggaaaactccgcgcactcggcgccgcctctcaacaggccgcgcgggaagcgcaaggccctggccgagctccccaagtccaacggactgaacatgaaccacgactcggcgccgcggccgtcgaagccgagaacgcggtcggcggcgcgagctgaggccgaggcggaggcggcgatgaaacggcggaaggccggagacgccgcgcgctggccgatggacacgaggcagcctgacgctgaagcggcggttgcgccatacgtcggggacatcgaccggtacctccggtccctggagaacttgtcacttgaacaaagcacgggttatagagtctttgatctgcagaaatccatttatgtcatacatgaattgcagttgacaataaggtgcccaaatcaggtagccatcagggagaagtacaaggaccccaagtttgggtgcgtgtcgacaatggtttcaccacgagaaatccctacgtctttccttgaaggttgccataagtgaagtccggacttggacttggagaagggtttttgcagtaatgctgctggcgagtggcgatgcagaaaatagcttgatggtaggataatttaagggtaggtcggaaaatataccatggccagcgttgtagatcgttggtacggtactggtctcacagttggtagaatatgcaattgaaggctttttgtacaggagttaggctagtccgtgacacacacgtgtgcatcctctatggtctgtctttgcgcacattatgccgagcgccgaccatctcgtgctgttggcctgtctcaattaccaccagacatttgacacgtggaatctttttaagattcaatttttaaaaattgtatttctcaagctgtaacttcgattcacgaacggtttgaagcgtgtcattgagaaaaatataacgaac

SEQ ID NO: 84607 - DNA, 2125 bp, Zea Mays
gtccgtctttcagttttattgcggcatctgaattggtgagcgacatcactgttcgtatagggactacaaagttttaccttcacaagtttccgctcctatccaagtgtgctcgcttccagaagttgattccaactactggcgatgaaaatattgagatccacatccatgatattcctggtggtgccaaggcttttgagatctgtgccaagttttgctatggcatgattgtcacactcaatgcctacaatgtgattgccgcccgctgtgccgcagagtacctggagatgaacgagactgttgacaagggcaatctgatctacaagatcgatatcttcctcagctcaagcatacaccggagctggaaagactccataattgttcttggtacaacaaaggctcatttaccttgggcagaggatcttaagctggtcagccactgcattgactctgttgcttcaaaagcctctattgacgtttcaaaagttgaatggtcatacacatacaaccgtaagaagctcacagttgagaatggtcatgattcgccatggaatggagtcaagcagcagcagtttgttccaaaggattggtgggtcgaagatctgacagatctcgacattgacgcctacaagcaagtcataacagcagtcaaaaccaagggtacggtgcccaaggatgtgatcggtgcggcgattaaagcctacacttacaagaagctcccgtcactaagcaaggtctcgatgatccatggcgacgcaaaagttcgggctatgctagttaccatcacatgcctgttgccatccgagaaaggttcggtttcgtgcagcttcctcttgaagttactgaaggcaacaaacttgctcaagtgtggagagatgtgcaggaaagagcttatgaagcgcatcgcacggcaactggaagaagcgtcagtgtcagatcttctgatccctacggtggatggggataccaccgtttacgacatcgacctgattcttagcattgttgaagaatttgtcagacaagatagcaagaatgcccagagacataacggtggtgaggtgaacgaccacgtatctgctcctagtgcgtcaatggttgcagtggccaaaactgtcgatggatatctcgcagaggttgcaagggacccaaatataccggtctacaagtttttcagcctagctgagacggtttcgggaggttcaaggccggttcatgatggactgtatcgtgccattgatatgtatctgaaggagcacccaagcttgggcaagagcgacaagaagaggctatgtgccctgatggactgcaagaagttgtcgcccgacgcgtgcgctcatgccgtgcagaacgagcgcctgcctctgaggatcgtggtgcaggtgctgtaccacgagcagacaagggcctgtgccgcagccaccgccatccgagccgacagcatcggcatcggctcctacgagagctcaaggtcaggcgccacaacgaacacagaggacgagtgggacggcgtcatggccgtggaggacctcagcctgtccaagacgacgaagctggtggacaaatgcgacacggcggccagtacggtcgtcgtggggaaggacaaggaccacggtggcaacaagggcgccaccggcagggtggccaaaggtggcgctggcgcggcgacaccaaagaaggcgctcgggaaaacggtgtccggcaaagggcagaccggggagcgcagcagctcggactcatccgacagcgccgtcgccgtcgcagtcttgaccagccaggagcatcccaagaggacgacccgcgcaaggaacgccgccaagtcggctgctgcgtagcccttccgctgagagaaatgctcaaggagcactagctaggttttagcagtcgtctgttctttgttattacgagtgttgcatagaagccaggaccatgttttttacacgtctgtagctgcctgtagggatggtgtaataccaggtacgtgcgttgttaggtgatgctgttagcacgtaggttccaaacctatgagaccttgggctctgctgggtttatgtcgaactcgcagttgtgttataagaatcctactttgatagacttaaactgttctgcagctgtgagatcttttgaactc

SEQ ID NO: 84608 - DNA, 2137 bp, Zea Mays
gaaaatcatattcaagtactaatccagatattgcggcatctgaattggtgagcgacatcactgttcgtatagggactacaaagttttaccttcacaagtttccgctcctatccaagtgtgctcgcttccagaagttgattccaactactggcgatgaaaatattgagatccacatccatgatattcctggtggtgccaaggcttttgagatctgtgccaagttttgctatggcatgattgtcacactcaatgcctacaatgtgattgccgcccgctgtgccgcagagtacctggagatgaacgagactgttgacaagggcaatctgatctacaagatcgatatcttcctcagctcaagcatacaccggagctggaaagactccataattgttcttggtacaacaaaggctcatttaccttgggcagaggatcttaagctggtcagccactgcattgactctgttgcttcaaaagcctctattgacgtttcaaaagttgaatggtcatacacatacaaccgtaagaagctcacagttgagaatggtcatgattcgccatggaatggagtcaagcagcagcagtttgttccaaaggattggtgggtcgaagatctgacagatctcgacattgacgcctacaagcaagtcataacagcagtcaaaaccaagggtacggtgcccaaggatgtgatcggtgcggcgattaaagcctacacttacaagaagctcccgtcactaagcaaggtctcgatgatccatggcgacgcaaaagttcgggctatgctagttaccatcacatgcctgttgccatccgagaaaggttcggtttcgtgcagcttcctcttgaagttactgaaggcaacaaacttgctcaagtgtggagagatgtgcaggaaagagcttatgaagcgcatcgcacggcaactggaagaagcgtcagtgtcagatcttctgatccctacggtggatggggataccaccgtttacgacatcgacctgattcttagcattgttgaagaatttgtcagacaagatagcaagaatgcccagagacataacggtggtgaggtgaacgaccacgtatctgctcctagtgcgtcaatggttgcagtggccaaaactgtcgatggatatctcgcagaggttgcaagggacccaaatataccggtctacaagtttttcagcctagctgagacggtttcgggaggttcaaggccggttcatgatggactgtatcgtgccattgatatgtatctgaaggagcacccaagcttgggcaagagcgacaagaagaggctatgtgccctgatggactgcaagaagttgtcgcccgacgcgtgcgctcatgccgtgcagaacgagcgcctgcctctgaggatcgtggtgcaggtgctgtaccacgagcagacaagggcctgtgccgcagccaccgccatccgagccgacagcatcggcatcggctcctacgagagctcaaggtcaggcgccacaacgaacacagaggacgagtgggacggcgtcatggccgtggaggacctcagcctgtccaagacgacgaagctggtggacaaatgcgacacggcggccagtacggtcgtcgtggggaaggacaaggaccacggtggcaacaagggcgccaccggcagggtggccaaaggtggcgctggcgcggcgacaccaaagaaggcgctcgggaaaacggtgtccggcaaagggcagaccggggagcgcagcagctcggactcatccgacagcgccgtcgccgtcgcagtcttgaccagccaggagcatcccaagaggacgacccgcgcaaggaacgccgccaagtcggctgctgcgtagcccttccgctgagagaaatgctcaaggagcactagctaggttttagcagtcgtctgttctttgttattacgagtgttgcatagaagccaggaccatgttttttacacgtctgtagctgcctgtagggatggtgtaataccaggtacgtgcgttgttaggtgatgctgttagcacgtaggttccaaacctatgagaccttgggctctgctgggtttatgtcgaactcgcagttgtgttataagaatcctactttgatagacttaaactgttctgcagctgtgagatcttttgaactc

SEQ ID NO: 84609 - DNA, 2803 bp, Zea Mays
cttttttttctcgggtgggtgggtcacgctgctcccctttctcgggccatgcctgacgctgcccttcgctttgcctttgttcttgcgtgccttgttggctagcctgtgttgttgccttccctctcgtttgctataaaccctcgatgcgatgccgcctcatgcacgcctctcacacattgtgcagtgcctggtgcctcagtgcctgccctgccctgccctttgatatggtttctggttatttttattattccctcccttctgctggcccggcgcgcgcgtctctctcccttgccatctgatcgatctcggcaaaaaaactgcgagatcttggcgtgctgccggcgataagattctccccggcgcaagcacatcaccagagcgagcaagtggttcttgagatcgccgggagagagggacagatcatgctcggggaacggtgtgtggcgaggaatgttgactagttgtttaatacgagatcaagaaggacaaagcaattaaacaagcagcaggctttgtgctttgtgggtgtccctcctctggttcactgccccgctctccactccagctccatacattagtttactcctcctgagaggagcgggaagctgtgcggctcctctttcgtggtcaagatgaagttcatgaagcttggatcaaatccggatacatttcagggagatgggaatgaagtcagtattgcggcatctgaattggtgagcgacatcactgttcgtatagggactacaaagttttaccttcacaagtttccgctcctatccaagtgtgctcgcttccagaagttgattccaactactggcgatgaaaatattgagatccacatccatgatattcctggtggtgccaaggcttttgagatctgtgccaagttttgctatggcatgattgtcacactcaatgcctacaatgtgattgccgcccgctgtgccgcagagtacctggagatgaacgagactgttgacaagggcaatctgatctacaagatcgatatcttcctcagctcaagcatacaccggagctggaaagactccataattgttcttggtacaacaaaggctcatttaccttgggcagaggatcttaagctggtcagccactgcattgactctgttgcttcaaaagcctctattgacgtttcaaaagttgaatggtcatacacatacaaccgtaagaagctcacagttgagaatggtcatgattcgccatggaatggagtcaagcagcagcagtttgttccaaaggattggtgggtcgaagatctgacagatctcgacattgacgcctacaagcaagtcataacagcagtcaaaaccaagggtacggtgcccaaggatgtgatcggtgcggcgattaaagcctacacttacaagaagctcccgtcactaagcaaggtctcgatgatccatggcgacgcaaaagttcgggctatgctagttaccatcacatgcctgttgccatccgagaaaggttcggtttcgtgcagcttcctcttgaagttactgaaggcaacaaacttgctcaagtgtggagagatgtgcaggaaagagcttatgaagcgcatcgcacggcaactggaagaagcgtcagtgtcagatcttctgatccctacggtggatggggataccaccgtttacgacatcgacctgattcttagcattgttgaagaatttgtcagacaagatagcaagaatgcccagagacataacggtggtgaggtgaacgaccacgtatctgctcctagtgcgtcaatggttgcagtggccaaaactgtcgatggatatctcgcagaggttgcaagggacccaaatataccggtctacaagtttttcagcctagctgagacggtttcgggaggttcaaggccggttcatgatggactgtatcgtgccattgatatgtatctgaaggagcacccaagcttgggcaagagcgacaagaagaggctatgtgccctgatggactgcaagaagttgtcgcccgacgcgtgcgctcatgccgtgcagaacgagcgcctgcctctgaggatcgtggtgcaggtgctgtaccacgagcagacaagggcctgtgccgcagccaccgccatccgagccgacagcatcggcatcggctcctacgagagctcaaggtcaggcgccacaacgaacacagaggacgagtgggacggcgtcatggccgtggaggacctcagcctgtccaagacgacgaagctggtggacaaatgcgacacggcggccagtacggtcgtcgtggggaaggacaaggaccacggtggcaacaagggcgccaccggcagggtggccaaaggtggcgctggcgcggcgacaccaaagaaggcgctcgggaaaacggtgtccggcaaagggcagaccggggagcgcagcagctcggactcatccgacagcgccgtcgccgtcgcagtcttgaccagccaggagcatcccaagaggacgacccgcgcaaggaacgccgccaagtcggctgctgcgtagcccttccgctgagagaaatgctcaaggagcactagctaggttttagcagtcgtctgttctttgttattacgagtgttgcatagaagccaggaccatgttttttacacgtctgtagctgcctgtagggatggtgtaataccaggtacgtgcgttgttaggtgatgctgttagcacgtaggttccaaacctatgagaccttgggctctgctgggtttatgtcgaactcgcagttgtgttataagaatcctactttgatagacttaaactgttctgcagctgtgagatcttttgaactc

SEQ ID NO: 84610 - DNA, 3043 bp, Zea Mays
ctggctccatccattgcccgggagcgcgcgggtggacccttttttttctcgggtgggtgggtcacgctgctcccctttctcgggccatgcctgacgctgcccttcgctttgcctttgttcttgcgtgccttgttggctagcctgtgttgttgccttccctctcgtttgctataaaccctcgatgcgatgccgcctcatgcacgcctctcacacattgtgcagtgcctggtgcctcagtgcctgccctgccctgccctttgatatggtttctggttatttttattattccctcccttctgctggcccggcgcgcgcgtctctctcccttgccatctgatcgatctcggcaaaaaaactgcgagatcttggcgtgctgccggcgataagattctccccggcgcaagcacatcaccagagcgagcaagtggttcttggtctctctctccgttgcctcctccccccgcactgcatttaaaatagatgctgggtgtctcctgcctgccccccccaacttgcgccgcagagcgccactaacgcttgtttctgccgttgttgcttgccgcagagatcgccgggagagagggacagatcatgctcggggaacggtgtgtggcgaggaatgttgactagttgtttaatacgagatcaagaaggacaaagcaattaaacaagcagcaggctttgtgctttgtgggtgtccctcctctggttcactgccccgctctccactccagctccatacattagtttactcctcctgagttcttgcttcttacaagtggtggtggtggtggtggtctggacgtctggtctctgcgtgagcattggactagaggagcgggaagctgtgcggctcctctttcgtggtcaagatgaagttcatgaagcttggatcaaatccggatacatttcagggagatgggaatgaagtcagtattgcggcatctgaattggtgagcgacatcactgttcgtatagggactacaaagttttaccttcacaagtttccgctcctatccaagtgtgctcgcttccagaagttgattccaactactggcgatgaaaatattgagatccacatccatgatattcctggtggtgccaaggcttttgagatctgtgccaagttttgctatggcatgattgtcacactcaatgcctacaatgtgattgccgcccgctgtgccgcagagtacctggagatgaacgagactgttgacaagggcaatctgatctacaagatcgatatcttcctcagctcaagcatacaccggagctggaaagactccataattgttcttggtacaacaaaggctcatttaccttgggcagaggatcttaagctggtcagccactgcattgactctgttgcttcaaaagcctctattgacgtttcaaaagttgaatggtcatacacatacaaccgtaagaagctcacagttgagaatggtcatgattcgccatggaatggagtcaagcagcagcagtttgttccaaaggattggtgggtcgaagatctgacagatctcgacattgacgcctacaagcaagtcataacagcagtcaaaaccaagggtacggtgcccaaggatgtgatcggtgcggcgattaaagcctacacttacaagaagctcccgtcactaagcaaggtctcgatgatccatggcgacgcaaaagttcgggctatgctagttaccatcacatgcctgttgccatccgagaaaggttcggtttcgtgcagcttcctcttgaagttactgaaggcaacaaacttgctcaagtgtggagagatgtgcaggaaagagcttatgaagcgcatcgcacggcaactggaagaagcgtcagtgtcagatcttctgatccctacggtggatggggataccaccgtttacgacatcgacctgattcttagcattgttgaagaatttgtcagacaagatagcaagaatgcccagagacataacggtggtgaggtgaacgaccacgtatctgctcctagtgcgtcaatggttgcagtggccaaaactgtcgatggatatctcgcagaggttgcaagggacccaaatataccggtctacaagtttttcagcctagctgagacggtttcgggaggttcaaggccggttcatgatggactgtatcgtgccattgatatgtatctgaaggagcacccaagcttgggcaagagcgacaagaagaggctatgtgccctgatggactgcaagaagttgtcgcccgacgcgtgcgctcatgccgtgcagaacgagcgcctgcctctgaggatcgtggtgcaggtgctgtaccacgagcagacaagggcctgtgccgcagccaccgccatccgagccgacagcatcggcatcggctcctacgagagctcaaggtcaggcgccacaacgaacacagaggacgagtgggacggcgtcatggccgtggaggacctcagcctgtccaagacgacgaagctggtggacaaatgcgacacggcggccagtacggtcgtcgtggggaaggacaaggaccacggtggcaacaagggcgccaccggcagggtggccaaaggtggcgctggcgcggcgacaccaaagaaggcgctcgggaaaacggtgtccggcaaagggcagaccggggagcgcagcagctcggactcatccgacagcgccgtcgccgtcgcagtcttgaccagccaggagcatcccaagaggacgacccgcgcaaggaacgccgccaagtcggctgctgcgtagcccttccgctgagagaaatgctcaaggagcactagctaggttttagcagtcgtctgttctttgttattacgagtgttgcatagaagccaggaccatgttttttacacgtctgtagctgcctgtagggatggtgtaataccaggtacgtgcgttgttaggtgatgctgttagcacgtaggttccaaacctatgagaccttgggctctgctgggtttatgtcgaactcgcagttgtgttataagaatcctactttgatagacttaaactgttctgcagctgtgagatcttttgaactc

SEQ ID NO: 84611 - DNA, 2918 bp, Zea Mays
ctggctccatccattgcccgggagcgcgcgggtggacccttttttttctcgggtgggtgggtcacgctgctcccctttctcgggccatgcctgacgctgcccttcgctttgcctttgttcttgcgtgccttgttggctagcctgtgttgttgccttccctctcgtttgctataaaccctcgatgcgatgccgcctcatgcacgcctctcacacattgtgcagtgcctggtgcctcagtgcctgccctgccctgccctttgatatggtttctggttatttttattattccctcccttctgctggcccggcgcgcgcgtctctctcccttgccatctgatcgatctcggcaaaaaaactgcgagatcttggcgtgctgccggcgataagattctccccggcgcaagcacatcaccagagcgagcaagtggttcttgagatcgccgggagagagggacagatcatgctcggggaacggtgtgtggcgaggaatgttgactagttgtttaatacgagatcaagaaggacaaagcaattaaacaagcagcaggctttgtgctttgtgggtgtccctcctctggttcactgccccgctctccactccagctccatacattagtttactcctcctgaggtacttttcttgcttcttacaagtggtggtggtggtggtggtctggacgtctggtctctgcgtgagcattggactagaggagcgggaagctgtgcggctcctctttcgtggtcaagatgaagttcatgaagcttggatcaaatccggatacatttcagggagatgggaatgaagtcagtattgcggcatctgaattggtgagcgacatcactgttcgtatagggactacaaagttttaccttcacaagtttccgctcctatccaagtgtgctcgcttccagaagttgattccaactactggcgatgaaaatattgagatccacatccatgatattcctggtggtgccaaggcttttgagatctgtgccaagttttgctatggcatgattgtcacactcaatgcctacaatgtgattgccgcccgctgtgccgcagagtacctggagatgaacgagactgttgacaagggcaatctgatctacaagatcgatatcttcctcagctcaagcatacaccggagctggaaagactccataattgttcttggtacaacaaaggctcatttaccttgggcagaggatcttaagctggtcagccactgcattgactctgttgcttcaaaagcctctattgacgtttcaaaagttgaatggtcatacacatacaaccgtaagaagctcacagttgagaatggtcatgattcgccatggaatggagtcaagcagcagcagtttgttccaaaggattggtgggtcgaagatctgacagatctcgacattgacgcctacaagcaagtcataacagcagtcaaaaccaagggtacggtgcccaaggatgtgatcggtgcggcgattaaagcctacacttacaagaagctcccgtcactaagcaaggtctcgatgatccatggcgacgcaaaagttcgggctatgctagttaccatcacatgcctgttgccatccgagaaaggttcggtttcgtgcagcttcctcttgaagttactgaaggcaacaaacttgctcaagtgtggagagatgtgcaggaaagagcttatgaagcgcatcgcacggcaactggaagaagcgtcagtgtcagatcttctgatccctacggtggatggggataccaccgtttacgacatcgacctgattcttagcattgttgaagaatttgtcagacaagatagcaagaatgcccagagacataacggtggtgaggtgaacgaccacgtatctgctcctagtgcgtcaatggttgcagtggccaaaactgtcgatggatatctcgcagaggttgcaagggacccaaatataccggtctacaagtttttcagcctagctgagacggtttcgggaggttcaaggccggttcatgatggactgtatcgtgccattgatatgtatctgaaggagcacccaagcttgggcaagagcgacaagaagaggctatgtgccctgatggactgcaagaagttgtcgcccgacgcgtgcgctcatgccgtgcagaacgagcgcctgcctctgaggatcgtggtgcaggtgctgtaccacgagcagacaagggcctgtgccgcagccaccgccatccgagccgacagcatcggcatcggctcctacgagagctcaaggtcaggcgccacaacgaacacagaggacgagtgggacggcgtcatggccgtggaggacctcagcctgtccaagacgacgaagctggtggacaaatgcgacacggcggccagtacggtcgtcgtggggaaggacaaggaccacggtggcaacaagggcgccaccggcagggtggccaaaggtggcgctggcgcggcgacaccaaagaaggcgctcgggaaaacggtgtccggcaaagggcagaccggggagcgcagcagctcggactcatccgacagcgccgtcgccgtcgcagtcttgaccagccaggagcatcccaagaggacgacccgcgcaaggaacgccgccaagtcggctgctgcgtagcccttccgctgagagaaatgctcaaggagcactagctaggttttagcagtcgtctgttctttgttattacgagtgttgcatagaagccaggaccatgttttttacacgtctgtagctgcctgtagggatggtgtaataccaggtacgtgcgttgttaggtgatgctgttagcacgtaggttccaaacctatgagaccttgggctctgctgggtttatgtcgaactcgcagttgtgttataagaatcctactttgatagacttaaactgttctgcagctgtgagatcttttgaactc

SEQ ID NO: 84612 - DNA, 1132 bp, Zea Mays
ttatcgctagctggtgatggtttgactgattccttacagggtttatcaagcagtgagtcaagggaatcctacgaaatatctgaagggtgtagaaatgaaggcaaagagaggtgcacagcttcttgaaaagcagaagagtgatgaagctaaaatacctggctgcaattcaaaatggagccagcaagaaggtggagaagtctggtgcgacacgggctatccaagattggtgaggaggccaggtgacatagctctgaccggacaagttagccaaaggtgcgcttgcttccaggaaaacgagctggacaaagccgggctagtggtgtacgaagggtgtgattacctgtcccagtcttgcaaagtaaactaggccgtgcgtctcccttccacggacttgttgctttggggggtactcaaacgcaaggttcatcagttacgggggcgctgcgacattccacgagcacccaccagccacgcatgcatcatgaaggcgggcctttctgctctgtcccgcgtgaaacacctggtgcaacgtcgtggttcagttcagatgcctagatacgcaattgattggaagatacccgcgatcgaatcaaatgatggtaacgctgcgccgccacgggcaagatctcgatcctaaaggctgtccgtgttaataggcatggggccttgggctgtcgattgatcgaggctgccttgcaagttgcgccgtctgcaccataggctacctccatcaatgaaatgcatttttttggagagtcattttagccatttgcatagcgaacagtgtgtgcgtgtgtggtacgcaaatttttgtttctccaagttggatcatgcatatgcagatttatacagtgccgtgcgagaggcattttacgtttgcatacccctaacccctttgcgtgatctgttggagatagatcccaaactcattctctctgctgcaaaatacacgctctttggattgacgatggtatatttccaaaccaaatgtcttccttaaagcacgaggactgctgcagccggttccccgtacgtttctcttgaactcattgaatcataaccatcactgcgtagtaggcagacttgaaagcaaaccatacagaaaacgtcaaaaatttgcagacagatccag

SEQ ID NO: 84613 - DNA, 2182 bp, Zea Mays
cgaagacgtacgttgactcgagtctgccccggctcagcccaatcagcttgtcggccagctcctctcgtcgatcgtttccaccaaatccaccggtctgccggccccgtcttccgctccgacgacccggagccggaggtctgtccagttggtagtcgcctcaagcaccaattcgcccctccgccgaagctaagctgctcggtcccaagggcatccctagctggctgaggcggatcggtagcaaaaccgatactgttacgttgccacggaggcagtttgatttggtggacctaacggccttgcggatctcttgggagccagagcgatggcgcgcggtgctcgcttcctccttgttctcgcgctgctggtcgcgctacttgccgtcgtcttccagctttatcgcctcaggaagccgaggttgtggacagtggaggagctatcgctgtacaatggaaccgatgaggggttgcccatactactcgcgattttgggctcagtgtttgacgtcacaaaagggaggtcacattatggccctggaggaggttatcatcattttgctgggagcattcttttgacagggatgcatcacgggcatttgtttctggaaattttacaggtgatggtttgactgattccttacagggtttatcaagcagtgaggtaaacagcattgttgattggaggaagttttactttgaaagatatatgtgagctcctttctaagagccaccttcatgttcttcatgttacttatttccttcatgaggcttcatagaactgtatgcagttttccaggaaatgctaggtgctaggctggcagcttggtggcacctagtccctaggcaggctagtggagcacgatttggaacactaattatgtgtttgtgctatagcacttgctctagattctcttgatcatgttcttaaatccatcaccaccatatgtccataccatgtgttattcagttagtaccaaatgtgtataccatatggaacacacagtggatcatgttagagaaactactcaactcataatatatacccttgtaacatttcttggcatatatgatgcagatttgctggtaaacttattggacgttactatgacagtcaagggaatcctacgaaatatctgaagggtgtagaaatgaaggcaaagagaggtgcacagcttcttgaaaagcagaagagtgatgaagctaaaatacctggctgcaattcaaaatggagccagcaagaaggtggagaagtctggtgcgacacgggctatccaagattggtgaggaggccaggtgacatagctctgaccggacaagttagccaaaggtgcgcttgcttccaggaaaacgagctggacaaagccgggctagtggtgtacgaagggtgtgattacctgtcccagtcttgcaaagtaaactaggccgtgcgtctcccttccacggacttgttgctttggggggtactcaaacgcaaggttcatcagttacgggggcgctgcgacattccacgagcacccaccagccacgcatgcatcatgaaggcgggcctttctgctctgtcccgcgtgaaacacctggtgcaacgtcgtggttcagttcagatgcctagatacgcaattgattggaagatacccgcgatcgaatcaaatgatggtaacgctgcgccgccacgggcaagatctcgatcctaaaggctgtccgtgttaataggcatggggccttgggctgtcgattgatcgaggctgccttgcaagttgcgccgtctgcaccataggctacctccatcaatgaaatgcatttttttggagagtcattttagccatttgcatagcgaacagtgtgtgcgtgtgtggtacgcaaatttttgtttctccaagttggatcatgcatatgcagatttatacagtgccgtgcgagaggcattttacgtttgcatacccctaacccctttgcgtgatctgttggagatagatcccaaactcattctctctgctgcaaaatacacgctctttggattgacgatggtatatttccaaaccaaatgtcttccttaaagcacgaggactgctgcagccggttccccgtacgtttctcttgaactcattgaatcataaccatcactgcgtagtaggcagacttgaaagcaaaccatacagaaaacgtcaaaaatttgcagacagatccag

SEQ ID NO: 84614 - DNA, 1827 bp, Zea Mays
cgcgcgtttctccacacggcccatctcgaagacgtacgttgactcgagtctgccccggctcagcccaatcagcttgtcggccagctcctctcgtcgatcgtttccaccaaatccaccggtctgccggccccgtcttccgctccgacgacccggagccggaggtctgtccagttggtagtcgcctcaagcaccaattcgcccctccgccgaagctaagctgctcggtcccaagggcatccctagctggctgaggcggatcggtagcaaaaccgatactgttacgttgccacggaggcagtttgatttggtggacctaacggccttgcggatctcttgggagccagagcgatggcgcgcggtgctcgcttcctccttgttctcgcgctgctggtcgcgctacttgccgtcgtcttccagctttatcgcctcaggaagccgaggttgtggacagtggaggagctatcgctgtacaatggaaccgatgaggggttgcccatactactcgcgattttgggctcagtgtttgacgtcacaaaagggaggtcacattatggccctggaggaggttatcatcattttgctgggagggatgcatcacgggcatttgtttctggaaattttacaggtgatggtttgactgattccttacagggtttatcaagcagtgaggtaaacagcattgttgattggaggaagttttactttgaaagatatatatttgctggtaaacttattggacgttactatgacagtcaagggaatcctacgaaatatctgaagggtgtagaaatgaaggcaaagagaggtgcacagcttcttgaaaagcagaagagtgatgaagctaaaatacctggctgcaattcaaaatggagccagcaagaaggtggagaagtctggtgcgacacgggctatccaagattggtgaggaggccaggtgacatagctctgaccggacaagttagccaaaggtgcgcttgcttccaggaaaacgagctggacaaagccgggctagtggtgtacgaagggtgtgattacctgtcccagtcttgcaaagtaaactaggccgtgcgtctcccttccacggacttgttgctttggggggtactcaaacgcaaggttcatcagttacgggggcgctgcgacattccacgagcacccaccagccacgcatgcatcatgaaggcgggcctttctgctctgtcccgcgtgaaacacctggtgcaacgtcgtggttcagttcagatgcctagatacgcaattgattggaagatacccgcgatcgaatcaaatgatggtaacgctgcgccgccacgggcaagatctcgatcctaaaggctgtccgtgttaataggcatggggccttgggctgtcgattgatcgaggctgccttgcaagttgcgccgtctgcaccataggctacctccatcaatgaaatgcatttttttggagagtcattttagccatttgcatagcgaacagtgtgtgcgtgtgtggtacgcaaatttttgtttctccaagttggatcatgcatatgcagatttatacagtgccgtgcgagaggcattttacgtttgcatacccctaacccctttgcgtgatctgttggagatagatcccaaactcattctctctgctgcaaaatacacgctctttggattgacgatggtatatttccaaaccaaatgtcttccttaaagcacgaggactgctgcagccggttccccgtacgtttctcttgaactcattgaatcataaccatcactgcgtagtaggcagacttgaaagcaaaccatacagaaaacgtcaaaaatttgcagacagatccag

SEQ ID NO: 84615 - DNA, 1767 bp, Zea Mays
ggtcctccccgcgcgtttctccacacggcccatctcgaagacgtacgttgactcgagtctgccccggctcagcccaatcagcttgtcggccagctcctctcgtcgatcgtttccaccaaatccaccggtctgccggccccgtcttccgctccgacgacccggagccggaggtctgtccagttggtagtcgcctcaagcaccaattcgcccctccgccgaagctaagctgctcggtcccaagggcatccctagctggctgaggcggatcggtagcaaaaccgatactgttacgttgccacggaggcagtttgatttggtggacctaacggccttgcggatctcttgggagccagagcgatggcgcgcggtgctcgcttcctccttgttctcgcgctgctggtcgcgctacttgccgtcgtcttccagctttatcgcctcaggaagccgaggttgtggacagtggaggagctatcgctgtacaatggaaccgatgaggggttgcccatactactcgcgattttgggctcagtgtttgacgtcacaaaagggaggtcacattatggccctggaggaggttatcatcattttgctgggagcattcttttgacagggatgcatcacgggcatttgtttctggaaattttacaggtgatggtttgactgattccttacagggtttatcaagcagtgagtcaagggaatcctacgaaatatctgaagggtgtagaaatgaaggcaaagagaggtgcacagcttcttgaaaagcagaagagtgatgaagctaaaatacctggctgcaattcaaaatggagccagcaagaaggtggagaagtctggtgcgacacgggctatccaagattggtgaggaggccaggtgacatagctctgaccggacaagttagccaaaggtgcgcttgcttccaggaaaacgagctggacaaagccgggctagtggtgtacgaagggtgtgattacctgtcccagtcttgcaaagtaaactaggccgtgcgtctcccttccacggacttgttgctttggggggtactcaaacgcaaggttcatcagttacgggggcgctgcgacattccacgagcacccaccagccacgcatgcatcatgaaggcgggcctttctgctctgtcccgcgtgaaacacctggtgcaacgtcgtggttcagttcagatgcctagatacgcaattgattggaagatacccgcgatcgaatcaaatgatggtaacgctgcgccgccacgggcaagatctcgatcctaaaggctgtccgtgttaataggcatggggccttgggctgtcgattgatcgaggctgccttgcaagttgcgccgtctgcaccataggctacctccatcaatgaaatgcatttttttggagagtcattttagccatttgcatagcgaacagtgtgtgcgtgtgtggtacgcaaatttttgtttctccaagttggatcatgcatatgcagatttatacagtgccgtgcgagaggcattttacgtttgcatacccctaacccctttgcgtgatctgttggagatagatcccaaactcattctctctgctgcaaaatacacgctctttggattgacgatggtatatttccaaaccaaatgtcttccttaaagcacgaggactgctgcagccggttccccgtacgtttctcttgaactcattgaatcataaccatcactgcgtagtaggcagacttgaaagcaaaccatacagaaaacgtcaaaaatttgcagacagatccag

SEQ ID NO: 84616 - DNA, 1760 bp, Zea Mays
gtcaaatggtcctccccgcgcgtttctccacacggcccatctcgaagacgtacgttgactcgagtctgccccggctcagcccaatcagcttgtcggccagctcctctcgtcgatcgtttccaccaaatccaccggtctgccggccccgtcttccgctccgacgacccggagccggaggtctgtccagttggtagtcgcctcaagcaccaattcgcccctccgccgaagctaagctgctcggtcccaagggcatccctagctggctgaggcggatcggtagcaaaaccgatactgttacgttgccacggaggcagtttgatttggtggacctaacggccttgcggatctcttgggagccagagcgatggcgcgcggtgctcgcttcctccttgttctcgcgctgctggtcgcgctacttgccgtcgtcttccagctttatcgcctcaggaagccgaggttgtggacagtggaggagctatcgctgtacaatggaaccgatgaggggttgcccatactactcgcgattttgggctcagtgtttgacgtcacaaaagggaggtcacattatggccctggaggaggttatcatcattttgctgggagggatgcatcacgggcatttgtttctggaaattttacaggtgatggtttgactgattccttacagggtttatcaagcagtgagtcaagggaatcctacgaaatatctgaagggtgtagaaatgaaggcaaagagaggtgcacagcttcttgaaaagcagaagagtgatgaagctaaaatacctggctgcaattcaaaatggagccagcaagaaggtggagaagtctggtgcgacacgggctatccaagattggtgaggaggccaggtgacatagctctgaccggacaagttagccaaaggtgcgcttgcttccaggaaaacgagctggacaaagccgggctagtggtgtacgaagggtgtgattacctgtcccagtcttgcaaagtaaactaggccgtgcgtctcccttccacggacttgttgctttggggggtactcaaacgcaaggttcatcagttacgggggcgctgcgacattccacgagcacccaccagccacgcatgcatcatgaaggcgggcctttctgctctgtcccgcgtgaaacacctggtgcaacgtcgtggttcagttcagatgcctagatacgcaattgattggaagatacccgcgatcgaatcaaatgatggtaacgctgcgccgccacgggcaagatctcgatcctaaaggctgtccgtgttaataggcatggggccttgggctgtcgattgatcgaggctgccttgcaagttgcgccgtctgcaccataggctacctccatcaatgaaatgcatttttttggagagtcattttagccatttgcatagcgaacagtgtgtgcgtgtgtggtacgcaaatttttgtttctccaagttggatcatgcatatgcagatttatacagtgccgtgcgagaggcattttacgtttgcatacccctaacccctttgcgtgatctgttggagatagatcccaaactcattctctctgctgcaaaatacacgctctttggattgacgatggtatatttccaaaccaaatgtcttccttaaagcacgaggactgctgcagccggttccccgtacgtttctcttgaactcattgaatcataaccatcactgcgtagtaggcagacttgaaagcaaaccatacagaaaacgtcaaaaatttgcagacagatccag

SEQ ID NO: 84617 - DNA, 3066 bp, Zea Mays
atgcctcccgctaccgtcaccctgctaccagcgtgcgccgtgctgctgctgtgctgccgtctctctccggcggccgcggcgtcgcccgccgatgtcggcgggggcggggccaggcgggtgctccaccagccattgttcccaatcgagtggaccccgccgccgtcgccgccgcctccgccggcaccggacttcacctccgatccggcgacgccggacggcccacccggcgacttcttccctccggcgccaccgacggcgccggccggcggcggaggtacgagcacgacgacgacgacgacgtcgtcctcgccgaccaccgtcgccgccgacgtcccgagcgcctcgtcaggatccggtgacgccggacaccacggcggccctgcgaaggggaccatcgtcgcggcgggggcggccgcggccgcggccatcgcgctgctggccttcgcgtgcgccttcctcgtcgcgggccgcgcgcgccgccacggggactcgcagaagctgctcagccccgaccgcggctccgcgcgccaccgctccgcgccctcggccgccgacttcctctacgtcggcacggtggagcccgccacgccgggccgccaccgtgggcccaccgccgccgacctcgttgggtccccgtaccgcaagctgcgcagcgagcgcgagcgcgcgcgccgcgggctgggccgcgcccgcgacgagcccaccgaccacccgagcccggagctccgcccgctcccgccgctgcgccgcgcggccacggtgggctccgacgacgacgatgcctactacacgccacgtcagcgctccgccggtggcggggtcggcggcgaaacgtggagcgaggccagcgcgtccagcccgcccaccaccaccaccgcgtcccgccgaagtctccccagcctcaccagcgactgctttcctccggtcgccgccattgctgcgccgacaccgtcccctgcgtggtcccgccgtacgcccccgcgcacgcgcttctctgccggctccacccctgacatcaaacaggtgatctcgccgtccccgcggtcggtgcaaccatccaaaccagcaccaacgccaccgccgcggccgccgccgacaccacctcctccaccgccgctgccgaagtctaccacagctccaaaacctcctcctcctccgccgccgccgccacgaatggttccatctaataccggcctgaagcccgcgcagccgctttccgaaccgacgtcgcgacgccggttgctcaagccgttaccacctgagggcccccgcattgccatgccgatgccgatcacggaggcaacggcacaggatagtatcgggagcgcgtcaatgcctaaacaggatgacgtggcagacggtatcgttggcaacggcgagccgcggccgaagctcaagccgctgcactgggacaaggttgaatgaggacatgatcgaggcattgttcatgaataactcaacgccgtccgcgctgccgagagatgcgggacggaagaccaccgtcccaccattcaggcaggaggagagggtgctcgaccccaagaaagcacagaacatcgccatcctgctccgtgcattgaatgttacgcgcgatgaggtctctgatgcactgttggatggcaacgctgaatgtttggggacagaacttttggagactttagtcaagatggctcctactaaagaggaagaactcagactacgagattataatggtgacgcatcgaagcttggttctgcagagcgctttctcaaagctgtgcttgatataccttttgccttcaagagagttgatgccatgctataccgagccaattttgaggccgaaataaattacttaatgaaatcttttgagacattagaggcagcctgcgaagatctcagaggcagcaggttgttcctgaaactactcgaggcggtgctgagaaccgggaaccggatgaatgtcggcacaaaccggggtgaggcaaaagctttcaagcttgacactctcctgaaacttgctgatgtcaagagcactgatggtaaaacaacgctgttgcatttcgtcgtccaagaaataattcgatcagaagatgcaaaatcagaaaaagaaagcgccatgattattcatagctctaaagacgagcagttgcggaagcaaggtctgaaacttgtctctggcctcagcagtgagctgggaaatgtcaagaaagcagccatgatggactttgatgtgttgcatggctatgttagtaagctagaaacaggcattgaaaagatcaagtcggtcttgcagctcgagaggcaatgcactcaaggccaaaagttctttacgacaatgcagagttttctgaagaaagccgagacggagatagacaaagtcagaggggaggagaagaaggccctggtgagagtaaaagacatcaccgagtacttccatggtgacaccgcgaaagaggaagcgcaccctcttaggatattcatggtggtgagggacttcctctcgacgttggatcatgtctgcaaggaggttggcaggttacagcaggacagaacggttattgggtcagccaggtctttcaggatttcagccacctcaatgccagttctaagtgtgtatggacaacgaagggagaacaactctgacgatgacagtgcatcatcctaggacaggacagcaaggctgagggacaaatcaccaagtcacaacactgaattttggaaggagcacagcacatcagctatgccatttttagctgctgaagcggatgtcgcattggcatttgccccgaggcacatgtttaaggttgggaggacgaaggtcgggagggggtggtatacttttggatcccgtggaaattctttttgtacaaaaggaaaataatcgtaacaggttctctctcttgttgggtgacttgcagaaactgaggtcgaggcttgaaaagctgcccactttcagtaagtagtgcactgcagcttctgggatatggcttcttatgtaactagtatgctcatctgatataacctgggaacatgctatctctattgttcatgtaaattttgctctcctcgtaatatatggtaaca

SEQ ID NO: 84618 - DNA, 3029 bp, Zea Mays
atgcctcccgctaccgtcaccctgctaccagcgtgcgccgtgctgctgctgtgctgccgtctctctccggcggccgcggcgtcgcccgccgatgtcggcgggggcggggccaggcgggtgctccaccagccattgttcccaatcgagtggaccccgccgccgtcgccgccgcctccgccggcaccggacttcacctccgatccggcgacgccggacggcccacccggcgacttcttccctccggcgccaccgacggcgccggccggcggcggaggtacgagcacgacgacgacgacgacgtcgtcctcgccgaccaccgtcgccgccgacgtcccgagcgcctcgtcaggatccggtgacgccggacaccacggcggccctgcgaaggggaccatcgtcgcggcgggggcggccgcggccgcggccatcgcgctgctggccttcgcgtgcgccttcctcgtcgcgggccgcgcgcgccgccacggggactcgcagaagctgctcagccccgaccgcggctccgcgcgccaccgctccgcgccctcggccgccgacttcctctacgtcggcacggtggagcccgccacgccgggccgccaccgtgggcccaccgccgccgacctcgttgggtccccgtaccgcaagctgcgcagcgagcgcgagcgcgcgcgccgcgggctgggccgcgcccgcgacgagcccaccgaccacccgagcccggagctccgcccgctcccgccgctgcgccgcgcggccacggtgggctccgacgacgacgatgcctactacacgccacgtcagcgctccgccggtggcggggtcggcggcgaaacgtggagcgaggccagcgcgtccagcccgcccaccaccaccaccgcgtcccgccgaagtctccccagcctcaccagcgactgctttcctccggtcgccgccattgctgcgccgacaccgtcccctgcgtggtcccgccgtacgcccccgcgcacgcgcttctctgccggctccacccctgacatcaaacaggtgatctcgccgtccccgcggtcggtgcaaccatccaaaccagcaccaacgccaccgccgcggccgccgccgacaccacctcctccaccgccgctgccgaagtctaccacagctccaaaacctcctcctcctccgccgccgccgccacgaatggttccatctaataccggcctgaagcccgcgcagccgctttccgaaccgacgtcgcgacgccggttgctcaagccgttaccacctgagggcccccgcattgccatgccgatgccgatcacggaggcaacggcacaggatagtatcgggagcgcgtcaatgcctaaacaggatgacgtggcagacggtatcgttggcaacggcgagccgcggccgaagctcaagccgctgcactgggacaaggtgcgggcgacctccgaccgcgccatggtctgggaccagctgaagtcaagctcattccagttgaatgaggacatgatcgaggcattgttcatgaataactcaacgccgtccgcgctgccgagagatgcgggacggaagaccaccgtcccaccattcaggcaggaggagagggtgctcgaccccaagaaagcacagaacatcgccatcctgctccgtgcattgaatgttacgcgcgatgaggtctctgatgcactgttggatggcaacgctgaatgtttggggacagaacttttggagactttagtcaagatggctcctactaaagaggaagaactcagactacgagattataatggtgacgcatcgaagcttggttctgcagagcgctttctcaaagctgtgcttgatataccttttgccttcaagagagttgatgccatgctataccgagccaattttgaggccgaaataaattacttaatgaaatcttttgagacattagaggcagcctgcgaagatctcagaggcagcaggttgttcctgaaactactcgaggcggtgctgagaaccgggaaccggatgaatgtcggcacaaaccgggaaataattcgatcagaagatgcaaaatcagaaaaagaaagcgccatgattattcatagctctaaagacgagcagttgcggaagcaaggtctgaaacttgtctctggcctcagcagtgagctgggaaatgtcaagaaagcagccatgatggactttgatgtgttgcatggctatgttagtaagctagaaacaggcattgaaaagatcaagtcggtcttgcagctcgagaggcaatgcactcaaggccaaaagttctttacgacaatgcagagttttctgaagaaagccgagacggagatagacaaagtcagaggggaggagaagaaggccctggtgagagtaaaagacatcaccgagtacttccatggtgacaccgcgaaagaggaagcgcaccctcttaggatattcatggtggtgagggacttcctctcgacgttggatcatgtctgcaaggaggttggcaggttacagcaggacagaacggttattgggtcagccaggtctttcaggatttcagccacctcaatgccagttctaagtgtgtatggacaacgaagggagaacaactctgacgatgacagtgcatcatcctaggacaggacagcaaggctgagggacaaatcaccaagtcacaacactgaattttggaaggagcacagcacatcagctatgccatttttagctgctgaagcggatgtcgcattggcatttgccccgaggcacatgtttaaggttgggaggacgaaggtcgggagggggtggtatacttttggatcccgtggaaattctttttgtacaaaaggaaaataatcgtaacaggttctctctcttgttgggtgacttgcagaaactgaggtcgaggcttgaaaagctgcccactttcagtaagtagtgcactgcagcttctgggatatggcttcttatgtaactagtatgctcatctgatataacctgggaacatgctatctctattgttcatgtaaattttgctctcctcgtaatatatggtaaca

SEQ ID NO: 84619 - DNA, 3163 bp, Zea Mays
atgcctcccgctaccgtcaccctgctaccagcgtgcgccgtgctgctgctgtgctgccgtctctctccggcggccgcggcgtcgcccgccgatgtcggcgggggcggggccaggcgggtgctccaccagccattgttcccaatcgagtggaccccgccgccgtcgccgccgcctccgccggcaccggacttcacctccgatccggcgacgccggacggcccacccggcgacttcttccctccggcgccaccgacggcgccggccggcggcggaggtacgagcacgacgacgacgacgacgtcgtcctcgccgaccaccgtcgccgccgacgtcccgagcgcctcgtcaggatccggtgacgccggacaccacggcggccctgcgaaggggaccatcgtcgcggcgggggcggccgcggccgcggccatcgcgctgctggccttcgcgtgcgccttcctcgtcgcgggccgcgcgcgccgccacggggactcgcagaagctgctcagccccgaccgcggctccgcgcgccaccgctccgcgccctcggccgccgacttcctctacgtcggcacggtggagcccgccacgccgggccgccaccgtgggcccaccgccgccgacctcgttgggtccccgtaccgcaagctgcgcagcgagcgcgagcgcgcgcgccgcgggctgggccgcgcccgcgacgagcccaccgaccacccgagcccggagctccgcccgctcccgccgctgcgccgcgcggccacggtgggctccgacgacgacgatgcctactacacgccacgtcagcgctccgccggtggcggggtcggcggcgaaacgtggagcgaggccagcgcgtccagcccgcccaccaccaccaccgcgtcccgccgaagtctccccagcctcaccagcgactgctttcctccggtcgccgccattgctgcgccgacaccgtcccctgcgtggtcccgccgtacgcccccgcgcacgcgcttctctgccggctccacccctgacatcaaacaggtgatctcgccgtccccgcggtcggtgcaaccatccaaaccagcaccaacgccaccgccgcggccgccgccgacaccacctcctccaccgccgctgccgaagtctaccacagctccaaaacctcctcctcctccgccgccgccgccacgaatggttccatctaataccggcctgaagcccgcgcagccgctttccgaaccgacgtcgcgacgccggttgctcaagccgttaccacctgagggcccccgcattgccatgccgatgccgatcacggaggcaacggcacaggatagtatcgggagcgcgtcaatgcctaaacaggatgacgtggcagacggtatcgttggcaacggcgagccgcggccgaagctcaagccgctgcactgggacaaggtgcgggcgacctccgaccgcgccatggtctgggaccagctgaagtcaagctcattccagttgagatcttgcttcgtactacatgcgctgttaatggctgggttgaatgaggacatgatcgaggcattgttcatgaataactcaacgccgtccgcgctgccgagagatgcgggacggaagaccaccgtcccaccattcaggcaggaggagagggtgctcgaccccaagaaagcacagaacatcgccatcctgctccgtgcattgaatgttacgcgcgatgaggtctctgatgcactgttggatggcaacgctgaatgtttggggacagaacttttggagactttagtcaagatggctcctactaaagaggaagaactcagactacgagattataatggtgacgcatcgaagcttggttctgcagagcgctttctcaaagctgtgcttgatataccttttgccttcaagagagttgatgccatgctataccgagccaattttgaggccgaaataaattacttaatgaaatcttttgagacattagagcctgcgaagatctcagaggcagcaggttgttcctgaaactactcgaggcggtgctgagaaccgggaaccggatgaatgtcggcacaaaccggggtgaggcaaaagctttcaagcttgacactctcctgaaacttgctgatgtcaagagcactgatggtaaaacaacgctgttgcatttcgtcgtccaagaaataattcgatcagaagatgcaaaatcagaaaaagaaagcgccatgattattcatagctctaaagacgagcagttgcggaagcaaggtctgaaacttgtctctggcctcagcagtgagctgggaaatgtcaagaaagcagccatgatggactttgatgtgttgcatggctatgttagtaagctagaaacaggcattgaaaagatcaagtcggtcttgcagctcgagaggcaatgcactcaaggccaaaagttctttacgacaatgcagagttttctgaagaaagccgagacggagatagacaaagtcagaggggaggagaagaaggccctggtgagagtaaaagacatcaccgagtacttccatggtgacaccgcgaaagaggaagcgcaccctcttaggatattcatggtggtgagggacttcctctcgacgttggatcatgtctgcaaggaggttggcaggttacagcaggacagaacggttattgggtcagccaggtctttcaggatttcagccacctcaatgccagttctaagtgtgtatggacaacgaagggagaacaactctgacgatgacagtgcatcatcctaggacaggacagcaaggctgagggacaaatcaccaagtcacaacactgaattttggaaggagcacagcacatcagctatgccatttttagctgctgaagcggatgtcgcattggcatttgccccgaggcacatgtttaaggttgggaggacgaaggtcgggagggggtggtatacttttggatcccgtggaaattctttttgtacaaaaggaaaataatcgtaacaggttctctctcttgttgggtgacttgcagaaactgaggtcgaggcttgaaaagctgcccactttcagtaagtagtgcactgcagcttctgggatatggcttcttatgtaactagtatgctcatctgatataacctgggaacatgctatctctattgttcatgtaaattttgctctcctcgtaatatatggtaaca

SEQ ID NO: 84620 - DNA, 2123 bp, Zea Mays
atctcctttgctggcacgaccaaaaacttctcttcatccaatctgcaactccctcccgcaccaaaccttacccaggactaggaggaggaaagaaatggaggaataaagcagagtgagaagagaagaggaagcgaggcctctgctccagctcctatacaggagcgagcgacccagacgcctctgcttcggtgcttcccagtgccagtagtcgccaatccgcccaggtctcatgcttcggtccacgcacccacccagccccagcagcggcagctccgacgccacgatggtcgggggcggcgccccgagcggcgccaagctgctgcagatcctcaacgtgcgggtggtgggcagcggcgaccgcgtggtggtgctgtcccacgggttcggcacggaccagtcggcgtggagccgcgtgctcccctacctcacccgcgaccaccgcgtggtgctctacgacctcgtctgcgccggcagcgtcaacccggagcacttcgacttccgccgctacgacacgctggactcgtacgtcgacgacctgctcgccatcctcgacgcgctccgcgtctcgcgctgcgccttcgtcgggcactccgtgtccgccatgatcggcatcctcgcctccatccgccgccccgagctcttcgccaagctcgtcctcatcggcgcgtcgcccaggttcctgaacgaccacgactaccacggcgggttcgagctgccggagatccagcaggtgttcgacgcgatggcggccaactactcggcgtgggcgaccgggtacgccccgctggcggttggcgcggacgtgcccgcggcggtgcaggagttcagccgcacgctcttcaacatgcggccggacatctcgctccacgtctgccgcaccgtgttcaacacggacctccgcggcgtgctgggcatggtgcgcgccccctgcgtggtggtgcagaccacccgcgacgtctccgtcccggcctccgtcgccgcctacctcaaggcccacctcggcggccgcaccgccgtcgagttcctccagaccgagggccacctcccgcacctcagcgcccccggcctcctcgcccaggtgctccgccgcgcgctcgcccggtactagcagccgggccggccaggcctgtttttaccgcctcgatttacccctgccgagaccgagaatcaagaaatggcgcgactcgcgccgtttgctgtgcctatgcgcgccatgactgtagtacaacttgttctggtaggtagtggtacccgatttcttttcgctttttatgagcagttgcagtgttgcactgctactccgcatcttgccttcgtctcctgcacctccacccaacccaaggacagataagtgggcctgctcgggacacgtggcgagtagtcgaggcggcgcacgagctcgttccgccttcgccttcgccctgtcccatccgcaactgcaactagtgctgggaattcagccggaccgccctcatcgtgattcgtgttaaacagattagggttaggagagtctaaatttttttatataccgtgctagtctgaagtataaaagatccagctcggtcctaaattatatcatgcatttgttgtaccggtccaaacctgacctacatatttgatcatataaaattaaaatattacaaccatgtaaaatttatagcttactaaattaaagatattaaacaatgttagggtctgtttggttgagctgtggctgtgaaaaaagttgttgtgggctgtgagctgtggaaaaagctgctgtaggctggaagctgttgaaaagctaaaaaccgttcggtgaaaaccactaaaagtcgttaaaaattcttcgatatatgttttcatagttatatccgaaaagccactaaaagcaggtccaggggtgctttcagatttgcactacgagaaagtcggcttttagaaaaagctgcttcctggatccagccctttggttggcttttggcttttagggggggcaaaagccaaagccaaaagtcaaaccaaacacacccttagtattatttgaccatataaagtctaaatatcacaataatataaaataaataatttaataaattaaagaaattaaacaacatggtcttcattgggctttatctttattg

SEQ ID NO: 84621 - DNA, 1596 bp, Zea Mays
gcatgtgaacttggcaaacatactagatctacctatcctagtgttggtcttcgtagttgtgaaccgtttattctaatacattcagatgtttggggtccttgttcagtcacttctgtgaatggtgcaaagtggtacgtcacttttattgattgttacactcgtatgacttggatctatatacttaagcataaaaacgaggtgttaaagtgctttcaagactttcataaactggttgcaaatcagtttgatgcaagaattcgggttatcaggactgacaatggaacagagtatgtgaataatgaatttagatcatatctgtcaagtcaaggaatcattcaccaaacaacttgtcctggaactccacctcagaatggtgtagcagagaggaaaaatcgtcatttgttggaagtagcaagatctctcatgtttcagatgaatgtgcctaagtatctgtggagtgaggcagtaatgacggccacatacctcatcaaccgaatgccctcaagaatacttaatatgaaatcacctgcagaacttctattgggaaagtgtgactttcgtgttccaccaaaggtctttggttgtgtctgttttgtcaaagatcatcgacctatggtgaacaagttggatcctcaagcaatcaagtgcatttttgtgggatattcatctactcagaaaggatacaagtgttgggaccctattgataagagattgttggtgagtatggatgtaacatttcgtgaggaagacccatactatagaaagaaagttgatccatatcaaattctggaggacttctctccggtcaatggaggggaccgtagagagggggaggatgatagtggtcgaggtggtgatgaggctagtggtgatgaggctagtggagcttcaggaggagtgattgttggaggtatgattccacgagaagtggagaaagggataactacgcaggtattgagtgatgatgaaagtagtggggatcatgatgatccaactattgatattcaggaggagacagaggatgatgaggcagtgattgttgggtcaatcccatgtcctatggcagggaagttgaatgagaaacagggggagcaacatgattgttccattggggcaaaggtgaatgacaaacagggggagcaacctatagtatactatcgaaagcggacgaagaagcagggggagcaaccacaacctggatgtgttgaagctccagtcccatatctctcttcagactcctctccagacccagctgatgaacatattctcctgtgtttgaagcagtttgctcccagcggtggaagggcttcagtagagttgagcaacataactggcaaccagatgtaactgcaagatggtgctatatgcttctcaaactatgagaggcactgagagtgaagaataaagggcaagcaaacaattcagccatgagttaccagatcaagtaaatgcctaagcctctaatgtaagagctgcaggtgtgtcaagtagcgtccttgtccccattcacatatgtctatacacaaaaaaactgagctcatactacagaatgtagacttttcgagagcatgaacatccctagctggtagttgcata

SEQ ID NO: 84622 - DNA, 4140 bp, Zea Mays
tggcgagagcaaagagcagcggctcaccgtctccgcgtgggccggctaggcgcagccgcgcggtcaccagcagcagaccgcaccgagtcgccaaccgcagcgccctgccacctccacgcatcgccactccgacaaacgagctgctgctgacttgcgtttgcgtcctgtctacacggaggctgaaacaggaggaaaggaggagaggaggacgaggtctacgagtggagtagagagctcgagaggctgcgagaaaggagtcgagtgtgtgactctatgcttctgtgaaaatgagtacagaggaggctgcgaagaagacagaaattgatggtagtggttcaggagggattacaaagagtgagatgatgagtgaaatgagaagtatgatccaggagctcatggggttagggttgattggtgctagggcaaatacaggtacatctgagttgaagttggaacttgtgcctaatgatgtgaagctagaaggtagtaagaattatctaagctggttcagaagagtgcgtgtactcctagggggcaagggagtggagcattatttggaggagacatgtgttgagccgattgataagctcggtgcagaatggagaatctggcatgcgacaaactctgtgatagttgcatggttattggcatccatgtctcccactgttagcaagagggtggaagccatgcgtactgcatcacaaatctggaagaccttgagtaatatatactctcgaaaggggaatgtgatggtgatgatggaaattcaaaacaaggcagatgcagtaaagcagatgggaagaccagtggaacaatatgctagtgagctccaacagttatggggagagctggatcattatgctcctctccaaatggtttgcccacaggatgcacaaatggttcataagtgggtagaggataggagagtgacccactttctaaagaatctggattctgagttcgagagcaggagagcggtcttttgtcaccaggagagtcttcctaccatggatgaggttgtgtctgccatgatagatgaagagagcagacttcgagtgatgagtagtggtaatcatgtgaagccagcatacgttgcaattgaggatagagaatgttataattgtggggaaaggggacacctgagttacaattgtcccaaccctagaggaaatggtggcaagggaggatctcgtggaggacgaggtggtactcgtggtcgtgggagctatggaagaggtcgcggaggtcgtggtagaggccgtggtggctccagggccaacatagctaccactgaagagagtctctctgttactctatctggggaacaagctaagcaatgggagcagtggcagaagggcaagtcttccgagtgcctcacttcacctgatgggcaagccaccaactccttcggtaactttgccaactacgcccacatgggcgaaggaggagtgattgttggaggtatgattccacgagaagtggagaaagggataactacgcaggtattgagtgatgatgaaagtagtggggatcatgatgatccaactattgatattcaggaggagacagaggatgatgaggcagtgattgttgggtcaatcccatgtcctatggcagggaagttgaatgagaaacagggggagcaacatgattgttccattggggcaaaggtgaatgacaaacagggggagcaacctatagtatactatcgaaagcggacgaagaagcagggggagcaaccacaacctggatgtgttgaagctccagtcccatatctctcttcagactcctctccagacccagctggtaatgtctctcgaatccatatttctcccattcctgaacatgaagaattacctcttgcgcaaagaagagttcctagattaaatgctgggaaacctccttctcgttattgttatgaacatgacattgctaagtatgtctcatactctagtgtctctcctgcatatagaactttcattgcatctctacaaacaatatctattccgaaggattggaggtgtgccaaacaggatccaaagtggaaggatgccatgaaggaagagctgcttgccctgcagaagaacaagacatgggaacttgttcaccttcctgaaggaaagaaggcggtggggtgcaagtgggtcttcacagtaaagcagactcctgaaggaaagattgacaggtacaaagcaagactggtggcgaagggatatagtcagacatatgggatcgactatgatgagacctttgcacctgtggcaaaaatgggcacagtgaggaccttaatctcatgtgcggccaactttggttggcctcttcatcaactggatgtgaagaatgcatttcttcatggtgatctgaaggaagaggtctatatggaaatcccacctggatttgcaaataaacagactattggaaaagtgtgtagacttaagaagtcgctctatggcctaaagcagtcaccacgtgcgtggtttgatagattcaggcgagttgtgtgtgatatgggttatcatcaatgcaatggagatcacacagtcttctacaaacatcagggctcgtgtatcactattctagcggtttatgttgatgatatagtgatcactggagatgatgcgaaggagatcaagaaactgaaggaaaggctaagtagagcctttgaggtaaaggaccttggaccacttcgatacttccttgggattgagatagctagatcatctcaaggaattattctctcccaaagaaagtatgtcctcgaccttttgtcagagacaggaatgcttgggtgtcgcccatgtggttcacccattgataggaatcaccaaacttgtgctgagtcaggtgaccctatagatcgggaaagatatcagagggtagttggtcgtttgatatatctttgccatacaagaccggacattgcttatgcagtaagtgtggtgagtaggtatatgcatgatcctagaactgggcatatgaagatagtttatcaaatcatgagatacctgaagggaacccctggcaagggattgtgttttagaccaaatcaacatatgaatttggatgggtattgtgatgcggactgggcgagcagtagggatgatcggagatccacttctggatattgtgtatttgtgggaggtaatctggtttcatggagaagcaagaagcaagctgtggtatctcgatccactgcagaggctgaacatagagcaatggctctagcagtttgtgaaatgatatggttgaagagtctcttgaaggagcttcaagtgttgaagaatgagacaatgttgctccattgtgacaatgtggcagcaatcaacatagcaagtaatccagttcagtttgatcgcatgaagcatgtggagattgataagttcttcatcaaagagaagattgatagtggggctttgaagttgaagtatgtaaaatctcgtaatcaagtagcggatagtctcacaaaaggtttaggtcctaaggataatgagttggcatgtaacaagatgagaatgttaaatatatttggcccatcttgagggggagtgttggtgtattatgaacaagttgaagggtctatttgtaaagtggtaaagtataatagaaaagagtgagggtgctgtggaagattaacacacaccagaaaatcaacaataaacaaaggaaaagaattaaatacctccatttttgcttaaaatttcttctaaatgtaccaataacgcggaaatggcatcgtcaaaaacttggtccctacctgccactcgatactttcacagctgatcagaagctcctttgtcagatgaacatattctcctgtgtttgaagcagtttgctcccagcggtggaagggcttcagtagagttgagcaacataactggcaaccagatgtaactgcaagatggtgctatatgcttctcaaactatgagaggcactgagagtgaagaataaagggcaagcaaacaattcagccatgagttaccagatcaagtaaatgcctaagcctctaatgtaagagctgcaggtgtgtcaagtagcgtccttgtccccattcacatatgtctatacacaaaaaaactgagctcatactacagaatgtagacttttcgagagcatgaacatccctagctggtagttgcata

SEQ ID NO: 84623 - DNA, 1533 bp, Zea Mays
ccattttctaaactgggacttctcgagtaaatatttgggctcatgagaacactttatctccgtatttaaggtaagaaacatgttggatgatatgttagagaaaaatctcgaaatagtcaaagctccgtgcttgaacttagtagaccccatggaaacaggaggaggaataaagttatttaaaaaagcaccacctggtattagcatggattctacggataaatggcacgtgcaactcaagcgaccaagaatcgtgcctggggaagaggtcgatgagaaatcaaagaagttccggcatatgctccggtctgttgttgtcgacggcagtgacatagttgtttctgcaaagaaagcatctgagagatcattggctagattggaagtgagagaagctgcagcaaaggcaaaagccaagagggaggaagaaagggtgcaggaactaaagaaggttaggggagagaaatggcttccttctgttgctagacaaatgaaggaggaaaaggcttgggagctgcgaaggcaatgagctgatgatgcgccagatcaatggggctgcgtaggcttatctccgagtccagttatcctggtgcctgttctgagtggccacaaaagtaatgtggcctatttctgaagtttggcgatggcaataggattagcagaaagagtacatagaatggaagctttgttctaactgagaatgtagcactggatatgccagcgttcatttccatttaacttatgtagtaaaatttgtggctctgatgttccagaatatgatttgacatcaaactcttttggaagtgcattgcgaatcgttgtcttgtttctatttttgttacgcagaagacaggcacatgaatgaatggtactctctccattccatattataacctccattctaaattactactaagaagctttgtctttctacgtacttcctccgttcttgaatatttgtcgtccgctagtttattttgaactaaaatatgacaaataaaaaagatcggagggattacataattgcgactttgttgcgtccttagatcgacctagtgaggtatacaagtttggtgcaatgatacaatgtgcatgttattcaatttgtttgatggagcaacgatttggtctaaaacctaaaccctaaaaccgtgtgggggctcagcaagaccgcttgaccgactgtggtggcgccggccagaggctcgggcaggtgcagggtggtggcgacggcggcggacttctcttcctcttcttccacctcctttgtcccctttcctcgcatggtggcgtcgacagggcaggcctgggctggcggatttggtgccttggtggttggatccggcgcccctaggacaggggcagcatcggtggttcgaccattcggcgggggggggggctacgctggccgggggcaccgggttctccgtcttcgaggctggatccaaggtccattgggctagggaaaagcccagtgtcgcggcactcgcacctgatggcagctggcttcggtagctgcctgtgagtgccagggctaac

SEQ ID NO: 84624 - DNA, 1162 bp, Zea Mays
gtcaaattgctagggtgcatgttggaagttatggtctattggtaaggttgacatcattggagtaagttgctattcttcgaaggacctgtggacatggaaaaacgaagggcttgtcctccgtggcgaggagaagaatgtaacacatgatcttcacaaatccaatgtcctggagagacccaaggtgatatacaatgatcggactggcaagtatgtgatgtggatgcacgtagatgatgctaactacaccaaagcttcagttggtgtggccatcagtgactctccgacaggcccattcacttacctctacagcaagcgtccgcatgactgtgagagtagagacatgaccatcttcaaggatgatgatgggaaggcctacctgatatactcttccgaggacaacagcgagctccacattggcccgctaaccgatgactaccttgacgtcactgatgccatgcgaaggcttctcatcgcgcagcatcgagaagctcctgcgctcttcaagcatgaaggcacctactatatggtgacctctggctgtacaagctgggctccaaatactgcgctggcccacgcagcgacatcagtgatgggaccttgggagacactggggaacccctgtgtgggagggaatgaggtcttcagatcaacgacattcttctcccagagcacatttgtcttgccagttccagggctgccgggctcattcatcttcatggctgatcggtggaacccgtctgatcttagagattcgcggtatgtttggctgcctctgacgatcgggggagtccctgatgaagccgcagactacagcttcatgttccctctctggtcccgggtgtccatttactggcacagacggtggcgtctccctgaggagtggagggattattgaaactctgaagtttctttttttttcataagaatcgaaggtcttatacgctgttacattgatagataccaaagtaaagtattgacatttgacacgttggtctacattgtataggtcagatgtagatgcagggttcgtaaatgtttagttttttgagtttgcactcaaatcaaataaaactattgtggccttttgggcgaggtagtttctagaataatctgtctgcattggtcttttcatttgatctataccctccgtcctcgaataaat

SEQ ID NO: 84625 - DNA, 2008 bp, Zea Mays
cgcggttcttgctgaactatccggcctccttacgaatctatggccgccgatcatgatgagctgttttaccggactcttgatacagttctccatttctgtcgcttcatttttggccgtggccagggagcgggtagcaggccgtgattagctgctacaattcaggccccattcatgctgctccactccaatcgcatctttcttgattcggcgcgccaatcagcctcttcttttcataaattccaaccgctgtttctttccgttctagcttgtgcagttttcagcttaactcctccacttttgctgcagcgcgtatcggttggagtagataagcggcgccatgggtatgaggagcaggcacccaaaggcgttgggtttccgctgccacccggcaagccaccggtccctaactctggcactatggagcctagcggcattggtcgtcgttgtgaatttccatcttctcatcgttcataaggaggacgatgagagtatgagcacacacgagatccgccgatcgattatgagggagctggaggtggtggaggaggagaagttccggctagctcctccccggagccggaggaatccccgggctgtgcgccgcaagggagagaagaagaagcctacaatagtggatgagttcctggatgagtcttcggctgtgcatgacatgttcttcccagaactgaatacggctgtagatccaatcaatggtgcaaatggcagcaagtacttctactacccaggcagaatttggttggacactgacggaaaaccaattcaagctcatggaggaggtgtcctctatgataagaggaccaccacctatttcttctacggggagaataaggatggcaaaacctacagagctcataggaagggagcagacagggttgacatcattggagtaagttgctattcttcgaaggacctgtggacatggaaaaacgaagggcttgtcctccgtggcgaggagaagaatgtaacacatgatcttcacaaatccaatgtcctggagagacccaaggtgatatacaatgatcggactggcaagtatgtgatgtggatgcacgtagatgatgctaactacaccaaagcttcagttggtgtggccatcagtgactctccgacaggcccattcacttacctctacagcaagcgtccgcatgactgtgagagtagagacatgaccatcttcaaggatgatgatgggaaggcctacctgatatactcttccgaggacaacagcgagctccacattggcccgctaaccgatgactaccttgacgtcactgatgccatgcgaaggcttctcatcgcgcagcatcgagaagctcctgcgctcttcaagcatgaaggcacctactatatggtgacctctggctgtacaagctgggctccaaatactgcgctggcccacgcagcgacatcagtgatgggaccttgggagacactggggaacccctgtgtgggagggaatgaggtcttcagatcaacgacattcttctcccagagcacatttgtcttgccagttccagggctgccgggctcattcatcttcatggctgatcggtggaacccgtctgatcttagagattcgcggtatgtttggctgcctctgacgatcgggggagtccctgatgaagccgcagactacagcttcatgttccctctctggtcccgggtgtccatttactggcacagacggtggcgtctccctgaggagtggagggattattgaaactctgaagtttctttttttttcataagaatcgaaggtcttatacgctgttacattgatagataccaaagtaaagtattgacatttgacacgttggtctacattgtataggtcagatgtagatgcagggttcgtaaatgtttagttttttgagtttgcactcaaatcaaataaaactattgtggccttttgggcgaggtagtttctagaataatctgtctgcattggtcttttcatttgatctataccctccgtcctcgaataaat

SEQ ID NO: 84626 - DNA, 1863 bp, Zea Mays
cgcggttcttgctgaactatccggcctccttacgaatctatggccgccgatcatgatgagctgttttaccggactcttgatacagttctccatttctgtcgcttcatttttggccgtggccagggagcgggtagcaggccgtgattagctgctacaattcacgcgtatcggttggagtagataagcggcgccatgggtatgaggagcaggcacccaaaggcgttgggtttccgctgccacccggcaagccaccggtccctaactctggcactatggagcctagcggcattggtcgtcgttgtgaatttccatcttctcatcgttcataaggaggacgatgagagtatgagcacacacgagatccgccgatcgattatgagggagctggaggtggtggaggaggagaagttccggctagctcctccccggagccggaggaatccccgggctgtgcgccgcaagggagagaagaagaagcctacaatagtggatgagttcctggatgagtcttcggctgtgcatgacatgttcttcccagaactgaatacggctgtagatccaatcaatggtgcaaatggcagcaagtacttctactacccaggcagaatttggttggacactgacggaaaaccaattcaagctcatggaggaggtgtcctctatgataagaggaccaccacctatttcttctacggggagaataaggatggcaaaacctacagagctcataggaagggagcagacagggttgacatcattggagtaagttgctattcttcgaaggacctgtggacatggaaaaacgaagggcttgtcctccgtggcgaggagaagaatgtaacacatgatcttcacaaatccaatgtcctggagagacccaaggtgatatacaatgatcggactggcaagtatgtgatgtggatgcacgtagatgatgctaactacaccaaagcttcagttggtgtggccatcagtgactctccgacaggcccattcacttacctctacagcaagcgtccgcatgactgtgagagtagagacatgaccatcttcaaggatgatgatgggaaggcctacctgatatactcttccgaggacaacagcgagctccacattggcccgctaaccgatgactaccttgacgtcactgatgccatgcgaaggcttctcatcgcgcagcatcgagaagctcctgcgctcttcaagcatgaaggcacctactatatggtgacctctggctgtacaagctgggctccaaatactgcgctggcccacgcagcgacatcagtgatgggaccttgggagacactggggaacccctgtgtgggagggaatgaggtcttcagatcaacgacattcttctcccagagcacatttgtcttgccagttccagggctgccgggctcattcatcttcatggctgatcggtggaacccgtctgatcttagagattcgcggtatgtttggctgcctctgacgatcgggggagtccctgatgaagccgcagactacagcttcatgttccctctctggtcccgggtgtccatttactggcacagacggtggcgtctccctgaggagtggagggattattgaaactctgaagtttctttttttttcataagaatcgaaggtcttatacgctgttacattgatagataccaaagtaaagtattgacatttgacacgttggtctacattgtataggtcagatgtagatgcagggttcgtaaatgtttagttttttgagtttgcactcaaatcaaataaaactattgtggccttttgggcgaggtagtttctagaataatctgtctgcattggtcttttcatttgatctataccctccgtcctcgaataaat

SEQ ID NO: 84627 - DNA, 2091 bp, Zea Mays
cttcatcgtcatcgaccccgtaacccaaccgaaggcacgctgcccgggcacaggccaggtgttcggggcttcgggcgcccctccactccattctcaacacgcccccacgccgtacccaccacaatgtgacgggcgacctttccagagcgacgccgctgctcgctgttagccaaggaagccagacacccggccataccaattaccaaaaccactcatcaggtcgcgttgccagccgcacaaaccaagacagacccccctaatctctctggcatcgcggctcgtgctaagctaatcgaggcgcccccaaccacctctggccaagatctcgataaggactagcccatgcctttcatttgtcctcttcgcttctctggatcaacctgccaatgcgcgtatcggttggagtagataagcggcgccatgggtatgaggagcaggcacccaaaggcgttgggtttccgctgccacccggcaagccaccggtccctaactctggcactatggagcctagcggcattggtcgtcgttgtgaatttccatcttctcatcgttcataaggaggacgatgagagtatgagcacacacgagatccgccgatcgattatgagggagctggaggtggtggaggaggagaagttccggctagctcctccccggagccggaggaatccccgggctgtgcgccgcaagggagagaagaagaagcctacaatagtggatgagttcctggatgagtcttcggctgtgcatgacatgttcttcccagaactgaatacggctgtagatccaatcaatggtgcaaatggcagcaagtacttctactacccaggcagaatttggttggacactgacggaaaaccaattcaagctcatggaggaggtgtcctctatgataagaggaccaccacctatttcttctacggggagaataaggatggcaaaacctacagagctcataggaagggagcagacagggttgacatcattggagtaagttgctattcttcgaaggacctgtggacatggaaaaacgaagggcttgtcctccgtggcgaggagaagaatgtaacacatgatcttcacaaatccaatgtcctggagagacccaaggtgatatacaatgatcggactggcaagtatgtgatgtggatgcacgtagatgatgctaactacaccaaagcttcagttggtgtggccatcagtgactctccgacaggcccattcacttacctctacagcaagcgtccgcatgactgtgagagtagagacatgaccatcttcaaggatgatgatgggaaggcctacctgatatactcttccgaggacaacagcgagctccacattggcccgctaaccgatgactaccttgacgtcactgatgccatgcgaaggcttctcatcgcgcagcatcgagaagctcctgcgctcttcaagcatgaaggcacctactatatggtgacctctggctgtacaagctgggctccaaatactgcgctggcccacgcagcgacatcagtgatgggaccttgggagacactggggaacccctgtgtgggagggaatgaggtcttcagatcaacgacattcttctcccagagcacatttgtcttgccagttccagggctgccgggctcattcatcttcatggctgatcggtggaacccgtctgatcttagagattcgcggtatgtttggctgcctctgacgatcgggggagtccctgatgaagccgcagactacagcttcatgttccctctctggtcccgggtgtccatttactggcacagacggtggcgtctccctgaggagtggagggattattgaaactctgaagtttctttttttttcataagaatcgaaggtcttatacgctgttacattgatagataccaaagtaaagtattgacatttgacacgttggtctacattgtataggtcagatgtagatgcagggttcgtaaatgtttagttttttgagtttgcactcaaatcaaataaaactattgtggccttttgggcgaggtagtttctagaataatctgtctgcattggtcttttcatttgatctataccctccgtcctcgaataaat

SEQ ID NO: 84628 - DNA, 2103 bp, Zea Mays
ctccatccttcatcgtcatcgaccccgtaacccaaccgaaggcacgctgcccgggcacaggccaggtgttcggggcttcgggcgcccctccactccattctcaacacgcccccacgccgtacccaccacaatgtgacgggcgacctttccagagcgacgccgctgctcgctgttagccaaggaagccagacacccggccataccaattaccaaaaccactcatcaggtcgcgttgccagccgcacaaaccaagacagacccccctaatctctctggcatcgcggctcgtgctaagctaatcgaggcgcccccaaccacctctggccaagatctcgataaggactagcccatgcttagcctttcatttgtcctcttcgcttctctggatcaacctgccaatgcgcgtatcggttggagtagataagcggcgccatgggtatgaggagcaggcacccaaaggcgttgggtttccgctgccacccggcaagccaccggtccctaactctggcactatggagcctagcggcattggtcgtcgttgtgaatttccatcttctcatcgttcataaggaggacgatgagagtatgagcacacacgagatccgccgatcgattatgagggagctggaggtggtggaggaggagaagttccggctagctcctccccggagccggaggaatccccgggctgtgcgccgcaagggagagaagaagaagcctacaatagtggatgagttcctggatgagtcttcggctgtgcatgacatgttcttcccagaactgaatacggctgtagatccaatcaatggtgcaaatggcagcaagtacttctactacccaggcagaatttggttggacactgacggaaaaccaattcaagctcatggaggaggtgtcctctatgataagaggaccaccacctatttcttctacggggagaataaggatggcaaaacctacagagctcataggaagggagcagacagggttgacatcattggagtaagttgctattcttcgaaggacctgtggacatggaaaaacgaagggcttgtcctccgtggcgaggagaagaatgtaacacatgatcttcacaaatccaatgtcctggagagacccaaggtgatatacaatgatcggactggcaagtatgtgatgtggatgcacgtagatgatgctaactacaccaaagcttcagttggtgtggccatcagtgactctccgacaggcccattcacttacctctacagcaagcgtccgcatgactgtgagagtagagacatgaccatcttcaaggatgatgatgggaaggcctacctgatatactcttccgaggacaacagcgagctccacattggcccgctaaccgatgactaccttgacgtcactgatgccatgcgaaggcttctcatcgcgcagcatcgagaagctcctgcgctcttcaagcatgaaggcacctactatatggtgacctctggctgtacaagctgggctccaaatactgcgctggcccacgcagcgacatcagtgatgggaccttgggagacactggggaacccctgtgtgggagggaatgaggtcttcagatcaacgacattcttctcccagagcacatttgtcttgccagttccagggctgccgggctcattcatcttcatggctgatcggtggaacccgtctgatcttagagattcgcggtatgtttggctgcctctgacgatcgggggagtccctgatgaagccgcagactacagcttcatgttccctctctggtcccgggtgtccatttactggcacagacggtggcgtctccctgaggagtggagggattattgaaactctgaagtttctttttttttcataagaatcgaaggtcttatacgctgttacattgatagataccaaagtaaagtattgacatttgacacgttggtctacattgtataggtcagatgtagatgcagggttcgtaaatgtttagttttttgagtttgcactcaaatcaaataaaactattgtggccttttgggcgaggtagtttctagaataatctgtctgcattggtcttttcatttgatctataccctccgtcctcgaataaat

SEQ ID NO: 84629 - DNA, 937 bp, Zea Mays
gggcgacgaggatcaagcttacaggaaaatcaggctccgtgctgaagatgtgcagggcaggaatgtgctcacaaacttttggggtatgaattttaccactgataaactgagatccctagtgaagaagtggcagacattaatcgaagcccatgttgatgtcaagacaaccgacaactacatgttgcgtttgttctgcatcggcttcacgaagaggcgcccaaaccaggtcaagagaacctgctatgctcaggcatcccagatccgtcagatccgccgtaagatggttgagattatgatcaaccaggcttctacatgtgacctgaaagaacttgtttcgaagttcattccagaagttattggtaaggagattgagaagtctacctccagcatcttcccacttcaaaacgtcttcatccgcaaggtgaagatactcaaggcccccaagttcgatcttgggaagctcatggaggttcatggcgactacaaagaggatgttggtgtgaagcttgagaggcctgtcgagggagatgaggctgtgcaggaggttgctgctgccgagtagtttgtttgctacttctatatctaggctgagtctggacatgaggttgcttatgacgtgaacttagagttgtctacttgttttcatccgcccctaagattttgtctggaaacaagtttaaaattaagattattctcaacaagtgtttaagattactcgtggtgatcttctgagttcgagtactgctgtactaagttccttgcatcctcatttttgtttggccatcgatattttacgttctcgttctgtgctctgtttatttattgttagctgacactggtcatccagaattgtaaacttttaacactatcagttaaaactagtactacctccattttttattcatcatgttttagtttaaaattgaactagtaatcg

SEQ ID NO: 84630 - DNA, 1351 bp, Zea Mays
acgctgcagatgggccgaatcaaatgggccaaccatgcctcgaagcacacatatgggccacaccgcatcgtgtgcgtccatccgctcttgcgtgcctgctgaccgcatgatcgaacctggaaaccctcgaatcgtatatagtagtccgctctgcctccgaagtgctttctcccgcagagcagccgacaactctctaccgtccgagaccccaagcaccagcgcggcggcggcggcggcggcggcggcgaccatggctgtcggaaagaacaagaggatctccaagggaaagaagggtggcaagaaaaagaccgtcgaccctttctctaagaaggattggtatgacatcaaggcaccgtcggtgttcagtgtgcgcaacatcgggaagactctcgtatccaggacacagggtaccaggggcgacgaggatcaagcttacaggaaaatcaggctccgtgctgaagatgtgcagggcaggaatgtgctcacaaacttttggggtatgaattttaccactgataaactgagatccctagtgaagaagtggcagacattaatcgaagcccatgttgatgtcaagacaaccgacaactacatgttgcgtttgttctgcatcggcttcacgaagaggcgcccaaaccaggtcaagagaacctgctatgctcaggcatcccagatccgtcagatccgccgtaagatggttgagattatgatcaaccaggcttctacatgtgacctgaaagaacttgtttcgaagttcattccagaagttattggtaaggagattgagaagtctacctccagcatcttcccacttcaaaacgtcttcatccgcaaggtgaagatactcaaggcccccaagttcgatcttgggaagctcatggaggttcatggcgactacaaagaggatgttggtgtgaagcttgagaggcctgtcgagggagatgaggctgtgcaggaggttgctgctgccgagtagtttgtttgctacttctatatctaggctgagtctggacatgaggttgcttatgacgtgaacttagagttgtctacttgttttcatccgcccctaagattttgtctggaaacaagtttaaaattaagattattctcaacaagtgtttaagattactcgtggtgatcttctgagttcgagtactgctgtactaagttccttgcatcctcatttttgtttggccatcgatattttacgttctcgttctgtgctctgtttatttattgttagctgacactggtcatccagaattgtaaacttttaacactatcagttaaaactagtactacctccattttttattcatcatgttttagtttaaaattgaactagtaatcg

SEQ ID NO: 84631 - DNA, 803 bp, Zea Mays
cattaatcgaagcccatgttgatgtcaagacaaccgacaactacatgttgcgtttgttctgcatcggcttcaccaagaggcgcccaaaccaggtcaagagaacctgctatgctcaggcatcccagatccgtcagatccgccgtaagatggttgagattatgatcaaccaggcttctacatgtgacctgaaagaacttgtttcgaagttcattccagaagttattggtaaggagattgagaagtctacctccagcatcttcccacttcaaaacgtcttcatccgcaaggtgaagatactcaaggcccccaagttcgatcttgggaagctcatggaggttcatggcgactacaaagaggatgttggtgtgaagcttgagaggcctgtcgagggagatgaggctgtgcaggaggttgctgctgccgagtagtttgtttgctacttctatatctaggctgagtctggacatgaggttgcttatgacgtgaacttagagttgtctacttgttttcatccgcccctaagattttgtctggaaacaagtttaaaattaagattattctcaacaagtgtttaagattactcgtggtgatcttctgagttcgagtactgctgtactaagttccttgcatcctcatttttgtttggccatcgatattttacgttctcgttctgtgctctgtttatttattgttagctgacactggtcatccagaattgtaaacttttaacactatcagttaaaactagtactacctccattttttattcatcatgttttagtttaaaattgaactagtaatcg

SEQ ID NO: 84632 - DNA, 725 bp, Zea Mays
ggcgcccaaaccaggtcaagagaacctgctatgctcaggcatcccagatccgtcagatccgccgtaagatggttgagattatgatcaaccaggcttctacatgtgacctgaaagaacttgtttcgaagttcattccagaagttattggtaaggagattgagaagtctacctccagcatcttcccacttcaaaacgtcttcatccgcaaggtgaagatactcaaggcccccaagttcgatcttgggaagctcatggaggttcatggcgactacaaagaggatgttggtgtgaagcttgagaggcctgtcgagggagatgaggctgtgcaggaggttgctgctgccgagtagtttgtttgctacttctatatctaggctgagtctggacatgaggttgcttatgacgtgaacttagagttgtctacttgttttcatccgcccctaagattttgtctggaaacaagtttaaaattaagattattctcaacaagtgtttaagattactcgtggtgatcttctgagttcgagtactgctgtactaagttccttgcatcctcatttttgtttggccatcgatattttacgttctcgttctgtgctctgtttatttattgttagctgacactggtcatccagaattgtaaacttttaacactatcagttaaaactagtactacctccattttttattcatcatgttttagtttaaaattgaactagtaatcg

SEQ ID NO: 84633 - DNA, 964 bp, Zea Mays
tcaaggaaaacaaagaaagaacaaaaacataagtttgttttctttcgaggagaacaaaaacatgaaacgagaagacaaatgaacagtttgacgggccggccctgacaaacctgggccaagaataaataggcccatagacttgtatatagggtctaaagtgactgaaaagtcccgcatgttctcctgcctccgctccgccgccgcaacaaccatttccttctctagccgccgcctccgatcccctcccgaggctacagaaccagttcatccaggcgcgaatggcggcggcgaggagcctgcttctgaggcacctccgcttggcggcggccccgtcagcggcgtccgtgaggccgacggcgtcgttgcatgaggccctgtgggggcagcggtggatgtcttcggaggatgccaagggctctttcctggacaagagcgaggtcactgaacgcatcatcaaggtcgtcaagagcttcccgaagatcgatgacccctccaagatgcccatttcaagaatgatcttggcctagacagtttggatgcagtggaggttgtcatggccctggaagaggaattcagattcgagatacctgacaatgaagctgacaagattgactccgtcaaagttgcagttgacttcattgcctcacacccgcaagcgaaatgataaagatgcgttgcctggtatagcaaagctatatcgtcattaatctctgtttatgaagaaagttcagtttgaagatgtacactaccgtgcccatttggatacttctgctgatgctactgtcctttttggaacgaattttgctactgtggattgtctgcactaaataaaatgtttgaacctgagaaggaacttggatgccgtttggttcacgaaatgtaacgtaaatggtaatggtaatgattgacactcgaatatcgacagtaacaaatttgaataagacgatatccatttatagtgtgg

SEQ ID NO: 84634 - DNA, 1472 bp, Zea Mays
ataatagcaaaaaactccgctccagcgcttcgacgacgagaaagacagcgacgccgccgccgctccctccgcccggtacgtgcgcacgctacacgagctgcgccagttcaagactgccgggaaccccttcacggatgagttcttcgataccttcgacgccgtttaccagcagcagctggacatgctgaagaagctgcagcagcgccagcaccggctcgacaagaaggtcaagaccatccaggcgtggcgccgggtgtcaagcatcatcttcgcgaccacgttcgcggccgtgctcatctgctcgattgttgccgcggtcatcgctgccccgcctgtcgctgcggcattggccgcggctgctgcagtcccgctgggatccatggggaagtggtttgattcgttgctgaaagggtgtcaggacgcggtcaacagacaggagggggtggtgagcgaaatgcagtttggcacattgattgccatcaaggatttggagaatatcaaagtcctcatcaaacgggtggaggaggaaatcagctcaatgatagactgcgtagagtttgcagagcgggatgaggaggcggtgaaatttggggtggaggagatcaagaagaagctggaaagcttcatgaagagtgtcgaggatctaggagagcaagcagaccgatgtacccggcatatccatagggcaaggacccttgttctgggaaggatcatccgacatccaaactgaaaaaaaaaacaaaagggaaatgcaagggatgacagtgacgtgcatgacagagtgtgtggctgagacgagcgagcaagcaagcaaagtgaccagtactgtgtcctaaagcaacaacaactcgacgacgatgaatgaagctgtacaacaactcgacgatgatgaatgaagctatacagtgagaatgtatacacaatgtttgacagagccacctcattcacaatgtcatatactgctgtacagctacagatgatgactttagctattcaactcgacaacaaagcagcttgtttgacagcaattcacaagtcatatacacaatgtttgtcaagttcttagccatacacaatgtcgccaaccatcaaaataacctaaaattccatagataatcatgtcagaggtacagtgaactgtttagctcacaattagacatccaacggtaacaacagtgttggcgccgatttggtcaccaaaacactaaaatgaaccgtctggtggtattgacacctttagataatgcaggatcaaataaagttgaaaacctttagtattgacacctgttgggggccttcggcttccgaaggtcctcaaaaaacatgatttaacagtgtttctagagtgtaatgtgtgaacaggtaccttcggacttatgtcaaagagggagaacctcaaaagatacgaaggttggcagtgccgaagctgtgaagcaggaaagcttcggcatgttcgcagaaaagggaaccga

SEQ ID NO: 84635 - DNA, 1580 bp, Zea Mays
agccgtccgacgggtgaatcataatagcaaaaaactccgctccagcgcttcgacgacgagaaagacagcgacgccgccgccgctccctccgcccggtacgtgcgcacgctacacgagctgcgccagttcaagactgccgggaaccccttcacggatgagttcttcgataccttcgacgccgtttaccagcagcagctggacatgctgaagaagctgcagcagcgccagcaccggctcgacaagaaggtcaagaccatccaggcgtggcgccgggtgtcaagcatcatcttcgcgaccacgttcgcggccgtgctcatctgctcgattgttgccgcggtcatcgctgccccgcctgtcgctgcggcattggccgcggctgctgcagtcccgctgggatccatggggaagtggtttgattcgttgctgaaagggtgtcaggacgcggtcaacagacaggagggggtggtgagcgaaatgcagtttggcacattgattgccatcaaggatttggagaatatcaaagtcctcatcaaacgggtggaggaggaaatcagctcaatgatagactgcgtagagtttgcagagcgggatgaggaggcggtgaaatttggggtggaggagatcaagaagaagctggaaagcttcatgaagagtgtcgaggatctaggagagcaagcagaccgatgtacccggcatatccatagggcaaggacccttgttctgggaaggatcatccgacatccaaactgaaaaaaaaaacaaaagggaaatgcaagggatgacagtgacgtgcatgacagagtgtgtggctgagacgagcgagcaagcaagcaaagtgaccagtactgtgtcctaaagcaacaagtaatgctcgtgaacttatgtgaagaaggattcatataactgtcaactacccaaatctctactgtttatggctaaggccaccagagtgcaactcgacgacgatgaatgaagctgtacaacaactcgacgatgatgaatgaagctatacagtgagaatgtatacacaatgtttgacagagccacctcattcacaatgtcatatactgctgtacagctacagatgatgactttagctattcaactcgacaacaaagcagcttgtttgacagcaattcacaagtcatatacacaatgtttgtcaagttcttagccatacacaatgtcgccaaccatcaaaataacctaaaattccatagataatcatgtcagaggtacagtgaactgtttagctcacaattagacatccaacggtaacaacagtgttggcgccgatttggtcaccaaaacactaaaatgaaccgtctggtggtattgacacctttagataatgcaggatcaaataaagttgaaaacctttagtattgacacctgttgggggccttcggcttccgaaggtcctcaaaaaacatgatttaacagtgtttctagagtgtaatgtgtgaacaggtaccttcggacttatgtcaaagagggagaacctcaaaagatacgaaggttggcagtgccgaagctgtgaagcaggaaagcttcggcatgttcgcagaaaagggaaccga

SEQ ID NO: 84636 - DNA, 2053 bp, Zea Mays
agccgtccgacgggtgaatcataatagcaaaaaactccgctccagcgcttcgacgacgagaaagacagcgacgccgccgccgctccctccgcccggtacgtgcgcacgctacacgagctgcgccagttcaagactgccgggaaccccttcacggatgagttcttcgataccttcgacgccgtttaccagcagcagctggacatgctgaagaagctgcagcagcgccagcaccggctcgacaagaaggtcaagaccatccaggcgtggcgccgggtgtcaagcatcatcttcgcgaccacgttcgcggccgtgctcatctgctcgattgttgccgcggtcatcgctgccccgcctgtcgctgcggcattggccgcggctgctgcagtcccgctgggatccatggggaagtggtttgattcgttgctgaaagggtgtcaggacgcggtcaacagacaggagggggtggtgagcgaaatgcagtttggcacattgattgccatcaaggatttggagaatatcaaagtcctcatcaaacgggtggaggaggaaatcagctcaatgatagactgcgtagagtttgcagagcgggatgaggaggcggtgaaatttggggtggaggagatcaagaagaagctggaaagcttcatgaagagtgtcgaggatctaggagagcaagcagaccgatgtacccggcatatccatagggcaaggacccttgttctgggaaggatcatccgacatccaaactgaaaaaaaaaacaaaagggaaatgcaagggatgacagtgacgtgcatgacagagtgtgtggctgagacgagcgagcaagcaagcaaagtgaccagtactgtgtcctaaagcaacaagtaatgctcgtgaacttatgtgaagaaggattcatataactgtcaactacccaaatctctactgtttatggctaaggccaccagagtggttcgtttctgattaccattctttttatagtcggttacttgcttttaagttatcatttaaataaactatgagttaaataaagtaagggtgtttacttatatccctgtatgtctcggtgggtaattgccgtggtaactgctgtgagtttggaattaataaagccttgttcaattattcctacaccatatggattggatataattaaaaaaattagtagagattttgacttgctatgtattttaaatccacctagggctcgtttgtttgtttaggattaaaaacatgcacgtttctgttcctgggctaaataaagtggatccaggtgattcactgaaactgaaacctggtcaataataggtccgtatctggactggaatcaatacaaaactacagaattaggcctgttcgtttcagcctgaaatgaagacatttgcagcatctgtactcgatagtactaacaagctgttgtacagcaactcgacgacgatgaatgaagctgtacaacaactcgacgatgatgaatgaagctatacagtgagaatgtatacacaatgtttgacagagccacctcattcacaatgtcatatactgctgtacagctacagatgatgactttagctattcaactcgacaacaaagcagcttgtttgacagcaattcacaagtcatatacacaatgtttgtcaagttcttagccatacacaatgtcgccaaccatcaaaataacctaaaattccatagataatcatgtcagaggtacagtgaactgtttagctcacaattagacatccaacggtaacaacagtgttggcgccgatttggtcaccaaaacactaaaatgaaccgtctggtggtattgacacctttagataatgcaggatcaaataaagttgaaaacctttagtattgacacctgttgggggccttcggcttccgaaggtcctcaaaaaacatgatttaacagtgtttctagagtgtaatgtgtgaacaggtaccttcggacttatgtcaaagagggagaacctcaaaagatacgaaggttggcagtgccgaagctgtgaagcaggaaagcttcggcatgttcgcagaaaagggaaccga

SEQ ID NO: 84637 - DNA, 1068 bp, Zea Mays
gtttttttgtactattacaggagtttgttttcattgatggtgcaaaacgccttgagggaaagaagcctgatatatttgtagtcaactcttttggttctggtttccaggtaagacaatagagattcacttctttcaataattgttccttttgctcactgaaaatctttgttgttgcaccatacaggcactttttattttcctactccttccatttctctctaacttgaaagggattccttttgctgaactccctgcatacctaacccgtggtgctgcatgctttctgaatgtgggagggaatctgaaggattgccatggagctcctttgctaccacttctctacataactctgaacatggccttcaacatttctgtccttaatcttgtgaagatgtctacagcagtggttgcttcgctgacatcaactttagcagtacctctttccatctatatactgtcactgcctctaccatatctacccgaaggaacaaatttgagcgcatcttttttgattggtgttgctaccttagtgctcggattgcttctatacaatcttcctcaagaatcaaccaatcaagtaaaggaagattaatctaaacccatatcagatataaggttaacaggaagctattggtgctccactaagaaaatagccgcattttgttgacagtggcttcacagtttggtacataactcatgaagagcagtgttcttctgccacaaacatttgcggtgcaaacatttgaggcaccagctgacttcaaagtttagaaacagcaagttcttgtttcatctgttaacaaaatcctaatggattatgcagctatatataagctctacctgagcggatgtaactactaactactttcagatgagtaagggctttacaaattcattggttgtataattgttctcaccattttttggtcaattcaagactaacataccagactccgtgggatttattatgtaaataagtaatgattgtaaccattataaatcttgattgtatggccaaccatttcaagtgaatgctagatacacggactacgttactattacttattt

SEQ ID NO: 84638 - DNA, 3021 bp, Zea Mays
gtaggacgcgttaaggatgaggaggcggaccgagtcgacgaaagtggctccggtgctggtgccatcgaggcggtagacaccggtggcctcaaacgaccgcagctcgtcgctgacttccatctgcggtggcagcggcaagggtttggcagaatgtcagatactctgcgagcgaaacgtgagttggcacagcagacaacacccgcgtgcagcgctgcaatccaaagaagcgaagcaaccaacccccgaaatcttcaacggcgccatcgccactgcgtcatgcccgtcccgcccctcctctcgccacttcgcctgccctcgccagcgccgcccctccaccgcaatggagcgccatggcggcgcccgacgcaactacgtgccgcactacgggtcccccctccgcttcacctggggctcgccgcggcccgtggcgatggcgtgaggcggttcgtcgggacgctgggctcgaagagagcgcgagctgttggtgcaattagggtttctgcgatctctggagacggcggtggcggtgctggtggtacgggaattgcggcggcagcggccgccactgtggtctttgctgtgatgaaccgggtgctctacaagctggcgctcgtgccaatgaagaattaccccttcttcctcgcccagttcgccacatttgggtatgtcctagtgtatttctcaattctcttcataagatttcgcgctgggattgtcactagagaaatgttagcgcttccgaagccacagttcatgctaattggtttactggaagcgctaggtgctgcttcaggcatggctgctgctgctatgttgcccgggccatctattccagtgttgtcacaggtaatacatctacatatgccactgggtcacttctgattacttcatacctaattgtgggaggcgtgaatcatgtattgcttacaactttacatataaccctgtaaatgcttgtcaaatggatgttgttcttgcaattactgttttttttacttagcatttctcgttagattgttttttcatcctaagtactaaatacattagatcgacacagagatgatttttgtagttacgatgatgtgtttccacatgcttgcttgtgtattgttttcactgatatattaaatcatcatcactattatataacaattgtataagttacaattaacttgtccacctttgctagtgacatacaatctttctaggatgtagttattttttgtatacatccgttggattcacccaccttcatgactacttttcacgtgaccttcctattaattgtctaacatgcttgtcatctttgtgtagtcctttctggtttggcaacttatcttatctgccctcatcttgggaaggaaatatagagcaaatcagatccttggctgcttgcttgttacagctggagtaattctagcagtggccgggtgtgtattggaatagttgttcttattttgcttactcttctgatgcacttccgtaacaatctctaaataataatgagttgttatctattatattgtgcaccatgtttttttaatctggcatgctcatgtaaagatgatgctgattattatcaaagctcctggttcattctagataccgctgattgcatcttaggatcgacatacaatataagagaatttgcatatgccatttcagtttgcctaaataatcacagtgacactactagaattagtggtctaaatgttgatcagtagattcaaatttaacagatttcttgtctgtttctagttttcagtggcataattttgagaagaaacttcttgttcccacacgataaaatacatcttggaagatcataaatttttaaaaatagtatggtggatcatttgtacagggtaccattatggtgcatgtgttatgctcataccttgattagattttgagtttctcttagtcatcctcttttcttgatgaacacagtggagccagtaatggtccgattctctttgaagtcaaattcttttggccagcagtaatgatgatttcagctgcatttcaagctgctgcttccattatcaaggagtttgttttcattgatggtgcaaaacgccttgagggaaagaagcctgatatatttgtagtcaactcttttggttctggtttccaggcactttttattttcctactccttccatttctctctaacttgaaagggattccttttgctgaactccctgcatacctaacccgtggtgctgcatgctttctgaatgtgggagggaatctgaaggattgccatggagctcctttgctaccacttctctacataactctgaacatggccttcaacatttctgtccttaatcttgtgaagatgtctacagcagtggttgcttcgctgacatcaactttagcagtacctctttccatctatatactgtcactgcctctaccatatctacccgaaggaacaaatttgagcgcatcttttttgattggtgttgctaccttagtgctcggattgcttctatacaatcttcctcaagaatcaaccaatcaagtaaaggaagattaatctaaacccatatcagatataaggttaacaggaagctattggtgctccactaagaaaatagccgcattttgttgacagtggcttcacagtttggtacataactcatgaagagcagtgttcttctgccacaaacatttgcggtgcaaacatttgaggcaccagctgacttcaaagtttagaaacagcaagttcttgtttcatctgttaacaaaatcctaatggattatgcagctatatataagctctacctgagcggatgtaactactaactactttcagatgagtaagggctttacaaattcattggttgtataattgttctcaccattttttggtcaattcaagactaacataccagactccgtgggatttattatgtaaataagtaatgattgtaaccattataaatcttgattgtatggccaaccatttcaagtgaatgctagatacacggactacgttactattacttattt

SEQ ID NO: 84639 - DNA, 2553 bp, Zea Mays
gtaggacgcgttaaggatgaggaggcggaccgagtcgacgaaagtggctccggtgctggtgccatcgaggcggtagacaccggtggcctcaaacgaccgcagctcgtcgctgacttccatctgcggtggcagcggcaagggtttggcagaatgtcagatactctgcgagcgaaacgtgagttggcacagcagacaacacccgcgtgcagcgctgcaatccaaagaagcgaagcaaccaacccccgaaatcttcaacggcgccatcgccactgcgtcatgcccgtcccgcccctcctctcgccacttcgcctgccctcgccagcgccgcccctccaccgcaatggagcgccatggcggcgcccgacgcaactacgtgccgcactacgggtcccccctccgcttcacctggggctcgccgcggcccgtggcgatggcgtgaggcggttcgtcgggacgctgggctcgaagagagcgcgagctgttggtgcaattagggtttctgcgatctctggagacggcggtggcggtgctggtggtacgggaattgcggcggcagcggccgccactgtggtctttgctgtgatgaaccgggtgctctacaagctggcgctcgtgccaatgaagaattaccccttcttcctcgcccagttcgccacatttgggtatgtcctagtgtatttctcaattctcttcataagatttcgcgctgggattgtcactagagaaatgttagcgcttccgaagccacagttcatgctaattggtttactggaagcgctaggtgctgcttcaggcatggctgctgctgctatgttgcccgggccatctattccagtgttgtcacagtcctttctggtttggcaacttatcttatctgccctcatcttgggaaggaaatatagagcaaatcagatccttggctgcttgcttgttacagctggagtaattctagcagtggccgggtgtgtattggaatagttgttcttattttgcttactcttctgatgcacttccgtaacaatctctaaataataatgagttgttatctattatattgtgcaccatgtttttttaatctggcatgctcatgtaaagatgatgctgattattatcaaagctcctggttcattctagataccgctgattgcatcttaggatcgacatacaatataagagaatttgcatatgccatttcagtttgcctaaataatcacagtgacactactagaattagtggtctaaatgttgatcagtagattcaaatttaacagatttcttgtctgtttctagttttcagtggcataattttgagaagaaacttcttgttcccacacgataaaatacatcttggaagatcataaatttttaaaaatagtatggtggatcatttgtacagggtaccattatggtgcatgtgttatgctcataccttgattagattttgagtttctcttagtcatcctcttttcttgatgaacacagtggagccagtaatggtccgattctctttgaagtcaaattcttttggccagcagtaatgatgatttcagctgcatttcaagctgctgcttccattatcaaggagtttgttttcattgatggtgcaaaacgccttgagggaaagaagcctgatatatttgtagtcaactcttttggttctggtttccaggcactttttattttcctactccttccatttctctctaacttgaaagggattccttttgctgaactccctgcatacctaacccgtggtgctgcatgctttctgaatgtgggagggaatctgaaggattgccatggagctcctttgctaccacttctctacataactctgaacatggccttcaacatttctgtccttaatcttgtgaagatgtctacagcagtggttgcttcgctgacatcaactttagcagtacctctttccatctatatactgtcactgcctctaccatatctacccgaaggaacaaatttgagcgcatcttttttgattggtgttgctaccttagtgctcggattgcttctatacaatcttcctcaagaatcaaccaatcaagtaaaggaagattaatctaaacccatatcagatataaggttaacaggaagctattggtgctccactaagaaaatagccgcattttgttgacagtggcttcacagtttggtacataactcatgaagagcagtgttcttctgccacaaacatttgcggtgcaaacatttgaggcaccagctgacttcaaagtttagaaacagcaagttcttgtttcatctgttaacaaaatcctaatggattatgcagctatatataagctctacctgagcggatgtaactactaactactttcagatgagtaagggctttacaaattcattggttgtataattgttctcaccattttttggtcaattcaagactaacataccagactccgtgggatttattatgtaaataagtaatgattgtaaccattataaatcttgattgtatggccaaccatttcaagtgaatgctagatacacggactacgttactattacttattt

SEQ ID NO: 84640 - DNA, 2924 bp, Zea Mays
gtaggacgcgttaaggatgaggaggcggaccgagtcgacgaaagtggctccggtgctggtgccatcgaggcggtagacaccggtggcctcaaacgaccgcagctcgtcgctgacttccatctgcggtggcagcggcaagggtttggcagaatgtcagatactctgcgagcgaaacgtgagttggcacagcagacaacacccgcgtgcagcgctgcaatccaaagaagcgaagcaaccaacccccgaaatcttcaacggcgccatcgccactgcgtcatgcccgtcccgcccctcctctcgccacttcgcctgccctcgccagcgccgcccctccaccgcaatggagcgccatggcggcgcccgacgcaactacgtgccgcactacgggtcccccctccgcttcacctggggctcgccgcggcccgtggcgatggcgtgaggcggttcgtcgggacgctgggctcgaagagagcgcgagctgttggtgcaattagggtttctgcgatctctggagacggcggtggcggtgctggtggtacgggaattgcggcggcagcggccgccactgtggtctttgctgtgatgaaccgggtgctctacaagctggcgctcgtgccaatgaagaattaccccttcttcctcgcccagttcgccacatttgggtatgtcctagtgtatttctcaattctcttcataagatttcgcgctgggattgtcactagagaaatgttagcgcttccgaagccacagttcatgctaattggtttactggaagcgctaggtgctgcttcaggcatggctgctgctgctatgttgcccgggccatctattccagtgttgtcacagtcctttctggtttggcaacttatcttatctgccctcatcttgggaaggaaatatagagcaaatcagatccttggctgcttgcttgttacagctggagtaattctagcagtggccgggtgtgtattggaatagttgttcttattttgcttactcttctgatgcacttccgtaacaatctctaaataataatgagttgttatctattatattgtgcaccatgtttttttaatctggcatgctcatgtaaagatgatgctgattattatcaaagctcctggttcattctagataccgctgattgcatcttaggatcgacatacaatataagagaatttgcatatgccatttcagtttgcctaaataatcacagtgacactactagaattagtggtctaaatgttgatcagtagattcaaatttaacagatttcttgtctgtttctagttttcagtggcataattttgagaagaaacttcttgttcccacacgataaaatacatcttggaagatcataaatttttaaaaatagtatggtggatcatttgtacagggtaccattatggtgcatgtgttatgctcataccttgattagattttgagtttctcttagtcatcctcttttcttgatgaacacagtggagccagtaatggtccgattctctttgaagtcaaattcttttggccagcagtaatgatgatttcagctgcatttcaagctgctgcttccattatcaaggttgagtgttcatagtagtgttgtggtgggattttcatgttaatccagctatatagtttttttgtactattacaggagtttgttttcattgatggtgcaaaacgccttgagggaaagaagcctgatatatttgtagtcaactcttttggttctggtttccaggcactttttattttcctactccttccatttctctctaacttgaaagggattccttttgctgaactccctgcatacctaacccgtggtgctgcatgctttctgaatgtgggagggaatctgaaggattgccatggagctcctttgctaccacttctctacataactctgaacatggccttcaacatttctgtccttaatcttgtgaagatgtctacagcagtggttgcttcgctgacatcaactttagcaggttatgcattttgtttccccacttcatattttaatgtttaagcagagtacttgtgcaaggcaatatggcaacttggcaagggcatatggtgctttatgttttataaaaactgaggtgccatgcaaatctttttgtgcagttgtgctagaacagatttcctgataagtagtcgacgtactctataactcgatgcactcatggctcaccaccaaaactttaaggaaacaagccctttttaagctgacttctgtttggtttgttgtatgtttgttttaacactatatgcttctctgcagtacctctttccatctatatactgtcactgcctctaccatatctacccgaaggaacaaatttgagcgcatcttttttgattggtgttgctaccttagtgctcggattgcttctatacaatcttcctcaagaatcaaccaatcaagtaaaggaagattaatctaaacccatatcagatataaggttaacaggaagctattggtgctccactaagaaaatagccgcattttgttgacagtggcttcacagtttggtacataactcatgaagagcagtgttcttctgccacaaacatttgcggtgcaaacatttgaggcaccagctgacttcaaagtttagaaacagcaagttcttgtttcatctgttaacaaaatcctaatggattatgcagctatatataagctctacctgagcggatgtaactactaactactttcagatgagtaagggctttacaaattcattggttgtataattgttctcaccattttttggtcaattcaagactaacataccagactccgtgggatttattatgtaaataagtaatgattgtaaccattataaatcttgattgtatggccaaccatttcaagtgaatgctagatacacggactacgttactattacttattt

SEQ ID NO: 84641 - DNA, 2190 bp, Zea Mays
gtaggacgcgttaaggatgaggaggcggaccgagtcgacgaaagtggctccggtgctggtgccatcgaggcggtagacaccggtggcctcaaacgaccgcagctcgtcgctgacttccatctgcggtggcagcggcaagggtttggcagaatgtcagatactctgcgagcgaaacgtgagttggcacagcagacaacacccgcgtgcagcgctgcaatccaaagaagcgaagcaaccaacccccgaaatcttcaacggcgccatcgccactgcgtcatgcccgtcccgcccctcctctcgccacttcgcctgccctcgccagcgccgcccctccaccgcaatggagcgccatggcggcgcccgacgcaactacgtgccgcactacgggtcccccctccgcttcacctggggctcgccgcggcccgtggcgatggcgtgaggcggttcgtcgggacgctgggctcgaagagagcgcgagctgttggtgcaattagggtttctgcgatctctggagacggcggtggcggtgctggtggtacgggaattgcggcggcagcggccgccactgtggtctttgctgtgatgaaccgggtgctctacaagctggcgctcgtgccaatgaagaattaccccttcttcctcgcccagttcgccacatttgggtatgtcctagtgtatttctcaattctcttcataagatttcgcgctgggattgtcactagagaaatgttagcgcttccgaagccacagttcatgctaattggtttactggaagcgctaggtgctgcttcaggcatggctgctgctgctatgttgcccgggccatctattccagtgttgtcacagtcctttctggtttggcaacttatcttatctgccctcatcttgggaaggaaatatagagcaaatcagatccttggctgcttgcttgttacagctggagtaattctagcagtggccggtggagccagtaatggtccgattctctttgaagtcaaattcttttggccagcagtaatgatgatttcagctgcatttcaagctgctgcttccattatcaaggagtttgttttcattgatggtgcaaaacgccttgagggaaagaagcctgatatatttgtagtcaactcttttggttctggtttccaggcactttttattttcctactccttccatttctctctaacttgaaagggattccttttgctgaactccctgcatacctaacccgtggtgctgcatgctttctgaatgtgggagggaatctgaaggattgccatggagctcctttgctaccacttctctacataactctgaacatggccttcaacatttctgtccttaatcttgtgaagatgtctacagcagtggttgcttcgctgacatcaactttagcagttgtgctagaacagatttcctgataagtagtcgacgtactctataactcgatgcactcatggctcaccaccaaaactttaaggaaacaagccctttttaagctgacttctgtttggtttgttgtatgtttgttttaacactatatgcttctctgcagtacctctttccatctatatactgtcactgcctctaccatatctacccgaaggaacaaatttgagcgcatcttttttgattggtgttgctaccttagtgctcggattgcttctatacaatcttcctcaagaatcaaccaatcaagtaaaggaagattaatctaaacccatatcagatataaggttaacaggaagctattggtgctccactaagaaaatagccgcattttgttgacagtggcttcacagtttggtacataactcatgaagagcagtgttcttctgccacaaacatttgcggtgcaaacatttgaggcaccagctgacttcaaagtttagaaacagcaagttcttgtttcatctgttaacaaaatcctaatggattatgcagctatatataagctctacctgagcggatgtaactactaactactttcagatgagtaagggctttacaaattcattggttgtataattgttctcaccattttttggtcaattcaagactaacataccagactccgtgggatttattatgtaaataagtaatgattgtaaccattataaatcttgattgtatggccaaccatttcaagtgaatgctagatacacggactacgttactattacttattt

SEQ ID NO: 84642 - DNA, 2274 bp, Zea Mays
gtaggacgcgttaaggatgaggaggcggaccgagtcgacgaaagtggctccggtgctggtgccatcgaggcggtagacaccggtggcctcaaacgaccgcagctcgtcgctgacttccatctgcggtggcagcggcaagggtttggcagaatctgaacttggaactactgggtctccttccttcgagccggtgcagagggccgagcgtcgccgtcaccgccgacgcccgagtttgcgggccgcctccagtcctccctccatctcaggtaagcggccgccgagcagccccgggccaggaggcgggagcgagcacgcgggcgtggggaggtcagtcagggaggcacgcgccgtcagtcgggttcaagtatcattggccccctaccagtcagatactctgcgagcgaaacgtgagttggcacagcagacaacacccgcgtgcagcgctgcaatccaaagaagcgaagcaaccaacccccgaaatcttcaacggcgccatcgccactgcgtcatgcccgtcccgcccctcctctcgccacttcgcctgccctcgccagcgccgcccctccaccgcaatggagcgccatggcggcgcccgacgcaactacgtgccgcactacgggtcccccctccgcttcacctggggctcgccgcggcccgtggcgatggcgtgaggcggttcgtcgggacgctgggctcgaagagagcgcgagctgttggtgcaattagggtttctgcgatctctggagacggcggtggcggtgctggtggtacgggaattgcggcggcagcggccgccactgtggtctttgctgtgatgaaccgggtgctctacaagctggcgctcgtgccaatgaagaattaccccttcttcctcgcccagttcgccacatttgggtatgtcctagtgtatttctcaattctcttcataagatttcgcgctgggattgtcactagagaaatgttagcgcttccgaagccacagttcatgctaattggtttactggaagcgctaggtgctgcttcaggcatggctgctgctgctatgttgcccgggccatctattccagtgttgtcacagtcctttctggtttggcaacttatcttatctgccctcatcttgggaaggaaatatagagcaaatcagatccttggctgcttgcttgttacagctggagtaattctagcagtggccggtggagccagtaatggtccgattctctttgaagtcaaattcttttggccagcagtaatgatgatttcagctgcatttcaagctgctgcttccattatcaaggagtttgttttcattgatggtgcaaaacgccttgagggaaagaagcctgatatatttgtagtcaactcttttggttctggtttccaggcactttttattttcctactccttccatttctctctaacttgaaagggattccttttgctgaactccctgcatacctaacccgtggtgctgcatgctttctgaatgtgggagggaatctgaaggatttttcagattgccatggagctcctttgctaccacttctctacataactctgaacatggccttcaacatttctgtccttaatcttgtgaagatgtctacagcagtggttgcttcgctgacatcaactttagcagtacctctttccatctatatactgtcactgcctctaccatatctacccgaaggaacaaatttgagcgcatcttttttgattggtgttgctaccttagtgctcggattgcttctatacaatcttcctcaagaatcaaccaatcaagtaaaggaagattaatctaaacccatatcagatataaggttaacaggaagctattggtgctccactaagaaaatagccgcattttgttgacagtggcttcacagtttggtacataactcatgaagagcagtgttcttctgccacaaacatttgcggtgcaaacatttgaggcaccagctgacttcaaagtttagaaacagcaagttcttgtttcatctgttaacaaaatcctaatggattatgcagctatatataagctctacctgagcggatgtaactactaactactttcagatgagtaagggctttacaaattcattggttgtataattgttctcaccattttttggtcaattcaagactaacataccagactccgtgggatttattatgtaaataagtaatgattgtaaccattataaatcttgattgtatggccaaccatttcaagtgaatgctagatacacggactacgttactattacttattt

SEQ ID NO: 84643 - DNA, 2989 bp, Zea Mays
gtaggacgcgttaaggatgaggaggcggaccgagtcgacgaaagtggctccggtgctggtgccatcgaggcggtagacaccggtggcctcaaacgaccgcagctcgtcgctgacttccatctgcggtggcagcggcaagggtttggcagaatctgaacttggaactactgggtctccttccttcgagccggtgcagagggccgagcgtcgccgtcaccgccgacgcccgagtttgcgggccgcctccagtcctccctccatctcaggtaagcggccgccgagcagccccgggccaggaggcgggagcgagcacgcgggcgtggggaggtcagtcagggaggcacgcgccgtcagtcgggttcaagtatcattggccccctaccagtcagatactctgcgagcgaaacgtgagttggcacagcagacaacacccgcgtgcagcgctgcaatccaaagaagcgaagcaaccaacccccgaaatcttcaacggcgccatcgccactgcgtcatgcccgtcccgcccctcctctcgccacttcgcctgccctcgccagcgccgcccctccaccgcaatggagcgccatggcggcgcccgacgcaactacgtgccgcactacgggtcccccctccgcttcacctggggctcgccgcggcccgtggcgatggcgtgaggcggttcgtcgggacgctgggctcgaagagagcgcgagctgttggtgcaattagggtttctgcgatctctggagacggcggtggcggtgctggtggtacgggaattgcggcggcagcggccgccactgtggtctttgctgtgatgaaccgggtgctctacaagctggcgctcgtgccaatgaagaattaccccttcttcctcgcccagttcgccacatttgggtatgtcctagtgtatttctcaattctcttcataagatttcgcgctgggattgtcactagagaaatgttagcgcttccgaagccacagttcatgctaattggtttactggaagcgctaggtgctgcttcaggcatggctgctgctgctatgttgcccgggccatctattccagtgttgtcacagtcctttctggtttggcaacttatcttatctgccctcatcttgggaaggaaatatagagcaaatcagatccttggctgcttgcttgttacagctggagtaattctagcagtggccggtggagccagtaatggtccgattctctttgaagtcaaattcttttggccagcagtaatgatgatttcagctgcatttcaagctgctgcttccattatcaaggagtttgttttcattgatggtgcaaaacgccttgagggaaagaagcctgatatatttgtagtcaactcttttggttctggtttccaggtaagacaatagagattcacttctttcaataattgttccttttgctcactgaaaatctttgttgttgcaccatacaggcactttttattttcctactccttccatttctctctaacttgaaagggattccttttgctgaactccctgcatacctaacccgtggtgctgcatgctttctgaatgtgggagggaatctgaagggtgagtattgtttctcatatcacattcatgtggtaaataagtggagcttctcatattatataatttcaaatctatggttaattagagaaaaagtgatgttctcatattatatgatttcaaatatatggttgattggagaaaagggatcttcatgaaatctttcacaagtgaatattatccatctcaacctttttgttttggtattatctatattattgaggtatgcatggcataaatgtttaacactttgctagctatgccaaactcaaaacgcttgtggccagcagtcttgaacatgattatctatgatctatgatgcaagatcatttgctaacggtttagatttttcagattgccatggagctcctttgctaccacttctctacataactctgaacatggccttcaacatttctgtccttaatcttgtgaagatgtctacagcagtggttgcttcgctgacatcaactttagcaggttatgcattttgtttccccacttcatattttaatgtttaagcagagtacttgtgcaaggcaatatggcaacttggcaagggcatatggtgctttatgttttataaaaactgaggtgccatgcaaatctttttgtgcagttgtgctagaacagatttcctgataagtagtcgacgtactctataactcgatgcactcatggctcaccaccaaaactttaaggaaacaagccctttttaagctgacttctgtttggtttgttgtatgtttgttttaacactatatgcttctctgcagtacctctttccatctatatactgtcactgcctctaccatatctacccgaaggaacaaatttgagcgcatcttttttgattggtgttgctaccttagtgctcggattgcttctatacaatcttcctcaagaatcaaccaatcaagtaaaggaagattaatctaaacccatatcagatataaggttaacaggaagctattggtgctccactaagaaaatagccgcattttgttgacagtggcttcacagtttggtacataactcatgaagagcagtgttcttctgccacaaacatttgcggtgcaaacatttgaggcaccagctgacttcaaagtttagaaacagcaagttcttgtttcatctgttaacaaaatcctaatggattatgcagctatatataagctctacctgagcggatgtaactactaactactttcagatgagtaagggctttacaaattcattggttgtataattgttctcaccattttttggtcaattcaagactaacataccagactccgtgggatttattatgtaaataagtaatgattgtaaccattataaatcttgattgtatggccaaccatttcaagtgaatgctagatacacggactacgttactattacttattt

SEQ ID NO: 84644 - DNA, 2733 bp, Zea Mays
gtaggacgcgttaaggatgaggaggcggaccgagtcgacgaaagtggctccggtgctggtgccatcgaggcggtagacaccggtggcctcaaacgaccgcagctcgtcgctgacttccatctgcggtggcagcggcaagggtttggcagaatctgaacttggaactactgggtctccttccttcgagccggtgcagagggccgagcgtcgccgtcaccgccgacgcccgagtttgcgggccgcctccagtcctccctccatctcaggtaagcggccgccgagcagccccgggccaggaggcgggagcgagcacgcgggcgtggggaggtcagtcagggaggcacgcgccgtcagtcgggttcaagtatcattggccccctaccagtcagatactctgcgagcgaaacgtgagttggcacagcagacaacacccgcgtgcagcgctgcaatccaaagaagcgaagcaaccaacccccgaaatcttcaacggcgccatcgccactgcgtcatgcccgtcccgcccctcctctcgccacttcgcctgccctcgccagcgccgcccctccaccgcaatggagcgccatggcggcgcccgacgcaactacgtgccgcactacgggtcccccctccgcttcacctggggctcgccgcggcccgtggcgatggcgtgaggcggttcgtcgggacgctgggctcgaagagagcgcgagctgttggtgcaattagggtttctgcgatctctggagacggcggtggcggtgctggtggtacgggaattgcggcggcagcggccgccactgtggtctttgctgtgatgaaccgggtgctctacaagctggcgctcgtgccaatgaagaattaccccttcttcctcgcccagttcgccacatttgggtatgtcctagtgtatttctcaattctcttcataagatttcgcgctgggattgtcactagagaaatgttagcgcttccgaagccacagttcatgctaattggtttactggaagcgctaggtgctgcttcaggcatggctgctgctgctatgttgcccgggccatctattccagtgttgtcacaggtaatacatctacatatgccactgggtcacttctgattacttcatacctaattgtgggaggcgtgaatcatgtattgcttacaactttacatataaccctgtaaatgcttgtcaaatggatgttgttcttgcaattactgttttttttacttagcatttctcgttagattgttttttcatcctaagtactaaatacattagatcgacacagagatgatttttgtagttacgatgatgtgtttccacatgcttgcttgtgtattgttttcactgatatattaaatcatcatcactattatataacaattgtataagttacaattaacttgtccacctttgctagtgacatacaatctttctaggatgtagttattttttgtatacatccgttggattcacccaccttcatgactacttttcacgtgaccttcctattaattgtctaacatgcttgtcatctttgtgtagtcctttctggtttggcaacttatcttatctgccctcatcttgggaaggaaatatagagcaaatcagatccttggctgcttgcttgttacagctggagtaattctagcagtggccggtggagccagtaatggtccgattctctttgaagtcaaattcttttggccagcagtaatgatgatttcagctgcatttcaagctgctgcttccattatcaaggagtttgttttcattgatggtgcaaaacgccttgagggaaagaagcctgatatatttgtagtcaactcttttggttctggtttccaggcactttttattttcctactccttccatttctctctaacttgaaagggattccttttgctgaactccctgcatacctaacccgtggtgctgcatgctttctgaatgtgggagggaatctgaaggattgccatggagctcctttgctaccacttctctacataactctgaacatggccttcaacatttctgtccttaatcttgtgaagatgtctacagcagtggttgcttcgctgacatcaactttagcagtacctctttccatctatatactgtcactgcctctaccatatctacccgaaggaacaaatttgagcgcatcttttttgattggtgttgctaccttagtgctcggattgcttctatacaatcttcctcaagaatcaaccaatcaagtaaaggaagattaatctaaacccatatcagatataaggttaacaggaagctattggtgctccactaagaaaatagccgcattttgttgacagtggcttcacagtttggtacataactcatgaagagcagtgttcttctgccacaaacatttgcggtgcaaacatttgaggcaccagctgacttcaaagtttagaaacagcaagttcttgtttcatctgttaacaaaatcctaatggattatgcagctatatataagctctacctgagcggatgtaactactaactactttcagatgagtaagggctttacaaattcattggttgtataattgttctcaccattttttggtcaattcaagactaacataccagactccgtgggatttattatgtaaataagtaatgattgtaaccattataaatcttgattgtatggccaaccatttcaagtgaatgctagatacacggactacgttactattacttattt

SEQ ID NO: 84645 - DNA, 2330 bp, Zea Mays
cgaagcgcaacactagccaaaaaccaggcagcgaagggacgaagggggaaaaggcgtagctcctattcgcggcaggctttcgagcgaaaacgaccgcgcggacgggcgcgcccggcccacccacccgctggtaggacgcgttaaggatgaggaggcggaccgagtcgacgaaagtggctccggtgctggtgccatcgaggcggtagacaccggtggcctcaaacgaccgcagctcgtcgctgacttccatctgcggtggcagcggcaagggtttggcagaatctgaacttggaactactgggtctccttccttcgagccggtgcagagggccgagcgtcgccgtcaccgccgacgcccgagtttgcgggagcgagcacgcgggcgtggggaggtcagtcagggaggcacgcgccgtcagtcgggttcaagtatcattggccccctaccagtcagatactctgcgagcgaaacgtgagttggcacagcagacaacacccgcgtgcagcgctgcaatccaaagaagcgaagcaaccaacccccgaaatcttcaacggcgccatcgccactgcgtcatgcccgtcccgcccctcctctcgccacttcgcctgccctcgccagcgccgcccctccaccgcaatggagcgccatggcggcgcccgacgcaactacgtgccgcactacgggtcccccctccgcttcacctggggctcgccgcggcccgtggcgatggcgtgaggcggttcgtcgggacgctgggctcgaagagagcgcgagctgttggtgcaattagggtttctgcgatctctggagacggcggtggcggtgctggtggtacgggaattgcggcggcagcggccgccactgtggtctttgctgtgatgaaccgggtgctctacaagctggcgctcgtgccaatgaagaattaccccttcttcctcgcccagttcgccacatttgggtatgtcctagtgtatttctcaattctcttcataagatttcgcgctgggattgtcactagagaaatgttagcgcttccgaagccacagttcatgctaattggtttactggaagcgctaggtgctgcttcaggcatggctgctgctgctatgttgcccgggccatctattccagtgttgtcacagtcctttctggtttggcaacttatcttatctgccctcatcttgggaaggaaatatagagcaaatcagatccttggctgcttgcttgttacagctggagtaattctagcagtggccggtggagccagtaatggtccgattctctttgaagtcaaattcttttggccagcagtaatgatgatttcagctgcatttcaagctgctgcttccattatcaaggagtttgttttcattgatggtgcaaaacgccttgagggaaagaagcctgatatatttgtagtcaactcttttggttctggtttccaggcactttttattttcctactccttccatttctctctaacttgaaagggattccttttgctgaactccctgcatacctaacccgtggtgctgcatgctttctgaatgtgggagggaatctgaaggattgccatggagctcctttgctaccacttctctacataactctgaacatggccttcaacatttctgtccttaatcttgtgaagatgtctacagcagtggttgcttcgctgacatcaactttagcagtacctctttccatctatatactgtcactgcctctaccatatctacccgaaggaacaaatttgagcgcatcttttttgattggtgttgctaccttagtgctcggattgcttctatacaatcttcctcaagaatcaaccaatcaagtaaaggaagattaatctaaacccatatcagatataaggttaacaggaagctattggtgctccactaagaaaatagccgcattttgttgacagtggcttcacagtttggtacataactcatgaagagcagtgttcttctgccacaaacatttgcggtgcaaacatttgaggcaccagctgacttcaaagtttagaaacagcaagttcttgtttcatctgttaacaaaatcctaatggattatgcagctatatataagctctacctgagcggatgtaactactaactactttcagatgagtaagggctttacaaattcattggttgtataattgttctcaccattttttggtcaattcaagactaacataccagactccgtgggatttattatgtaaataagtaatgattgtaaccattataaatcttgattgtatggccaaccatttcaagtgaatgctagatacacggactacgttactattacttattt

SEQ ID NO: 84646 - DNA, 2514 bp, Zea Mays
cgaagcgcaacactagccaaaaaccaggcagcgaagggacgaagggggaaaaggcgtagctcctattcgcggcaggctttcgagcgaaaacgaccgcgcggacgggcgcgcccggcccacccacccgctggtaggacgcgttaaggatgaggaggcggaccgagtcgacgaaagtggctccggtgctggtgccatcgaggcggtagacaccggtggcctcaaacgaccgcagctcgtcgctgacttccatctgcggtggcagcggcaagggtttggcagaatgtcagatactctgcgagcgaaacgtgagttggcacagcagacaacacccgcgtgcagcgctgcaatccaaagaagcgaagcaaccaacccccgaaatcttcaacggcgccatcgccactgcgtcatgcccgtcccgcccctcctctcgccacttcgcctgccctcgccagcgccgcccctccaccgcaatggagcgccatggcggcgcccgacgcaactacgtgccgcactacgggtcccccctccgcttcacctggggctcgccgcggcccgtggcgatggcgtgaggcggttcgtcgggacgctgggctcgaagagagcgcgagctgttggtgcaattagggtttctgcgatctctggagacggcggtggcggtgctggtggtacgggaattgcggcggcagcggccgccactgtggtctttgctgtgatgaaccgggtgctctacaagctggcgctcgtgccaatgaagaattaccccttcttcctcgcccagttcgccacatttgggtatgtcctagtgtatttctcaattctcttcataagatttcgcgctgggattgtcactagagaaatgttagcgcttccgaagccacagttcatgctaattggtttactggaagcgctaggtgctgcttcaggcatggctgctgctgctatgttgcccgggccatctattccagtgttgtcacagtcctttctggtttggcaacttatcttatctgccctcatcttgggaaggaaatatagagcaaatcagatccttggctgcttgcttgttacagctggagtaattctagcagtggccggtggagccagtaatggtccgattctctttgaagtcaaattcttttggccagcagtaatgatgatttcagctgcatttcaagctgctgcttccattatcaaggagtttgttttcattgatggtgcaaaacgccttgagggaaagaagcctgatatatttgtagtcaactcttttggttctggtttccaggcactttttattttcctactccttccatttctctctaacttgaaagggattccttttgctgaactccctgcatacctaacccgtggtgctgcatgctttctgaatgtgggagggaatctgaagggtgagtattgtttctcatatcacattcatgtggtaaataagtggagcttctcatattatataatttcaaatctatggttaattagagaaaaagtgatgttctcatattatatgatttcaaatatatggttgattggagaaaagggatcttcatgaaatctttcacaagtgaatattatccatctcaacctttttgttttggtattatctatattattgaggtatgcatggcataaatgtttaacactttgctagctatgccaaactcaaaacgcttgtggccagcagtcttgaacatgattatctatgatctatgatgcaagatcatttgctaacggtttagatttttcagattgccatggagctcctttgctaccacttctctacataactctgaacatggccttcaacatttctgtccttaatcttgtgaagatgtctacagcagtggttgcttcgctgacatcaactttagcagtacctctttccatctatatactgtcactgcctctaccatatctacccgaaggaacaaatttgagcgcatcttttttgattggtgttgctaccttagtgctcggattgcttctatacaatcttcctcaagaatcaaccaatcaagtaaaggaagattaatctaaacccatatcagatataaggttaacaggaagctattggtgctccactaagaaaatagccgcattttgttgacagtggcttcacagtttggtacataactcatgaagagcagtgttcttctgccacaaacatttgcggtgcaaacatttgaggcaccagctgacttcaaagtttagaaacagcaagttcttgtttcatctgttaacaaaatcctaatggattatgcagctatatataagctctacctgagcggatgtaactactaactactttcagatgagtaagggctttacaaattcattggttgtataattgttctcaccattttttggtcaattcaagactaacataccagactccgtgggatttattatgtaaataagtaatgattgtaaccattataaatcttgattgtatggccaaccatttcaagtgaatgctagatacacggactacgttactattacttattt

SEQ ID NO: 84647 - DNA, 439 bp, Zea Mays
ctagtcctatcctattgtgcatttgaagcatggaaggaattcaattcggtcacttttggatagtactaggagtttatttcactactgtattggtccaatgatctatcgcacaggcatattgcttcccggtgtctgcaacagttagttggttgaaacaacctagaacagtacagcaaatgggcaaccgagagttcggtttgtgaatttcggtgcacagtcaatgccgacctccgccatttcttcaaaattccgactgtaacaagtgtaatatgtaatattggttaatcaggtttaatggatccagacgatgactgaaatgtcatttaaggaatgctttgtgcacagccatttgatgtgtgcctagtagctgttggtgcataaattttgtctaagcttcggatgaaaaaggttatcaatcttttatctgactgttaatttt

SEQ ID NO: 84648 - DNA, 2003 bp, Zea Mays
acaagctcctcctcctctcctccctacacactccagagccagaggcagcacgtgctgccgtgctcgagcacagctaggccgcagctgcatcaccatggcgggcgcgccgctgcggagatcggaccttgacttcgccgacgtctttggcggcccgccgcgccgcgtgtctgggaacgagcaccgctcgcagcgcggctcgcaggacacctcgtcgttcgagtccgcgacgagggcggggagcggcggaccggacacgcccgttttcggggaccgggggagctccgaccgaagaaggcagctcggggaggagttctacaaggacatattccccgggagcgaggcagcgtcgcccaggcggagcggcgccggggattgggggaatgtgttcggcgcgcaggcttcgcctgtctccacggcccgcccgcgatcgaggttccgttctcaaagtggagaaaagaagagcacatctaatcatgtcagctcaatggacaatgaatttgaagggactcctgttaacttggaaagtatcatggccaataacaagttccatttttccttctacaagtgggcaggcaaaggagccttgttagtgttgccagctactgcacaagaaaagtccgtagacatcattggactgagaagcttccctcaagtggtcattcaaggtattgatctaattgattgtgaagacagcatgtcaactgccaccggaacagccaaaaatcagacagattacgaagattcgaaatctggaaaacatagcgcaaactcagcaaccaaggatggagctattcctttactctttgaagactacatgcaaggaacgaaacagagcaatgatcatacaaagaatgatgtttcatcaactaccctgagttctaaaatttctcgatcaccttcaggggagagaagtcgtagtagcagggtgaaggaaaagatgaagggtttcataaaactatttagccctgagagttcaccaaagcgcaaacgagcaccggaaacacaaaggcaaacatctgtggggaaaaatggaaccaaaactgaactgcatgataagttcagcatgtccagtttggaggccagtgaggatgtggaaacgatgactgaagtgcaagagaggttggacaaaccagttttgacagcgaatagtaaaatggatacagctacgggaagtaatgaggccgcttctaatgagcccatccatgatgatacaaaagacaaagcggccaacacaatagagcatgaggacattgaagatcttgatggatgtgtggttgagcatttttctgaagatcatgttcttcataatgatcaggaaaaggagctaataaagatatcagaagctaaaattcgcgaatggtctaggggaaaagaaggaaatattaggtcattgctttcaacactgcaatatgtcttatggcctgagagtggatggaaaccagttccacttgttgatataattgaaggagcagcagttaagaaggcttaccagaaagcattattgtgccttcatccagataagttgcagcaacgaggtgctgccatgcatcagaagtgtatagcagagaaggtttttgacattttacaggaagcatggaaggaattcaattcggtcacttttggatagtactaggagtttatttcactactgtattggtccaatgatctatcgcacaggcatattgcttcccggtgtctgcaacagttagttggttgaaacaacctagaacagtacagcaaatgggcaaccgagagttcggtttgtgaatttcggtgcacagtcaatgccgacctccgccatttcttcaaaattccgactgtaacaagtgtaatatgtaatattggttaatcaggtttaatggatccagacgatgactgaaatgtcatttaaggaatgctttgtgcacagccatttgatgtgtgcctagtagctgttggtgcataaattttgtctaagcttcggatgaaaaaggttatcaatcttttatctgactgttaatttt

SEQ ID NO: 84649 - DNA, 2218 bp, Zea Mays
acaagctcctcctcctctcctccctacacactccagagccagaggcagcacgtgctgccgtgctcgagcacagctaggccgcagctgcatcaccatggcgggcgcgccgctgcggagatcggaccttgacttcgccgacgtctttggcggcccgccgcgccgcgtgtctgggaacgagcaccgctcgcagcgcggctcgcaggacacctcgtcgttcgagtccgcgacgagggcggggagcggcggaccggacacgcccgttttcggggaccgggggagctccgaccgaagaaggcagctcggggaggagttctacaaggacatattccccgggagcgaggcagcgtcgcccaggcggagcggcgccggggattgggggaatgtgttcggcgcgcaggcttcgcctgtctccacggcccgcccgcgatcgagcttctccattcggttcaacagaggcatggacagttcaatgcctacttctccctctcagcaaatgtccaacagaaacgatgatggcacatcttatgcttatagtgttccaacttcacccaatgcatccatgaacaattatcttgctcaaggggcagcccgacaagattcgaagaagaatcccttctcatggcatcgctatccatttctatctaggttccgttctcaaagtggagaaaagaagagcacatctaatcatgtcagctcaatggacaatgaatttgaagggactcctgttaacttggaaagtatcatggccaataacaagttccatttttccttctacaagtgggcaggcaaaggagccttgttagtgttgccagctactgcacaagaaaagtccgtagacatcattggactgagaagcttccctcaagtggtcattcaaggtattgatctaattgattgtgaagacagcatgtcaactgccaccggaacagccaaaaatcagacagattacgaagattcgaaatctggaaaacatagcgcaaactcagcaaccaaggatggagctattcctttactctttgaagactacatgcaaggaacgaaacagagcaatgatcatacaaagaatgatgtttcatcaactaccctgagttctaaaatttctcgatcaccttcaggggagagaagtcgtagtagcagggtgaaggaaaagatgaagggtttcataaaactatttagccctgagagttcaccaaagcgcaaacgagcaccggaaacacaaaggcaaacatctgtggggaaaaatggaaccaaaactgaactgcatgataagttcagcatgtccagtttggaggccagtgaggatgtggaaacggtatgactgaagtgcaagagaggttggacaaaccagttttgacagcgaatagtaaaatggatacagctacgggaagtaatgaggccgcttctaatgagcccatccatgatgatacaaaagacaaagcggccaacacaatagagcatgaggacattgaagatcttgatggatgtgtggttgagcatttttctgaagatcatgttcttcataatgatcaggaaaaggagctaataaagatatcagaagctaaaattcgcgaatggtctaggggaaaagaaggaaatattaggtcattgctttcaacactgcaatatgtcttatggcctgagagtggatggaaaccagttccacttgttgatataattgaaggagcagcagttaagaaggcttaccagaaagcattattgtgccttcatccagataagttgcagcaacgaggtgctgccatgcatcagaagtgtatagcagagaaggtttttgacattttacaggaagcatggaaggaattcaattcggtcacttttggatagtactaggagtttatttcactactgtattggtccaatgatctatcgcacaggcatattgcttcccggtgtctgcaacagttagttggttgaaacaacctagaacagtacagcaaatgggcaaccgagagttcggtttgtgaatttcggtgcacagtcaatgccgacctccgccatttcttcaaaattccgactgtaacaagtgtaatatgtaatattggttaatcaggtttaatggatccagacgatgactgaaatgtcatttaaggaatgctttgtgcacagccatttgatgtgtgcctagtagctgttggtgcataaattttgtctaagcttcggatgaaaaaggttatcaatcttttatctgactgttaatttt

SEQ ID NO: 84650 - DNA, 2347 bp, Zea Mays
acaagctcctcctcctctcctccctacacactccagagccagaggcagcacgtgctgccgtgctcgagcacagctaggccgcagctgcatcaccatggcgggcgcgccgctgcggagatcggaccttgacttcgccgacgtctttggcggcccgccgcgccgcgtgtctgggaacgagcaccgctcgcagcgcggctcgcaggacacctcgtcgttcgagtccgcgacgagggcggggagcggcggaccggacacgcccgttttcggggaccgggggagctccgaccgaagaaggcagctcggggaggagttctacaaggacatattccccgggagcgaggcagcgtcgcccaggcggagcggcgccggggattgggggaatgtgttcggcgcgcaggcttcgcctgtctccacggcccgcccgcgatcgagcttctccattcggttcaacagaggcatggacagttcaatgcctacttctccctctcagcaaatgtccaacagaaacgatgatggcacatcttatgcttatagtgttccaacttcacccaatgcatccatgaacaattatcttgctcaaggggcagcccgacaagattcgaagaagaatcccttctcatggcatcgctatccatttctatctaggttccgttctcaaagtggagaaaagaagagcacatctaatcatgtcagctcaatggacaatgaatttgaagggactcctgttaacttggaaagtatcatggccaataacaagttccatttttccttctacaagtgggcaggcaaaggagccttgttagtgttgccagctactgcacaagaaaagtccgtagacatcattggactgagaagcttccctcaagtggtcattcaaggtattgatctaattgattgtgaagacagcatgtcaactgccaccggaacagccaaaaatcagacagattacgaagattcgaaatctggaaaacatagcgcaaactcagcaaccaaggatggagctattcctttactctttgaagactacatgcaaggaacgaaacagagcaatgatcatacaaagaatgatgtttcatcaactaccctgagttctaaaatttctcgatcaccttcaggggagagaagtcgtagtagcagggtgaaggaaaagatgaagggtttcataaaactatttagccctgagagttcaccaaagcgcaaacgagcaccggaaacacaaaggcaaacatctgtggggaaaaatggaaccaaaactgaactgcatgataagttcagcatgtccagtttggaggccagtgaggatgtggaaacggtacaaatgaacagccagaatgcttttactgccgaaccttttccaatgactgaagtgcaagagaggttggacaaaccagttttgacagcgaatagtaaaatggatacagctacgggaagtaatgaggccgcttctaatgagcccatccatgatgatacaaaagacaaagcggccaacacaatagagcatgaggacattgaagatcttgatggatgtgtggttgagcatttttctgaagatcatgttcttcataatgatcaggaaaaggagctaataaagatatcagaagctaaaattcgcgaatggtctaggggaaaagaaggaaatattaggtcattgctttcaacactgcaatatgtcttatggcctgagagtggatggaaaccagttccacttgttgatataattgaaggagcagcagttaagaaggcttaccagaaagcattattgtgccttcatccagataagttgcagcaacgaggtgctgccatgcatcagaagtgtatagcagagaaggtttttgacattttacaggtgctattaattactgctttcccttgttgaaacactccagcagtccaaatatgctgttccggttgatgtcttgtcacgacactcaagaagcatggaaggaattcaattcggtcacttttggatagtactaggagtttatttcactactgtattggtccaatgatctatcgcacaggcatattgcttcccggtgtctgcaacagttagttggttgaaacaacctagaacagtacagcaaatgggcaaccgagagttcggtttgtgaatttcggtgcacagtcaatgccgacctccgccatttcttcaaaattccgactgtaacaagtgtaatatgtaatattggttaatcaggtttaatggatccagacgatgactgaaatgtcatttaaggaatgctttgtgcacagccatttgatgtgtgcctagtagctgttggtgcataaattttgtctaagcttcggatgaaaaaggttatcaatcttttatctgactgttaatttt

SEQ ID NO: 84651 - DNA, 2329 bp, Zea Mays
ccccgccacaagctcctcctcctctcctccctacacactccagagccagaggcagcacgtgctgccgtgctcgagcacagctaggccgcagctgcatcaccatggcgggcgcgccgctgcggagatcggaccttgacttcgccgacgtctttggcggcccgccgcgccgcgtgtctgggaacgagcaccgctcgcagcgcggctcgcaggacacctcgtcgttcgagtccgcgacgagggcggggagcggcggaccggacacgcccgttttcggggaccgggggagctccgaccgaagaaggcagctcggggaggagttctacaaggacatattccccgggagcgaggcagcgtcgcccaggcggagcggcgccggggattgggggaatgtgttcggcgcgcaggcttcgcctgtctccacggcccgcccgcgatcgagcttctccattcggttcaacagaggcatggacagttcaatgcctacttctccctctcagcaaatgtccaacagaaacgatgatggcacatcttatgcttatagtgttccaacttcacccaatgcatccatgaacaattatcttgctcaaggggcagcccgacaagattcgaagaagaatcccttctcatggcatcgctatccatttctatctaggttccgttctcaaagtggagaaaagaagagcacatctaatcatgtcagctcaatggacaatgaatttgaagggactcctgttaacttggaaagtatcatggccaataacaagttccatttttccttctacaagtgggcaggcaaaggagccttgttagtgttgccagctactgcacaagaaaagtccgtagacatcattggactgagaagcttccctcaagtggtcattcaaggtattgatctaattgattgtgaagacagcatgtcaactgccaccggaacagccaaaaatcagacagattacgaagattcgaaatctggaaaacatagcgcaaactcagcaaccaaggatggagctattcctttactctttgaagactacatgcaaggaacgaaacagagcaatgatcatacaaagaatgatgtttcatcaactaccctgagttctaaaatttctcgatcaccttcaggggagagaagtcgtagtagcagggtgaaggaaaagatgaagggtttcataaaactatttagccctgagagttcaccaaagcgcaaacgagcaccggaaacacaaaggcaaacatctgtggggaaaaatggaaccaaaactgaactgcatgataagttcagcatgtccagtttggaggccagtgaggatgtggaaacggtacaaatgaacagccagaatgcttttactgccgaaccttttccaatgactgaagtgcaagagaggttggacaaaccagttttgacagcgaatagtaaaatggatacagctacgggaagtaatgaggccgcttctaatgagcccatccatgatgatacaaaagacaaagcggccaacacaatagagcatgaggacattgaagatcttgatggatgtgtggttgagcatttttctgaagatcatgttcttcataatgatcaggaaaaggagctaataaagatatcagaagctaaaattcgcgaatggtctaggggaaaagaaggaaatattaggtcattgctttcaacactgcaatatgtcttatggcctgagagtggatggaaaccagttccacttgttgatataattgaaggagcagcagttaagaaggcttaccagaaagcattattgtgccttcatccagataagttgcagcaacgaggtgctgccatgcatcagaagtgtatagcagagaaggtttttgacattttacaggtgctattaattactgctttcccttgttgaaacactccagcagtccaaatatgctgttccggaagcatggaaggaattcaattcggtcacttttggatagtactaggagtttatttcactactgtattggtccaatgatctatcgcacaggcatattgcttcccggtgtctgcaacagttagttggttgaaacaacctagaacagtacagcaaatgggcaaccgagagttcggtttgtgaatttcggtgcacagtcaatgccgacctccgccatttcttcaaaattccgactgtaacaagtgtaatatgtaatattggttaatcaggtttaatggatccagacgatgactgaaatgtcatttaaggaatgctttgtgcacagccatttgatgtgtgcctagtagctgttggtgcataaattttgtctaagcttcggatgaaaaaggttatcaatcttttatctgactgttaatttt

SEQ ID NO: 84652 - DNA, 2243 bp, Zea Mays
cccaacgccgttcgcccgctccccgccacaagctcctcctcctctcctccctacacactccagagccagaggcagcacgtgctgccgtgctcgagcacagctaggccgcagctgcatcaccatggcgggcgcgccgctgcggagatcggaccttgacttcgccgacgtctttggcggcccgccgcgccgcgtgtctgggaacgagcaccgctcgcagcgcggctcgcaggacacctcgtcgttcgagtccgcgacgagggcggggagcggcggaccggacacgcccgttttcggggaccgggggagctccgaccgaagaaggcagctcggggaggagttctacaaggacatattccccgggagcgaggcagcgtcgcccaggcggagcggcgccggggattgggggaatgtgttcggcgcgcaggcttcgcctgtctccacggcccgcccgcgatcgagcttctccattcggttcaacagaggcatggacagttcaatgcctacttctccctctcagcaaatgtccaacagaaacgatgatggcacatcttatgcttatagtgttccaacttcacccaatgcatccatgaacaattatcttgctcaaggggcagcccgacaagattcgaagaagaatcccttctcatggcatcgctatccatttctatctaggttccgttctcaaagtggagaaaagaagagcacatctaatcatgtcagctcaatggacaatgaatttgaagggactcctgttaacttggaaagtatcatggccaataacaagttccatttttccttctacaagtgggcaggcaaaggagccttgttagtgttgccagctactgcacaagaaaagtccgtagacatcattggactgagaagcttccctcaagtggtcattcaaggtattgatctaattgattgtgaagacagcatgtcaactgccaccggaacagccaaaaatcagacagattacgaagattcgaaatctggaaaacatagcgcaaactcagcaaccaaggatggagctattcctttactctttgaagactacatgcaaggaacgaaacagagcaatgatcatacaaagaatgatgtttcatcaactaccctgagttctaaaatttctcgatcaccttcaggggagagaagtcgtagtagcagggtgaaggaaaagatgaagggtttcataaaactatttagccctgagagttcaccaaagcgcaaacgagcaccggaaacacaaaggcaaacatctgtggggaaaaatggaaccaaaactgaactgcatgataagttcagcatgtccagtttggaggccagtgaggatgtggaaacgatgactgaagtgcaagagaggttggacaaaccagttttgacagcgaatagtaaaatggatacagctacgggaagtaatgaggccgcttctaatgagcccatccatgatgatacaaaagacaaagcggccaacacaatagagcatgaggacattgaagatcttgatggatgtgtggttgagcatttttctgaagatcatgttcttcataatgatcaggaaaaggagctaataaagatatcagaagctaaaattcgcgaatggtctaggggaaaagaaggaaatattaggtcattgctttcaacactgcaatatgtcttatggcctgagagtggatggaaaccagttccacttgttgatataattgaaggagcagcagttaagaaggcttaccagaaagcattattgtgccttcatccagataagttgcagcaacgaggtgctgccatgcatcagaagtgtatagcagagaaggtttttgacattttacaggaagcatggaaggaattcaattcggtcacttttggatagtactaggagtttatttcactactgtattggtccaatgatctatcgcacaggcatattgcttcccggtgtctgcaacagttagttggttgaaacaacctagaacagtacagcaaatgggcaaccgagagttcggtttgtgaatttcggtgcacagtcaatgccgacctccgccatttcttcaaaattccgactgtaacaagtgtaatatgtaatattggttaatcaggtttaatggatccagacgatgactgaaatgtcatttaaggaatgctttgtgcacagccatttgatgtgtgcctagtagctgttggtgcataaattttgtctaagcttcggatgaaaaaggttatcaatcttttatctgactgttaatttt

SEQ ID NO: 84653 - DNA, 2289 bp, Zea Mays
acccaacgccgttcgcccgctccccgccacaagctcctcctcctctcctccctacacactccagagccagaggcagcacgtgctgccgtgctcgagcacagctaggccgcagctgcatcaccatggcgggcgcgccgctgcggagatcggaccttgacttcgccgacgtctttggcggcccgccgcgccgcgtgtctgggaacgagcaccgctcgcagcgcggctcgcaggacacctcgtcgttcgagtccgcgacgagggcggggagcggcggaccggacacgcccgttttcggggaccgggggagctccgaccgaagaaggcagctcggggaggagttctacaaggacatattccccgggagcgaggcagcgtcgcccaggcggagcggcgccggggattgggggaatgtgttcggcgcgcaggcttcgcctgtctccacggcccgcccgcgatcgagcttctccattcggttcaacagaggcatggacagttcaatgcctacttctccctctcagcaaatgtccaacagaaacgatgatggcacatcttatgcttatagtgttccaacttcacccaatgcatccatgaacaattatcttgctcaaggggcagcccgacaagattcgaagaagaatcccttctcatggcatcgctatccatttctatctaggttccgttctcaaagtggagaaaagaagagcacatctaatcatgtcagctcaatggacaatgaatttgaagggactcctgttaacttggaaagtatcatggccaataacaagttccatttttccttctacaagtgggcaggcaaaggagccttgttagtgttgccagctactgcacaagaaaagtccgtagacatcattggactgagaagcttccctcaagtggtcattcaaggtattgatctaattgattgtgaagacagcatgtcaactgccaccggaacagccaaaaatcagacagattacgaagattcgaaatctggaaaacatagcgcaaactcagcaaccaaggatggagctattcctttactctttgaagactacatgcaaggaacgaaacagagcaatgatcatacaaagaatgatgtttcatcaactaccctgagttctaaaatttctcgatcaccttcaggggagagaagtcgtagtagcagggtgaaggaaaagatgaagggtttcataaaactatttagccctgagagttcaccaaagcgcaaacgagcaccggaaacacaaaggcaaacatctgtggggaaaaatggaaccaaaactgaactgcatgataagttcagcatgtccagtttggaggccagtgaggatgtggaaacggtacaaatgaacagccagaatgcttttactgccgaaccttttccaatgactgaagtgcaagagaggttggacaaaccagttttgacagcgaatagtaaaatggatacagctacgggaagtaatgaggccgcttctaatgagcccatccatgatgatacaaaagacaaagcggccaacacaatagagcatgaggacattgaagatcttgatggatgtgtggttgagcatttttctgaagatcatgttcttcataatgatcaggaaaaggagctaataaagatatcagaagctaaaattcgcgaatggtctaggggaaaagaaggaaatattaggtcattgctttcaacactgcaatatgtcttatggcctgagagtggatggaaaccagttccacttgttgatataattgaaggagcagcagttaagaaggcttaccagaaagcattattgtgccttcatccagataagttgcagcaacgaggtgctgccatgcatcagaagtgtatagcagagaaggtttttgacattttacaggaagcatggaaggaattcaattcggtcacttttggatagtactaggagtttatttcactactgtattggtccaatgatctatcgcacaggcatattgcttcccggtgtctgcaacagttagttggttgaaacaacctagaacagtacagcaaatgggcaaccgagagttcggtttgtgaatttcggtgcacagtcaatgccgacctccgccatttcttcaaaattccgactgtaacaagtgtaatatgtaatattggttaatcaggtttaatggatccagacgatgactgaaatgtcatttaaggaatgctttgtgcacagccatttgatgtgtgcctagtagctgttggtgcataaattttgtctaagcttcggatgaaaaaggttatcaatcttttatctgactgttaatttt

SEQ ID NO: 84654 - DNA, 1435 bp, Zea Mays
aaggttttggtgtttgatgatcaacatagtatatagactaatgtgtttgctagtgattatgattgtagttcacaggatgtaaattgacttggagtaagacattaaggaaaacaacacctcaaaagaagacattataaagatcaaagtgaagatcaacaagtattaagcaaagtccaagaaacaaagaaatatgttgccactggcggactatccgatcaaggacaccgaactgtccggagccacacgctggattgtccgatgcaccagggaactgtagcccaacggctagtttctagtggtagtagggagagaagccacctcactgcaggtatgacaccagattcagactatccagtgtcgatatgacaccagatttagactgtccagtgtgacaccggattgtccggtgtaaaaacctgcatcaccaaagatcaactgttatgtcagatccaacagttagacacacagacagtggcatcaaactgtccggtgcctacaaccagactgtccgatttgccacatattgcagcagattttcttaaacggctagaattgagttaggttctatgtatagaccacccaaccggccaagtctcctttcccaactcgtttgagtaagttagccaagctcaatcacctagcaagccacacctccgagctcgatggcaattcaggaacctgtatatatagaaccccctaccagctccagcagattatgggtctttttgatccaactattttttgtccacattgtaaaatgcattaaatataataagggctaattaactaaccaacatatgcctagtacatgtgtgtaaaaaaattataggctacatttaacttgctctttctttatctgtcgtccagacctctacccgtttaatgactgccaaactcattaggcttgcctgaagcaacctggccttcactagacgatctatagctgctccagagcattttttgcacggaagcaatatgcaaaaaaaatatcgtttggggttaatgttgtgtattagcaaccaaacaactgtcgttgatgttgtgtatcagcaattcagcatccaaataactgtaggtgtaatgttgcgtgccaaatatatcaaaaccaacatatcagcttagttcctggtaaattttaaacatcatgaactaaaagtccagtagttcttgtacaggagtacttgtttatgctttaatctaccactgtgtacccagggcatatcatcattgctcatgcgggttatctttaattcaagagatcaagctgcatcagaaattgatgaagataaatcgatcataagatgctcaaccaaactttatgagaactgaaaatttgtagtttcacgtgaacatgaaatttgccaacattctgacgattatcaagtaaaaaaagtggtaaagaccaaaatttaaaattgtatacagaagaattcat

SEQ ID NO: 84655 - DNA, 2082 bp, Zea Mays
gttcctgcccgtgcagctgcatgccgacatggtgttctacgttcacagcgaagaagagagcagcgaacagagctccctggaggtggagcgaggagacgtatacaactttgagcaggggagcatcctgtacatccagagctaccccaacgccagtagacagcgtcttcggatctacgccatcttcaccagcgaaggcatcaacgccgatgacccctcgaagcccaaggtggaagcttactccagcgtcagcaatctggtcaaagggttcgagacagacgttcttcgcctgggatttggggtcaaacccgaggtggtagaagcgatcaagtctgccaagacaccgccaccgatcatagcctacaacccagaggaggagaagggggacaagaaacccggctggaccgagaacatcatcgacgctctgctgggcgtgcgcgatccggaggagttccttaacaagaagaagaagaagaaggacaagcacaaggacaagaagtccaagagcaaggcgttcaacttctactccggaaagccagacgtccagaactgctacgggtggagccggatgatgactagcaaggacctcgacgcgctgcacggatccagcattggcatgttcatggtgaacctgactacgggttcgatgatggggcctcactggaaccccaaggccacggagatcgccatcgtgacagagggttcaggaatcgtgcagacggtgtgcccgagcagcagcagcagcagcagcagcccgtcgggcgggagcagtggagaccaccaccacggtcacaagcggcgcggcgggccgggaggccgcggcgatgagggcgaaggcgaaggcggccgcgcgcggtggcagtgcaggaactcggtgttccgtgtgaaggaaggcgacgtcttcgtggtgccgcggttccacccgatggcgcagatgtcgttcaacgacgactcgttcgtgttcgtcgggttcagcacccacatggggcaaaaccacccgcagttcctggccgggaagggctccgtgctgcaggccattgggaagaaggtgctggcgctggcgctggggcagcgggacccgaccgccgtggacaagctgctgtccgcgcagcgcgagtcgacgatactgccgtgcgtatcgtgcgctgaggagctggcggagaaggccgaggaggagaggaagcgacgggaggaggaagggggagggaaagggaaaggaccgggagaacgtgagaaggaaaaggagaggagggaacgggaggagaaggaaaaggaggaagagcgggagagggaacgggaggaaaaggagaggaaggaaagggaacgggaggaaaaggagaggaaggaaagggaacgggaggaagaagagaggagggaagaggaagaagagcgggccaggaaggagcaagagaagcagcggaggagagagaaagaggaggaggagcgtgcacggagacgcgaggaggaagaaagagagagggaggaggaagaagaacggcggagggaggaggaagaaggtggaggcggacgtggtgacgagccagagagggaggaagaaggcggtgacaagccgccataccggttgtccaagaaactgaagaaacgctaccatgcacgtgccggtgtgttcagcaggagtggctgagtgagcagccgagcagagctggcctctgctccgtacaaataaacaggtggcctcgtacagatggccaattgccacatcaccaccactcgtacagagtaccacctgccagtcggctatgtatgtgtgttcgttgtgtcgtttgttaagctttgctgcatgctgagtttagattccgcttgtataaaacgtaccctaaataagcagacaagttttcaggctcatgcatgtgtcctgccccttgctcaaccaatgcatgatgctcgtgcatcctccacccaatgccgattcactgaatcatcagtagtgttcttgaaatcagttcacatctgaatagctattccaatgctgtcaaggatgtcgttaacggctttgacacaatccagcaatatgcaagtatcaagtaattataaccgatgatcgatcaggccggttatttttct

SEQ ID NO: 84656 - DNA, 2124 bp, Zea Mays
ccccggggcgctgttcctgcccgtgcagctgcatgccgacatggtgttctacgttcacagcgggacagggcggggcaaggtgacttccatagaagaagagagcagcgaacagagctccctggaggtggagcgaggagacgtatacaactttgagcaggggagcatcctgtacatccagagctaccccaacgccagtagacagcgtcttcggatctacgccatcttcaccagcgaaggcatcaacgccgatgacccctcgaagcccaaggtggaagcttactccagcgtcagcaatctggtcaaagggttcgagacagacgttcttcgcctgggatttggggtcaaacccgaggtggtagaagcgatcaagtctgccaagacaccgccaccgatcatagcctacaacccagaggaggagaagggggacaagaaacccggctggaccgagaacatcatcgacgctctgctgggcgtgcgcgatccggaggagttccttaacaagaagaagaagaagaaggacaagcacaaggacaagaagtccaagagcaaggcgttcaacttctactccggaaagccagacgtccagaactgctacgggtggagccggatgatgactagcaaggacctcgacgcgctgcacggatccagcattggcatgttcatggtgaacctgactacgggttcgatgatggggcctcactggaaccccaaggccacggagatcgccatcgtgacagagggttcaggaatcgtgcagacggtgtgcccgagcagcagcagcagcagcagcagcccgtcgggcgggagcagtggagaccaccaccacggtcacaagcggcgcggcgggccgggaggccgcggcgatgagggcgaaggcgaaggcggccgcgcgcggtggcagtgcaggaactcggtgttccgtgtgaaggaaggcgacgtcttcgtggtgccgcggttccacccgatggcgcagatgtcgttcaacgacgactcgttcgtgttcgtcgggttcagcacccacatggggcaaaaccacccgcagttcctggccgggaagggctccgtgctgcaggccattgggaagaaggtgctggcgctggcgctggggcagcgggacccgaccgccgtggacaagctgctgtccgcgcagcgcgagtcgacgatactgccgtgcgtatcgtgcgctgaggagctggcggagaaggccgaggaggagaggaagcgacgggaggaggaagggggagggaaagggaaaggaccgggagaacgtgagaaggaaaaggagaggagggaacgggaggagaaggaaaaggaggaagagcgggagagggaacgggaggaaaaggagaggaaggaaagggaacgggaggaaaaggagaggaaggaaagggaacgggaggaagaagagaggagggaagaggaagaagagcgggccaggaaggagcaagagaagcagcggaggagagagaaagaggaggaggagcgtgcacggagacgcgaggaggaagaaagagagagggaggaggaagaagaacggcggagggaggaggaagaaggtggaggcggacgtggtgacgagccagagagggaggaagaaggcggtgacaagccgccataccggttgtccaagaaactgaagaaacgctaccatgcacgtgccggtgtgttcagcaggagtggctgagtgagcagccgagcagagctggcctctgctccgtacaaataaacaggtggcctcgtacagatggccaattgccacatcaccaccactcgtacagagtaccacctgccagtcggctatgtatgtgtgttcgttgtgtcgtttgttaagctttgctgcatgctgagtttagattccgcttgtataaaacgtaccctaaataagcagacaagttttcaggctcatgcatgtgtcctgccccttgctcaaccaatgcatgatgctcgtgcatcctccacccaatgccgattcactgaatcatcagtagtgttcttgaaatcagttcacatctgaatagctattccaatgctgtcaaggatgtcgttaacggctttgacacaatccagcaatatgcaagtatcaagtaattataaccgatgatcgatcaggccggttatttttct

SEQ ID NO: 84657 - DNA, 2290 bp, Zea Mays
cgaacgcgcagtccagctcactgcggagggcgggccaagtggcgccggcggggcacacctcacgcgccacgacaccggcgaccatcactctcgtcgccaccgcgccacgtgccgcccatgcacggccacagcgccagcgtcacccacgtcgcacgcacgcagcgtccccgagggcgcaagcctagctgcttatcaagcggcccaaagcgcgatccaccactccgcagatcgcagcccgtgcggggacggggggagaactcagagcagagattctagctgccttagttagcttgggtcatggcggtggcgacgactgctcggtggctcctgctcctggctgtcgtctcggcggccgcggcgtccgggaagcacgagaggtggagggtgggcggccaggtggtggagaaggagcgacggcgggtggtggcggagagcgaggccggctcggtctcggccgtggacgtcgccgacgcggcgggcacggcgtaccggctgcacttcatcaccatggaccccggggcgctgttcctgcccgtgcagctgcatgccgacatggtgttctacgttcacagcgggcggggcaaggtgacttccatagaagaagagagcagcgaacagagctccctggaggtggagcgaggagacgtatacaactttgagcaggggagcatcctgtacatccagagctaccccaacgccagtagacagcgtcttcggatctacgccatcttcaccagcgaaggcatcaacgccgatgacccctcgaagcccaaggtggaagcttactccagcgtcagcaatctggtcaaagggttcgagacagacgttcttcgcctgggatttggggtcaaacccgaggtggtagaagcgatcaagtctgccaagacaccgccaccgatcatagcctacaacccagaggaggagaagggggacaagaaacccggctggaccgagaacatcatcgacgctctgctgggcgtgcgcgatccggaggagttccttaacaagaagaagaagaagaaggacaagcacaaggacaagaagtccaagagcaaggcgttcaacttctactccggaaagccagacgtccagaactgctacgggtggagccggatgatgactagcaaggacctcgacgcgctgcacggatccagcattggcatgttcatggtgaacctgactacgggttcgatgatggggcctcactggaaccccaaggccacggagatcgccatcgtgacagagggttcaggaatcgtgcagacggtgtgcccgagcagcagcagcagcagcagcagcccgtcgggcgggagcagtggagaccaccaccacggtcacaagcggcgcggcgggccgggaggccgcggcgatgagggcgaaggcgaaggcggccgcgcgcggtggcagtgcaggaactcggtgttccgtgtgaaggaaggcgacgtcttcgtggtgccgcggttccacccgatggcgcagatgtcgttcaacgacgactcgttcgtgttcgtcgggttcagcacccacatggggcaaaaccacccgcagttcctggccgggaagggctccgtgctgcaggccattgggaagaagagcgggccaggaaggagcaagagaagcagcggaggagagagaaagaggaggaggagcgtgcacggagacgcgaggaggaagaaagagagagggaggaggaagaagaacggcggagggaggaggaagaaggtggaggcggacgtggtgacgagccagagagggaggaagaaggcggtgacaagccgccataccggttgtccaagaaactgaagaaacgctaccatgcacgtgccggtgtgttcagcaggagtggctgagtgagcagccgagcagagctggcctctgctccgtacaaataaacaggtggcctcgtacagatggccaattgccacatcaccaccactcgtacagagtaccacctgccagtcggctatgtatgtgtgttcgttgtgtcgtttgttaagctttgctgcatgctgagtttagattccgcttgtataaaacgtaccctaaataagcagacaagttttcaggctcatgcatgtgtcctgccccttgctcaaccaatgcatgatgctcgtgcatcctccacccaatgccgattcactgaatcatcagtagtgttcttgaaatcagttcacatctgaatagctattccaatgctgtcaaggatgtcgttaacggctttgacacaatccagcaatatgcaagtatcaagtaattataaccgatgatcgatcaggccggttatttttct

SEQ ID NO: 84658 - DNA, 2528 bp, Zea Mays
cgaacgcgcagtccagctcactgcggagggcgggccaagtggcgccggcggggcacacctcacgcgccacgacaccggcgaccatcactctcgtcgccaccgcgccacgtgccgcccatgcacggccacagcgccagcgtcacccacgtcgcacgcacgcagcgtccccgagggcgcaagcctagctgcttatcaagcggcccaaagcgcgatccaccactccgcagatcgcagcccgtgcggggacggggggagaactcagagcagagattctagctgccttagttagcttgggtcatggcggtggcgacgactgctcggtggctcctgctcctggctgtcgtctcggcggccgcggcgtccgggaagcacgagaggtggagggtgggcggccaggtggtggagaaggagcgacggcgggtggtggcggagagcgaggccggctcggtctcggccgtggacgtcgccgacgcggcgggcacggcgtaccggctgcacttcatcaccatggaccccggggcgctgttcctgcccgtgcagctgcatgccgacatggtgttctacgttcacagcgggcggggcaaggtgacttccatagaagaagagagcagcgaacagagctccctggaggtggagcgaggagacgtatacaactttgagcaggggagcatcctgtacatccagagctaccccaacgccagtagacagcgtcttcggatctacgccatcttcaccagcgaaggcatcaacgccgatgacccctcgaagcccaaggtggaagcttactccagcgtcagcaatctggtcaaagggttcgagacagacgttcttcgcctgggatttggggtcaaacccgaggtggtagaagcgatcaagtctgccaagacaccgccaccgatcatagcctacaacccagaggaggagaagggggacaagaaacccggctggaccgagaacatcatcgacgctctgctgggcgtgcgcgatccggaggagttccttaacaagaagaagaagaagaaggacaagcacaaggacaagaagtccaagagcaaggcgttcaacttctactccggaaagccagacgtccagaactgctacgggtggagccggatgatgactagcaaggacctcgacgcgctgcacggatccagcattggcatgttcatggtgaacctgactacgggttcgatgatggggcctcactggaaccccaaggccacggagatcgccatcgtgacagagggttcaggaatcgtgcagacggtgtgcccgagcagcagcagcagcagcagcagcccgtcgggcgggagcagtggagaccaccaccacggtcacaagcggcgcggcgggccgggaggccgcggcgatgagggcgaaggcgaaggcggccgcgcgcggtggcagtgcaggaactcggtgttccgtgtgaaggaaggcgacgtcttcgtggtgccgcggttccacccgatggcgcagatgtcgttcaacgacgactcgttcgtgttcgtcgggttcagcacccacatggggcaaaaccacccgcagttcctggccgggaagggctccgtgctgcaggccattgggaagaaggtgctggcgctggcgctggggcagcgggacccgaccgccgtggacaagctgctgtccgcgcagcgcgagtcgacgatactgccgtgcgtatcgtgcgctgaggagctggcggagaaggaaaaggaggaagagcgggagagggaacgggaggaaaaggagaggaaggaaagggaacgggaggaaaaggagaggaaggaaagggaacgggaggaagaagagaggagggaagaggaagaagagcgggccaggaaggagcaagagaagcagcggaggagagagaaagaggaggaggagcgtgcacggagacgcgaggaggaagaaagagagagggaggaggaagaagaacggcggagggaggaggaagaaggtggaggcggacgtggtgacgagccagagagggaggaagaaggcggtgacaagccgccataccggttgtccaagaaactgaagaaacgctaccatgcacgtgccggtgtgttcagcaggagtggctgagtgagcagccgagcagagctggcctctgctccgtacaaataaacaggtggcctcgtacagatggccaattgccacatcaccaccactcgtacagagtaccacctgccagtcggctatgtatgtgtgttcgttgtgtcgtttgttaagctttgctgcatgctgagtttagattccgcttgtataaaacgtaccctaaataagcagacaagttttcaggctcatgcatgtgtcctgccccttgctcaaccaatgcatgatgctcgtgcatcctccacccaatgccgattcactgaatcatcagtagtgttcttgaaatcagttcacatctgaatagctattccaatgctgtcaaggatgtcgttaacggctttgacacaatccagcaatatgcaagtatcaagtaattataaccgatgatcgatcaggccggttatttttct

SEQ ID NO: 84659 - DNA, 2311 bp, Zea Mays
cgaacgcgcagtccagctcactgcggagggcgggccaagtggcgccggcggggcacacctcacgcgccacgacaccggcgaccatcactctcgtcgccaccgcgccacgtgccgcccatgcacggccacagcgccagcgtcacccacgtcgcacgcacgcagcgtccccgagggcgcaagcctagctgcttatcaagcggcccaaagcgcgatccaccactccgcagatcgcagcccgtgcggggacggggggagaactcagagcagagattctagctgccttagttagcttgggtcatggcggtggcgacgactgctcggtggctcctgctcctggctgtcgtctcggcggccgcggcgtccgggaagcacgagaggtggagggtgggcggccaggtggtggagaaggagcgacggcgggtggtggcggagagcgaggccggctcggtctcggccgtggacgtcgccgacgcggcgggcacggcgtaccggctgcacttcatcaccatggaccccggggcgctgttcctgcccgtgcagctgcatgccgacatggtgttctacgttcacagcgggcggggcaaggtgacttccatagaagaagagagcagcgaacagagctccctggaggtggagcgaggagacgtatacaactttgagcaggggagcatcctgtacatccagagctaccccaacgccagtagacagcgtcttcggatctacgccatcttcaccagcgaaggcatcaacgccgatgacccctcgaagcccaaggtggaagcttactccagcgtcagcaatctggtcaaagggttcgagacagacgttcttcgcctgggatttggggtcaaacccgaggtggtagaagcgatcaagtctgccaagacaccgccaccgatcatagcctacaacccagaggaggagaagggggacaagaaacccggctggaccgagaacatcatcgacgctctgctgggcgtgcgcgatccggaggagttccttaacaagaagaagaagaagaaggacaagcacaaggacaagaagtccaagagcaaggcgttcaacttctactccggaaagccagacgtccagaactgctacgggtggagccggatgatgactagcaaggacctcgacgcgctgcacggatccagcattggcatgttcatggtgaacctgactacgggttcgatgatggggcctcactggaaccccaaggccacggagatcgccatcgtgacagagggttcaggaatcgtgcagacggtgtgcccgagcagcagcagcagcagcagcagcccgtcgggcgggagcagtggagaccaccaccacggtcacaagcggcgcggcgggccgggaggccgcggcgatgagggcgaaggcgaaggcggccgcgcgcggtggcagtgcaggaactcggtgttccgtgtgaaggaaggcgacgtcttcgtggtgccgcggttccacccgatggcgcagatgtcgttcaacgacgactcgttcgtgttcgtcgggttcagcacccacatggggcaaaaccacccgcagttcctggccgggaagggctccgtgctgcaggccattgggaagaagagaggagggaagaggaagaagagcgggccaggaaggagcaagagaagcagcggaggagagagaaagaggaggaggagcgtgcacggagacgcgaggaggaagaaagagagagggaggaggaagaagaacggcggagggaggaggaagaaggtggaggcggacgtggtgacgagccagagagggaggaagaaggcggtgacaagccgccataccggttgtccaagaaactgaagaaacgctaccatgcacgtgccggtgtgttcagcaggagtggctgagtgagcagccgagcagagctggcctctgctccgtacaaataaacaggtggcctcgtacagatggccaattgccacatcaccaccactcgtacagagtaccacctgccagtcggctatgtatgtgtgttcgttgtgtcgtttgttaagctttgctgcatgctgagtttagattccgcttgtataaaacgtaccctaaataagcagacaagttttcaggctcatgcatgtgtcctgccccttgctcaaccaatgcatgatgctcgtgcatcctccacccaatgccgattcactgaatcatcagtagtgttcttgaaatcagttcacatctgaatagctattccaatgctgtcaaggatgtcgttaacggctttgacacaatccagcaatatgcaagtatcaagtaattataaccgatgatcgatcaggccggttatttttct

SEQ ID NO: 84660 - DNA, 2335 bp, Zea Mays
ggcggcgatcgtcgcatcgttgtgaaaatgccgcgaacggtgtctgatggaggagaggaccacggtgccgacgttgctagccggacgtcgtcacaccgccgcatggagcacgggcatgggtataaggtcggcatcccgccgaagaagagcctcctcaccgagttctctgacgcggtgaaggagacgttcttcgccgacgacccacttcggcagtacaaggaccagcccaagtccaagaagctctggctcggcctgcagcacatcttcccggtgctcgactggagcagacgctattccctcagcaagttcaagggcgacttcatcgctgggctcaccattgccagcctctgcataccccaggacatcggctactctaagcttgctaacttgccagcagaggtgggactatacagtagcttcgtgccgcctctgatatacgcagtgatgggcagctccagggatatagccatcggtccggtggccgtggtgtcgctgttgctcggtactctccttcagaatgagattgaccccaagacacacccgcttgagtacaggcggctagcgttcaccgcaaccttcttcgcaggggtcacgcaggcagcgctcggattcttcaggttagggtttatcatagagttcctgtctcatgctgccattgtcggattcatggctggtgctgccatcaccatcgctcttcagcagctgaaagggttccttggaattgcagacttcaccaagaaatctgatattgtatctgtgatgaaatcagtttggggaaacgttcaccatgggtggaattggcagacaatactgataggagcgtccttcctggcattccttctggttgccaagtacattgggaaaaggaataaaaagctcttctgggtttctgcaatcgcacctctcacttcggtgatcatatccacattttttgtgtacatcactcgtgcagataagcatggtgttgcaatcgtcaagaacataaggaaaggcatcaacccagcttcagctagtctcatatacttcactggcccatacttggcgacaggattcaaaattggggtagtggctggaatgatagggctaacggaagcaattgcaattggaagaacgtttgctggcctcaaggattaccagatagatgggaacaaagaaatggtggctctagggaccatgaacattgttggttcaatgacttcttgctacgtagccacaggttctttctcgcggtcagcagtcaattacatggctggctgcaaaacagcggtgtcaaatgttgtcatgtccactgtcgtgatgcttacgctgctgctgatcaccccactgttcaagtacactccaaatgccatcctctcctcaatcataatatcagcagtgcttggtttgattgactatgagtcagcttaccttatctggaaagtcgacaaactggacttcctagcatgcatgggggcattctttggagtcatattttcatcagtggagtatggcttgctcattgcggttgcgatatctcttgctaaaattcttctccaagtaacacggccaagaacagttttacttggaaaccttccacgaacgactatatacaggaacgtcgaacagtatcctgatgctaccaaggttccaggggtggtaattatcagagtggattcagctatctacttcacaaactccaactatattaaagagagaatcctgaggtggctcagagacgaggaagaggagcaacaacatgaccagaagttaccaaaaactgagtttctgatcgctgatctatctcctgtaattgatatcgacacaagcggaatccacgccttggaggagttgctgaaagcgcttgagaaacgcaaaattcagctggttcttgccaatcccgggccagcggtgatccagaagctccgctcggcgaagttcacggacatgattggtgaagacaagatacacctcacggtcggcgatgctgtgaagaaatttgctcccaagatggtggataatgtctgaaggaggttcagagtcatgtacagtatgagcaagaggacaagtgtggatttatagagcagaagcagcacagaacggcagtagtaaatagcacggtttgcagaagggtagtaaataaagaagacgctcccagagttggagggcatcgcgtttgccgggatgtggttggataggaagcagatggtggcctgtttgggcgtctatgtcaagtccttgtggttgtggagtctgttccgcgttggcaagcacttaggtgacggagatcgaaggtttgatggatgcctgctgattaagggttcgtttggattctttagtgcatggactaaacttttgt

SEQ ID NO: 84661 - DNA, 239 bp, Zea Mays
gtgcaatcaacatggacaaggcttgatcaccaagaagggttttaagggctcattcagcaatgcagggtcctctgccaagacttttgcaattctctctggcgttcagagtttggttttgtgcttgttgcgaaggctacgtggcaaggatgacagtacgtataccttgttatccggtcatatatttgttaacatatctgaacttgtatgtgtaaatatgaactgacatgttctgtcggcag

SEQ ID NO: 84662 - DNA, 1418 bp, Zea Mays
atcaattccgcttcggcactagaccaccactcgccgacgccgctcctccctcttctgcttctcccagcgccgcccgcccccgccgttccctcacacgccgcccgccgcgcaagagccgcgacctcgtcacgtctgcccgctggtgccgtggccccgtcgacgtccgcccgcacaggactctccgagtgtgggattgagccgtactttttttttttggtggctcgggccgagatccggtactgtatgagggttgccaactagactttaagatcgctgattcaatggaggcctccgaggcagcacctgcagcggcggacaccgtcatggaagcagaggatgtgagcggcgggaagggcgaatggtacgtgcttggggagcgggcgctgatggtgccgtacacgcgggagcacgtgccgcggtaccacgactggatgcaggacccggcgctgctggaggccaccgcgtcggagcccctctccctctcgcaggagttcgaggtccaccgctcatggaccctcgaccctctaaagcacactttcatagtgttggataaggagctcatagagggagagttcgtgccgggcaacccgcacattgaagattgaatcagttcttggcaactcgtgtccttccggtctcaatgacttccggtctcaggaacggattgaagcgagctgcaccaggaaagtagtgaaagtgattaactcgcccctaaagccaaacaataaatacgagcgatctatggttggtgatgtgaacatatatatgaatgactctgatgatgtgcagatcgcggagatagagattatgatagctgaacataagagccgtgggaagggtattggtcaagaagcaatcttactgatgatggcaattgcagtagagaaatatggaattcacacgttcagggcaaaaattagcgaatcaaatatggcatcgcttaagctcttcaggaagttgggcttcaaggatgcttcatacagtgtggtgttcaaggaggtgactctggaggcacccgctgactcactcccgttgagatttcctctgaccattggagactggtgacgtctgacatgccccaagctaattccatgcagacgacacaagaagctaatgctgtttgtctgtactatctgaccaaaatttactcgggctgatattgtatgaaaaattgaataaaacagttgcacagttgtgattcaattgcattagaccagtcgggtttttcatgtcactattttgaagaccccatatcttataaacaaatgtagacaagttttatctcataaattttttttatcgtatctctcatcatcaataatactacctccgttcacaaatatatgacaccgttgacttttttcgaaaactttgatcactcgatctatttaaaatatttattcaaaaatgtaaaattg

SEQ ID NO: 84663 - DNA, 743 bp, Zea Mays
ctcatgtcggtacagccgagaaccgggaccggtgattttcccctcccccttgtcttgctgcttccaattgacccgtcaattgctcaggcgatagtggctgcagtgcatttctgggatggggctgctcttccttgagcggctcgagggggagggcgtgttcaggtgccggcgctgccgcgtggacgccgcctccaaggacgccatcatctccagggacttctacggccgcagcggccgcgcctacctcttcgaccactgtgaacatatgcctaggccctaatgaggatcggtatcttgtaaccgggctccatactgtgaatgacatctactgtagctgctgccaacagattcttggctggagatatgagaaagcctacgagcaaagccagaaatacaaggaagggaagtacatcctcgagagagctagaatggtgaaggatgggtgacgatcatttggatgctcttacttctaacaccccagaagcgcaatcttcttgaactctggaaagattcagaactatccctcaatttgcatgcctcagaacatttgacacctaattggcatcccagttagctaggaagatcactggttgcagattctttgatttgtagaatattactgactctgaatacccttagcttgttagtaatggtaacatttggtgaaatattgatgattaggtgaattgaagtgaagctgatgatttatctgtagtaaccattattattcaggcgccctgtgg

SEQ ID NO: 84664 - DNA, 564 bp, Zea Mays
ctcatgtcggtacagccgagaaccgggaccgtgcatttctgggatggggctgctcttccttgagcggctcgagggggagggcgtgttcaggtgccggcgctgccgcgtggacgccgcctccaaggacgccatcatctccagggacttctacggccgcagcggccgcgcctacctcttcgaccacgtgagaaagcctacgagcaaagccagaaatacaaggaagggaagtacatcctcgagagagctagaatggtgaaggatgggtgacgatcatttggatgctcttacttctaacaccccagaagcgcaatcttcttgaactctggaaagattcagaactatccctcaatttgcatgcctcagaacatttgacacctaattggcatcccagttagctaggaagatcactggttgcagattctttgatttgtagaatattactgactctgaatacccttagcttgttagtaatggtaacatttggtgaaatattgatgattaggtgaattgaagtgaagctgatgatttatctgtagtaaccattattattcaggcgccctgtgg

SEQ ID NO: 84665 - DNA, 1408 bp, Zea Mays
ctcaattctcatgtcggtacagccgagaaccgggaccgtgcatttctgggatggggctgctcttccttgagcggctcgagggggagggcgtgttcaggtgccggcgctgccgcgtggacgccgcctccaaggacgccatcatctccagggacttctacggccgcagcggccgcgcctacctcttcgaccacgttgtgaacatatgcctaggccctaatgaggatcggtatcttgtaaccgggctccatactgtgaatgacatctactgtagctgctgccaacagattcttggctggagatatgtgagtacaaacataattggcttatcttgtgataatgaattgtcttatttccattggatcatgcttggcagtagacacagtagcgaaattacttttttattaaaaaggaaaaaaaatagtctgcaacaatttgttgagatgagaacaaaactgaagaaatacttatcatttcttcaaaaagcgctgaatatcaaatgggcggctatgcacaataaatgaaaactaatgctttattcatttctcaactgctacatgcatataagcgttttcctcgaaccatttaggtaacaatgaatccaattctgcttcagtttctgggcttaatcattggattgcacaatgatttaaaagctgtttatctggagatgtaaacaccattttgctgttcatatgcggttgttttccctgttcttgaaagttcagctctgaattttgtgttgtagttgcagaaatcatatgtgcatttttaacagcaaattggaaggaacataatctcccatgtatctgtatccttttttatttcaattcttttttttttgaaagaaatggcaggagctctgcctaatcattaaaaggagagtccagaaaacacactgtacaggtccgaggaccgagacaagacaagacagactagcaaacacgacgtgaggaacgctcctaacagacccgtacaaagcagctaaaccactgcagcagccctaatactggggaacgtagctctcttgaaagagaaagcctacgagcaaagccagaaatacaaggaagggaagtacatcctcgagagagctagaatggtgaaggatgggtgacgatcatttggatgctcttacttctaacaccccagaagcgcaatcttcttgaactctggaaagattcagaactatccctcaatttgcatgcctcagaacatttgacacctaattggcatcccagttagctaggaagatcactggttgcagattctttgatttgtagaatattactgactctgaatacccttagcttgttagtaatggtaacatttggtgaaatattgatgattaggtgaattgaagtgaagctgatgatttatctgtagtaaccattattattcaggcgccctgtgg

SEQ ID NO: 84666 - DNA, 881 bp, Zea Mays
cccttttccgcatcatctcaattctcatgtcggtacagccgagaaccgggaccgtgcatttctgggatggggctgctcttccttgagcggctcgagggggagggcgtgttcaggtgccggcgctgccgcgtggacgccgcctccaaggacgccatcatctccagggacttctacggccgcagcggccgcgcctacctcttcgaccacgttgtgaacatatgcctaggccctaatgaggatcggtatcttgtaaccgggctccatactgtgaatgacatctactgtagctgctgccaacagattcttggctggagatataaatggcaggagctctgcctaatcattaaaaggagagtccagaaaacacactgtacaggtccgaggaccgagacaagacaagacagactagcaaacacgacgtgaggaacgctcctaacagacccgtacaaagcagctaaaccactgcagcagccctaatactggggaacgtagctctcttgaaagagaaagcctacgagcaaagccagaaatacaaggaagggaagtacatcctcgagagagctagaatggtgaaggatgggtgacgatcatttggatgctcttacttctaacaccccagaagcgcaatcttcttgaactctggaaagattcagaactatccctcaatttgcatgcctcagaacatttgacacctaattggcatcccagttagctaggaagatcactggttgcagattctttgatttgtagaatattactgactctgaatacccttagcttgttagtaatggtaacatttggtgaaatattgatgattaggtgaattgaagtgaagctgatgatttatctgtagtaaccattattattcaggcgccctgtgg

SEQ ID NO: 84667 - DNA, 1216 bp, Zea Mays
ttggagttctggtagtagttcatcagaagagttcgttgtaacttcctaatccacgaaagctaggtgtagagttaatctaaagatccagcagtctgcaaggtggccaaagaaaacaacacggcaggagtgaagatctctgataggatgacttcagtgtccgaattaacacttgtgctggcttcaggtgcatcaatgttaccgcatccttcgaaggtacggacaggtggtgaagatgcatattttatagcttgtgatggctggtttggtgtagcagatggagttggtcagtggtcatttgaagggatcaatgccggactttatgccagagaactaatggatggctgcaaaaagatcgtggaagagacccaaggagctccagggatgagaaccgaggaagttcttgccaaggctgcagatgaagcacggtcccctggttcttccactgttttagttgctcactttgatggaaaggttcttcacgcatcaaacatcggagattctggattcctcgtgattaggaatggagaggtccataagaaatcaaacccaatgacttacggtttcaatttcccgttgcagattgagaagggtgacgaccctctaaaacttgtacagaaatacgccatctgtctacaagaaggcgacgtcgttgtaacagcgtcagacggtcttttcgacaacgtctacgaggaagaagtggcaggcatcgtctcgaaatcattagaagctgatctgaagcccacggaaatcgccgatttactggttgcccgagcgaaggaggtggggcggtgtgggtttggaaggagcccgttctcggactccgctctcgcggctgggtacctgggctactccggcggcaagctggatgatgtaacggttgttgtatcgattgttcggaaatctgaagtttaataaactagaaacgaactagcaaagttgagcgcacttcttttttttcttttcttttcttttttctcttcttgcaacagctgcactcgctggcaaaatgcccgtgaggcgtgagcatttcgcacatccctggcctacgcgctcaggcgcattgcgaaacgtgtattgtgtacacttgatacatactataaggttgtataagtaagcttcaaacgatcgctcgctccaccgcgcgccatcacaaaaggcaaaagcgacgagagcgtaccgtggcacttactgacgggcggcgtcttgaccttgcacg

SEQ ID NO: 84668 - DNA, 1151 bp, Zea Mays
tttcgtgccaactgctgtaggaacagtctgcaaggtggccaaagaaaacaacacggcaggagtgaagatctctgataggatgacttcagtgtccgaattaacacttgtgctggcttcaggtgcatcaatgttaccgcatccttcgaaggtacggacaggtggtgaagatgcatattttatagcttgtgatggctggtttggtgtagcagatggagttggtcagtggtcatttgaagggatcaatgccggactttatgccagagaactaatggatggctgcaaaaagatcgtggaagagacccaaggagctccagggatgagaaccgaggaagttcttgccaaggctgcagatgaagcacggtcccctggttcttccactgttttagttgctcactttgatggaaaggttcttcacgcatcaaacatcggagattctggattcctcgtgattaggaatggagaggtccataagaaatcaaacccaatgacttacggtttcaatttcccgttgcagattgagaagggtgacgaccctctaaaacttgtacagaaatacgccatctgtctacaagaaggcgacgtcgttgtaacagcgtcagacggtcttttcgacaacgtctacgaggaagaagtggcaggcatcgtctcgaaatcattagaagctgatctgaagcccacggaaatcgccgatttactggttgcccgagcgaaggaggtggggcggtgtgggtttggaaggagcccgttctcggactccgctctcgcggctgggtacctgggctactccggcggcaagctggatgatgtaacggttgttgtatcgattgttcggaaatctgaagtttaataaactagaaacgaactagcaaagttgagcgcacttcttttttttcttttcttttcttttttctcttcttgcaacagctgcactcgctggcaaaatgcccgtgaggcgtgagcatttcgcacatccctggcctacgcgctcaggcgcattgcgaaacgtgtattgtgtacacttgatacatactataaggttgtataagtaagcttcaaacgatcgctcgctccaccgcgcgccatcacaaaaggcaaaagcgacgagagcgtaccgtggcacttactgacgggcggcgtcttgaccttgcacg

SEQ ID NO: 84669 - DNA, 1161 bp, Zea Mays
gtgtttcgtgccaactgctgtaggaagatccagcagtctgcaaggtggccaaagaaaacaacacggcaggagtgaagatctctgataggatgacttcagtgtccgaattaacacttgtgctggcttcaggtgcatcaatgttaccgcatccttcgaaggtacggacaggtggtgaagatgcatattttatagcttgtgatggctggtttggtgtagcagatggagttggtcagtggtcatttgaagggatcaatgccggactttatgccagagaactaatggatggctgcaaaaagatcgtggaagagacccaaggagctccagggatgagaaccgaggaagttcttgccaaggctgcagatgaagcacggtcccctggttcttccactgttttagttgctcactttgatggaaaggttcttcacgcatcaaacatcggagattctggattcctcgtgattaggaatggagaggtccataagaaatcaaacccaatgacttacggtttcaatttcccgttgcagattgagaagggtgacgaccctctaaaacttgtacagaaatacgccatctgtctacaagaaggcgacgtcgttgtaacagcgtcagacggtcttttcgacaacgtctacgaggaagaagtggcaggcatcgtctcgaaatcattagaagctgatctgaagcccacggaaatcgccgatttactggttgcccgagcgaaggaggtggggcggtgtgggtttggaaggagcccgttctcggactccgctctcgcggctgggtacctgggctactccggcggcaagctggatgatgtaacggttgttgtatcgattgttcggaaatctgaagtttaataaactagaaacgaactagcaaagttgagcgcacttcttttttttcttttcttttcttttttctcttcttgcaacagctgcactcgctggcaaaatgcccgtgaggcgtgagcatttcgcacatccctggcctacgcgctcaggcgcattgcgaaacgtgtattgtgtacacttgatacatactataaggttgtataagtaagcttcaaacgatcgctcgctccaccgcgcgccatcacaaaaggcaaaagcgacgagagcgtaccgtggcacttactgacgggcggcgtcttgaccttgcacg

SEQ ID NO: 84670 - DNA, 2617 bp, Zea Mays
cacaagtctaccaggctcaaattaaactaccatcgcctgcttcaacatttgatcaaggataataacggggaggggaaaaaaatagacagcaagcaaaaccatccgtaagcaacccatggggccacatttggctcggccggcagaaccgcgccaaaagcgacagaaggaaattaaaattccgaggaaatagccggaaaacaccagcccaccgagcctctcgctagtcgctccatagaattcgacgccttccgaacggccgcagcgcacaccccgccgcctcaaaacctcaggcacaagcttgcttcttttcctcccccattaatctctcccctcttgttcttcctcttccccatcagtctcgccgccatttccctgtcctgctgctgctactgctggtagtggttccccaaacccaagccttcgattcgcccgcccgcccgcccgcggtctcgagccagccttccgcgccgtcgtggttgctttacgcgcagctatccatggatgaggtccctgccaccgccgccgtcctcgacttccgacccggctcttctgtaccacgcgtctccgccgtcccgcgccgtgccgtgcagtgccccccggacaccggcggtgcagaggcggcgacgggaggtcgtccaggtatcgggaacactgccgccgtttccgcgaagttgacggggtcaagttcggccggtcccgatatccagtctgtggattgcgatacatcgggaggccttgccggcggtgacgctggagacgtgggggttttgtgcttagagaacgctgccgagaccgaatcggtggaaccaggtgtttcggacgtgaggttgggagctccagtggaggaacgccatggcaggacgctggatagtacgggattgggctctggtaaagctggtgagaccaatgagatttcactggttgaggtgtcccaatcaggtgccacttcaagcctagatgccactgcgtcgattggtggtggctactccctcgtggaggggtctctgccagaggcgagtggtgcccgcagatgtaaacccgaggtccatgaagtaccaacagggacccctgcaactgtgggattcccgattgaggacggtggctatggatttggaattgggcctaatgacgatgtggacggtagaaacgaccctgccggaggggaatgggaaccgcctactgatggcaatgatgccgaggacgtcacagatatgggtggaatcttgtgtgacgaaagagtggagaggatggagacgaattcggtagaacgtgaggcctcgaatggttccaccgtttcttctgaggaaggagtggacaggatggggacgagcttggatgactctgaggcttccgatggctcaaccacacaagattctgatacagacgtcgagaccgagtcaagtgtttctagtatagaggagcaagaagcaggatacggagcccacatccctcaaccggatccagcagtctgcaaggtggccaaagaaaacaacacggcaggagtgaagatctctgataggatgacttcagtgtccgaattaacacttgtgctggcttcaggtgcatcaatgttaccgcatccttcgaaggtacggacaggtggtgaagatgcatattttatagcttgtgatggctggtttggtgtagcagatggagttggtcagtggtcatttgaagtgtttgatggaaattgttatctcagggatcaatgccggactttatgccagagaactaatggatggctgcaaaaagatcgtggaagagacccaaggagctccagggatgagaaccgaggaagttcttgccaaggctgcagatgaagcacggtcccctggttcttccactgttttagttgctcactttgatggaaaggttcttcacgcatcaaacatcggagattctggattcctcgtgattaggaatggagaggtccataagaaatcaaacccaatgacttacggtttcaatttcccgttgcagattgagaagggtgacgaccctctaaaacttgtacagaaatacgccatctgtctacaagaaggcgacgtcgttgtaacagcgtcagacggtcttttcgacaacgtctacgaggaagaagtggcaggcatcgtctcgaaatcattagaagctgatctgaagcccacggaaatcgccgatttactggttgcccgagcgaaggaggtggggcggtgtgggtttggaaggagcccgttctcggactccgctctcgcggctgggtacctgggctactccggcggcaagctggatgatgtaacggttgttgtatcgattgttcggaaatctgaagtttaataaactagaaacgaactagcaaagttgagcgcacttcttttttttcttttcttttcttttttctcttcttgcaacagctgcactcgctggcaaaatgcccgtgaggcgtgagcatttcgcacatccctggcctacgcgctcaggcgcattgcgaaacgtgtattgtgtacacttgatacatactataaggttgtataagtaagcttcaaacgatcgctcgctccaccgcgcgccatcacaaaaggcaaaagcgacgagagcgtaccgtggcacttactgacgggcggcgtcttgaccttgcacg

SEQ ID NO: 84671 - DNA, 575 bp, Zea Mays
atgaagctttatccgtgcccccgtgacatgatggcattcagtgcctgcaacaggcccttaccaaacctcagggcggagctcaccagtagccgggggcatccatttcccagagttgtacacgctctcgccgaccttccaccctggaacgtctttcatgatcctcgcctcctcctcaagacacttcttccactctttgacaaatctttcatcctcttctgcttggagcatcggcagtatagcactgcgagcagcaattttctcttctttgagcgcccgcggaccttgttcccctggccgacctggtacatgccatatgcgaaagcaccgaaggtggtgaggaagatggcggtggcgctgggccccgaggtggggatccggcgggcgaagcgcacgggcgcgaaaccgcccggcggcggcccgtcctgcaccaccggcatctccttgatgctggccatccccggcttgttccgcaccagggactccgtcatcttcggtcccggatccggacgccggtacgcacgcttggcggaactagagctccccgcggggatcaaacgagccgaggctgtcgctag

SEQ ID NO: 84672 - DNA, 2586 bp, Zea Mays
gcgtcctaactctttcatcatcttgcttgccgccgccgtggccgatcttcgctgcctgccagccatggaagacttttgtgcggtgtgcgcagatacgctggagtgggtggcctatgggtcgtgcgggcaccgcgacgtgtgctccacatgcatcgtccgcctccgtttcgtgatgggcgacaacaagtgttgcatctgcaagaccgtctgccccttcgtctttgtcactaaggccatgggtaaatacactagagtgatcactgatttctctgtgttacccgctggggtaaatgagggcaaagctggggatttctggtaccatgaagatacaaaggcatactttgatgatgcggaccactaccggatgatacggaccatgtgtcaactttcctgtaatgtttgtgacaacgcagaagatcaggttgctcaagcaaagcgcaaaagcaagttcaggagcattgaacaactgaagggacatttatactgcgtgcataggttgcacatgtgcaatctttgtttggaggggaggaaggtgttcatttgtgaacaaaagctttatttgaagtcacagttagctcagcatatgaagactggcgactctgaagtggatggctctgaggtagagcgcaatggttttgctgggcatccaatgtgcagaaccctggtcgtgttgaatatttcgcgaactatgaggacattgagttgcattttagagaagatcatttcctatgtgaagatgaagcatgtttggaaaagaagtttgttgtcttcctgagtaaagcgcagctgaagaagcataatgctatggagcacggtgggcggatgtctcgttctcagaggaatgctgcacttgaggtgtgaacttggttctagtattttcgtttcccatcatggttttcctctatccaatgtatctgttcttggtaaaagattcactatatttttgtggttaatttatttggctcatttacactaagttttgtaatttgcccctttcagacacctagcagctttatatatcgcagaaatgagcaagaacaacggcgtggcaggggccgtaatgctttccatgatggatctgattgtcatatctcatcgtctgcaaatgctttccatgatcgatctgactgtcatatctcatcatctgcaaatgctttccatgataaatctgactgccatatcccatcaactgcacaaaaagaccgggcagctgccgatggccatgcagggcgtcttgacaatgtttcagagtcgtttcagtcattaagtattggatccagttctagggaagctgaagttggcgaaggctcaaggactggacgagtgctggaacagttgtccttccgacctctttctgacccggatattcctgacaatagtgttgaaacctcattcccttcattatcagagcagcaatccagtctcaatcagagtgcaagggacgctccgaggcttggagatgagtcactgttcccccctttgactgggtctagtaacaagatgaagcagcctgtttttacgcctaagcgtcctcgaacttttcctgctgccgaggatatccatgctgcaaagatgcgctatgctctgggaatgaacgaggacatgtactctgcgttcaaagagatcgctggtgaataccgtcgaggtaccatagatgcttttgagtatctttcatatgtcgagcagttcggactgtcgcaccttgttcctgagatggttaggctattgcctgattctcgaaaacagagggaacttgctgatgcgcactatacaaatacacggttgaaaaacctccaagaaaatggaaataataggaaggggggattcttcttatcaaagaagaaaagcctccaagaaaatggaggtggaactagcgaatggaggtggaactagcagaaaattcatattacagaaagcactgccgacggatgatgtgaacagggcacaagcagataatatttaggacacttttagaaggcttcaatcaaaccatcttacttagaaaggagaagctgaggtgttgtccaaggatgggtatcgatctttcatggggttcaaccggccgctgctggacccttcatctaatatggacagtgaaagtcatctagtgcaacggaggaggcaataaggaaccgaagaagacatcaaggtttctcagagctcgttcaagtgacaactcgttagccatgcttgatttaagacagccaagtgcaagccatgaatgtccacaaaggaaattacaaggcctagagacgtgattggtgcttggaagaagaagaatggtggggggcagaaactctttttgatcaattgacggaagagttattgcaactgtatttagacgtagtattttttgaattttgagatagagtcgtggtattgaaaaatattacagtatttttttccaagaagtgtttggcaaccttgtaaaaacactctcttttgaatactataatttagtagttactatggtttagtagatatcatggtatttatttttggagtatttaaaactccactctaatctaaagtttgtttatgtatgactggcttttggtacgtatacatgaaatatcatggtttaag

SEQ ID NO: 84673 - DNA, 2530 bp, Zea Mays
gcgtcctaactctttcatcatcttgcttgccgccgccgtggccgatcttcgctgcctgccagccatggaagacttttgtgcggtgtgcgcagatacgctggagtgggtggcctatgggtcgtgcgggcaccgcgacgtgtgctccacatgcatcgtccgcctccgtttcgtgatgggcgacaacaagtgttgcatctgcaagaccgtctgccccttcgtctttgtcactaaggccatgggtaaatacactagagtgatcactgatttctctgtgttacccgctggggtaaatgagggcaaagctggggatttctggtaccatgaagatacaaaggcatactttgatgatgcggaccactaccggatgatacggaccatgtgtcaactttcctgtaatgtttgtgacaacgcagaagatcaggttgctcaagcaaagcgcaaaagcaagttcaggagcattgaacaactgaagggacatttatactgcgtgcataggttgcacatgtgcaatctttgtttggaggggaggaaggtgttcatttgtgaacaaaagctttatttgaagtcacagttagctcagcatatgaagactggcgactctgaagtggatggctctgaggtagagcgcaatggttttgctgggcatccaatgtgtgagttctgcagaagttcattttatggagatagtgagctttacatgcatatgtctagggaacactattcttgccacatatgcaagaggcagaaccctggtcgtgttgaatatttcgcgaactatgaggacattgagttgcattttagagaagatcatttcctatgtgaagatgaagcatgtttggaaaagaagtttgttgtcttcctgagtaaagcgcagctgaagaagcataatgctatggagcacggtgggcggatgtctcgttctcagaggaatgctgcacttgagacacctagcagctttatatatcgcagaaatgagcaagaacaacggcgtggcaggggccgtaatgctttccatgatggatctgattgtcatatctcatcgtctgcaaatgctttccatgatcgatctgactgtcatatctcatcatctgcaaatgctttccatgataaatctgactgccatatcccatcaactgcacaaaaagaccgggcagctgccgatggccatgcagggcgtcttgacaatgtttcagagtcgtttcagtcattaagtattggatccagttctagggaagctgaagttggcgaaggctcaaggactggacgagtgctggaacagttgtccttccgacctctttctgacccggatattcctgacaatagtgttgaaacctcattcccttcattatcagagcagcaatccagtctcaatcagagtgcaagggacgctccgaggcttggagatgagtcactgttcccccctttgactgggtctagtaacaagatgaagcagcctgtttttacgcctaagcgtcctcgaacttttcctgctgccgaggatatccatgctgcaaagatgcgctatgctctgggaatgaacgaggacatgtactctgcgttcaaagagatcgctggtgaataccgtcgaggtaccatagatgcttttgagtatctttcatatgtcgagcagttcggactgtcgcaccttgttcctgagatggttaggctattgcctgattctcgaaaacagagggaacttgctgatgcgcactatacaaatacacggttgaaaaacctccaagaaaatggaaataataggaaggggggattcttcttatcaaagaagaaaagcctccaagaaaatggaggtggaactagcgaatggaggtggaactagcagaaaattcatattacagaaagcactgccgacggatgatgtgaacagggcacaagcagataatatttaggacacttttagaaggcttcaatcaaaccatcttacttagaaaggagaagctgaggtgttgtccaaggatgggtatcgatctttcatggggttcaaccggccgctgctggacccttcatctaatatggacagtgaaagtcatctagtgcaacggaggaggcaataaggaaccgaagaagacatcaaggtttctcagagctcgttcaagtgacaactcgttagccatgcttgatttaagacagccaagtgcaagccatgaatgtccacaaaggaaattacaaggcctagagacgtgattggtgcttggaagaagaagaatggtggggggcagaaactctttttgatcaattgacggaagagttattgcaactgtatttagacgtagtattttttgaattttgagatagagtcgtggtattgaaaaatattacagtatttttttccaagaagtgtttggcaaccttgtaaaaacactctcttttgaatactataatttagtagttactatggtttagtagatatcatggtatttatttttggagtatttaaaactccactctaatctaaagtttgtttatgtatgactggcttttggtacgtatacatgaaatatcatggtttaag

SEQ ID NO: 84674 - DNA, 2519 bp, Zea Mays
gcgtcctaactctttcatcatcttgcttgccgccgccgtggccgatcttcgctgcctgccagccatggaagacttttgtgcggtgtgcgcagatacgctggagtgggtggcctatgggtcgtgcgggcaccgcgacgtgtgctccacatgcatcgtccgcctccgtttcgtgatgggcgacaacaagtgttgcatctgcaagaccgtctgccccttcgtctttgtcactaaggccatgggtaaatacactagagtgatcactgatttctctgtgttacccgctggggtaaatgagggcaaagctggggatttctggtaccatgaagatacaaaggcatactttgatgatgcggaccactaccggatgatacggaccatgtgtcaactttcctgtaatgtttgtgacaacgcagaagatcaggttgctcaagcaaagcgcaaaagcaagttcaggagcattgaacaactgaagggacatttatactgcgtgcataggttgcacatgtgcaatctttgtttggaggggaggaaggtgttcatttgtgaacaaaagctttatttgaagtcacagttagctcagcatatgaagactggcgactctgaagtggatggctctgaggtagagcgcaatggttttgctgggcatccaatgtgtgagttctgcagaagttcattttatggagatagtgagctttacatgcatatgtctagggaacactattcttgccacatatgcaagaggcagaaccctggtcgtgttgaatatttcgcgaactatgaggacattgagttgcattttagagaagatcatttcctatgtgaagatgaagcatgtttggaaaagaagtttgttgtcttcctgagtaaagcgcagctgaagaagcataatgctatggagcacggtgggcggatgtctcgttctcagaggaatgctgcacttgagctttatatatcgcagaaatgagcaagaacaacggcgtggcaggggccgtaatgctttccatgatggatctgattgtcatatctcatcgtctgcaaatgctttccatgatcgatctgactgtcatatctcatcatctgcaaatgctttccatgataaatctgactgccatatcccatcaactgcacaaaaagaccgggcagctgccgatggccatgcagggcgtcttgacaatgtttcagagtcgtttcagtcattaagtattggatccagttctagggaagctgaagttggcgaaggctcaaggactggacgagtgctggaacagttgtccttccgacctctttctgacccggatattcctgacaatagtgttgaaacctcattcccttcattatcagagcagcaatccagtctcaatcagagtgcaagggacgctccgaggcttggagatgagtcactgttcccccctttgactgggtctagtaacaagatgaagcagcctgtttttacgcctaagcgtcctcgaacttttcctgctgccgaggatatccatgctgcaaagatgcgctatgctctgggaatgaacgaggacatgtactctgcgttcaaagagatcgctggtgaataccgtcgaggtaccatagatgcttttgagtatctttcatatgtcgagcagttcggactgtcgcaccttgttcctgagatggttaggctattgcctgattctcgaaaacagagggaacttgctgatgcgcactatacaaatacacggttgaaaaacctccaagaaaatggaaataataggaaggggggattcttcttatcaaagaagaaaagcctccaagaaaatggaggtggaactagcgaatggaggtggaactagcagaaaattcatattacagaaagcactgccgacggatgatgtgaacagggcacaagcagataatatttaggacacttttagaaggcttcaatcaaaccatcttacttagaaaggagaagctgaggtgttgtccaaggatgggtatcgatctttcatggggttcaaccggccgctgctggacccttcatctaatatggacagtgaaagtcatctagtgcaacggaggaggcaataaggaaccgaagaagacatcaaggtttctcagagctcgttcaagtgacaactcgttagccatgcttgatttaagacagccaagtgcaagccatgaatgtccacaaaggaaattacaaggcctagagacgtgattggtgcttggaagaagaagaatggtggggggcagaaactctttttgatcaattgacggaagagttattgcaactgtatttagacgtagtattttttgaattttgagatagagtcgtggtattgaaaaatattacagtatttttttccaagaagtgtttggcaaccttgtaaaaacactctcttttgaatactataatttagtagttactatggtttagtagatatcatggtatttatttttggagtatttaaaactccactctaatctaaagtttgtttatgtatgactggcttttggtacgtatacatgaaatatcatggtttaag

SEQ ID NO: 84675 - DNA, 2519 bp, Zea Mays
ctttcatcgtcttgcttgccgccgccgtggccgatcttcgctgcctgccagccatggaagacttttgtgcggtgtgcgcagatacgctggagtgggtggcctatgggtcgtgcgggcaccgcgacgtgtgctccacatgcatcgtccgcctgcgtttcgtgatgggcgacaacaagtgttgcatctgcaagaccgtctgccccttcgtctttgtcactaaggccatgggtaaatacactagagtgatcactgatttctctgtgttacctgatggggtaaatgagggcaaagctggggatttctggtaccatgaagatacaaaggcatactttgatgatgcggaccactaccggatgatacggaccatgtgtcaactttcctgtaatgtttgtgacaacgcagaagatcaggttgctcaagcaaagcgcaaaagcaagttcaggagcattgaacaactgaagggacatttatactgcgtgcataggttgcacatgtgcaatctttgtttggaggggaggaaggtgttcatttgtgaacaaaagctttatttgaagtcacagttagctcagcatatgaagactggcgactctgaagtggatggctctgaggtagagcgcaatggttttgctgggcatccaatgtgtgagttctgcagaagttcattttatggagatagtgagctttacatgcatatgtctagggaacactattcttgccacatatgcaagaggcagaaccctggtcgtgttgaatatttcgcgaactatgaggacattgagttgcattttagagaagatcatttcctatgtgaagatgaagcatgtttggaaaagaagtttgttgtcttcctgagtaaagcgcagctgaagaagcataatgctatggagcacggtgggcggatgtctcgttctcagaggaatgctgcacttgagacacctagcagctttatatatcgcagaaatgagcaagaacaacggcgtggcaggggccgtaatgctttccatgatggatctgattgtcatatctcatcgtctgcaaatgctttccatgatcgatctgactgtcatatctcatcatctgcaaatgctttccatgataaatctgactgccatatcccatcaactgcacaaaaagaccgggcagctgccgatggccatgcagggcgtcttgacaatgtttcagagtcgtttcagtcattaagtattggatccagttctagggaagctgaagttggcgaaggctcaaggactggacgagtgctggaacagttgtccttccgacctctttctgacccggatattcctgacaatagtgttgaaacctcattcccttcattatcagagcagcaatccagtctcaatcagagtgcaagggacgctccgaggcttggagatgagtcactgttcccccctttgactgggtctagtaacaagatgaagcagcctgtttttacgcctaagcgtcctcgaacttttcctgctgccgaggatatccatgctgcaaagatgcgctatgctctgggaatgaacgaggacatgtactctgcgttcaaagagatcgctggtgaataccgtcgaggtaccatagatgcttttgagtatctttcatatgtcgagcagttcggactgtcgcaccttgttcctgagatggttaggctattgcctgattctcgaaaacagagggaacttgctgatgcgcactatacaaatacacggttgaaaaacctccaagaaaatggaaataataggaaggggggattcttcttatcaaagaagaaaagcctccaagaaaatggaggtggaactagcgaatggaggtggaactagcagaaaattcatattacagaaagcactgccgacggatgatgtgaacagggcacaagcagataatatttaggacacttttagaaggcttcaatcaaaccatcttacttagaaaggagaagctgaggtgttgtccaaggatgggtatcgatctttcatggggttcaaccggccgctgctggacccttcatctaatatggacagtgaaagtcatctagtgcaacggaggaggcaataaggaaccgaagaagacatcaaggtttctcagagctcgttcaagtgacaactcgttagccatgcttgatttaagacagccaagtgcaagccatgaatgtccacaaaggaaattacaaggcctagagacgtgattggtgcttggaagaagaagaatggtggggggcagaaactctttttgatcaattgacggaagagttattgcaactgtatttagacgtagtattttttgaattttgagatagagtcgtggtattgaaaaatattacagtatttttttccaagaagtgtttggcaaccttgtaaaaacactctcttttgaatactataatttagtagttactatggtttagtagatatcatggtatttatttttggagtatttaaaactccactctaatctaaagtttgtttatgtatgactggcttttggtacgtatacatgaaatatcatggtttaag

SEQ ID NO: 84676 - DNA, 2425 bp, Zea Mays
ctttcatcgtcttgcttgccgccgccgtggccgatcttcgctgcctgccagccatggaagacttttgtgcggtgtgcgcagatacgctggagtgggtggcctatgggtcgtgcgggcaccgcgacgtgtgctccacatgcatcgtccgcctgcgtttcgtgatgggcgacaacaagtgttgcatctgcaagaccgtctgccccttcgtctttgtcactaaggccatgggtaaatacactagagtgatcactgatttctctgtgttacctgatggggtaaatgagggcaaagctggggatttctggtaccatgaagatacaaaggcatactttgatgatgcggaccactaccggatgatacggaccatgtgtcaactttcctgtaatgtttgtgacaacgcagaagatcaggttgctcaagcaaagcgcaaaagtgttcatttgtgaacaaaagctttattcgaagtcacagttagctcagcatatgaagactggcgactctgaagtggatggctctgaggtagagcgcaatggttttgctgggcatccaatgtgtgagttctgcagaagttcattttatggagatagtgagctttacatgcatatgtctagggaacactattcttgccacatatgcaagaggcagaaccctggtcgtgttgaatatttcgcgaactatgaggacattgagttgcattttagagaagatcatttcctatgtgaagatgaagcatgtttggaaaagaagtttgttgtcttcctgagtaaagcgcagctgaagaagcataatgctatggagcacggtgggcggatgtctcgttctcagaggaatgctgcacttgagacacctagcagctttatatatcgcagaaatgagcaagaacaacggcgcggcaggggccgtaatgctttccatgatggatctgattgtcatatctcatcgtctgcaaatgctttccatgatcgatctgactgtcatatctcatcatctgcaaatgctttccatgataaatctgactgccatatcccatcaactgcacaaaaagaccgggcagctgccgatggccatgcagggcgtcttgacaatgtttcagagtcgtttcagtcattaagtattggatccagttctagggaagctgaagttggcgaaggctcgaggactggacgagtgctggaacagttgtccttccgacctctttctgacccggatattcctgacaatagtgttgaaacctcattcccttcattatcagagcagcaatccagtctcaatcagagtgcaagggacgctccgaggcttggagatgagtcactgttcccccctttgactgggtctagtaacaagatgaagcagcctgtttttacgcctaagcgtcctcgaacttttcctgctgccgaggatatccatgctgcaaagatgcgctatgctctgggaatgaacgaggacatgtactctgcgttcaaagagatcgctggtgaataccgtcgaggtaccatagatgcttttgagtatctttcatatgtcgagcagttcggactgtcgcaccttgttcctgagatggttaggctattgcctgattctcgaaaacagagggaacttgctgatgcgcactatacaaatacacggttgaaaaacctccaagaaaatggaaataataggaatgggggattcttcttatcaaagaagaaaagcctccaagaaaatggaggtggaactagcagaaagttcatgatatagaaagcactgctgatggatgatgtgaacatggcacaagcagataacattcaggacactgtaagaaggcttcaatcaaaccatcttgcttagaaaggagaagctgaggtgttgtccaaggataggtatcgatcttccatggaggtccaaccggccgccgctggaccttcatctaatctggatagtgaaagtcatctagtgcaacggaggaggcaataagcaaccaaagaagacatcaaggtttctaagagctcgttcaggtgacaactcgttagccatgcttggtttcagacagccaagtgcaagccctgaatgtccacaaagggaattacaaggtccagagacgtggttgccagcgcgaggtgcttggaagacgaagaatggtgggggatagaaactctttttgatcaatggacggaagagtcattgcaactgcatttagacgtgtccatatactttagtattttttgaattttgagataaagtcgtggtattgaaaaatattatagtttttcccaagtgtttggctaccttgtaaaagctctcttttgaatactataatttagtagttctatggtttagtagataccatggtatttatttttggagtatttaaaactccactccaatctaaaatttttttatctatgactggcttttggtatatatacattaaatatcatggtttaag

SEQ ID NO: 84677 - DNA, 2399 bp, Zea Mays
ctttcatcgtcttgcttgccgccgccgtggccgatcttcgctgcctgccagccatggaagacttttgtgcggtgtgcgcagatacgctggagtgggtggcctatgggtcgtgcgggcaccgcgacgtgtgctccacatgcatcgtccgcctgcgtttcgtgatgggcgacaacaagtgttgcatctgcaagaccgtctgccccttcgtctttgtcactaaggccatgggtaaatacactagagtgatcactgatttctctgtgttacctgatggggtaaatgagggcaaagctggggatttctggtaccatgaagatacaaaggcatactttgatgatgcggaccactaccggatgatacggaccatgtgtcaactttcctgtaatgtttgtgacaacgcagaagatcaggtgttcatttgtgaacaaaagctttattcgaagtcacagttagctcagcatatgaagactggcgactctgaagtggatggctctgaggtagagcgcaatggttttgctgggcatccaatgtgtgagttctgcagaagttcattttatggagatagtgagctttacatgcatatgtctagggaacactattcttgccacatatgcaagagaaccctggtcgtgttgaatatttcgcgaactatgaggacattgagttgcattttagagaagatcatttcctatgtgaagatgaagcatgtttggaaaagaagtttgttgtcttcctgagtaaagcgcagctgaagaagcataatgctatggagcacggtgggcggatgtctcgttctcagaggaatgctgcacttgagacacctagcagctttatatatcgcagaaatgagcaagaacaacggcgcggcaggggccgtaatgctttccatgatggatctgattgtcatatctcatcgtctgcaaatgctttccatgatcgatctgactgtcatatctcatcatctgcaaatgctttccatgataaatctgactgccatatcccatcaactgcacaaaaagaccgggcagctgccgatggccatgcagggcgtcttgacaatgtttcagagtcgtttcagtcattaagtattggatccagttctagggaagctgaagttggcgaaggctcgaggactggacgagtgctggaacagttgtccttccgacctctttctgacccggatattcctgacaatagtgttgaaacctcattcccttcattatcagagcagcaatccagtctcaatcagagtgcaagggacgctccgaggcttggagatgagtcactgttcccccctttgactgggtctagtaacaagatgaagcagcctgtttttacgcctaagcgtcctcgaacttttcctgctgccgaggatatccatgctgcaaagatgcgctatgctctgggaatgaacgaggacatgtactctgcgttcaaagagatcgctggtgaataccgtcgaggtaccatagatgcttttgagtatctttcatatgtcgagcagttcggactgtcgcaccttgttcctgagatggttaggctattgcctgattctcgaaaacagagggaacttgctgatgcgcactatacaaatacacggttgaaaaacctccaagaaaatggaaataataggaatgggggattcttcttatcaaagaagaaaagcctccaagaaaatggaggtggaactagcagaaagttcatgatatagaaagcactgctgatggatgatgtgaacatggcacaagcagataacattcaggacactgtaagaaggcttcaatcaaaccatcttgcttagaaaggagaagctgaggtgttgtccaaggataggtatcgatcttccatggaggtccaaccggccgccgctggaccttcatctaatctggatagtgaaagtcatctagtgcaacggaggaggcaataagcaaccaaagaagacatcaaggtttctaagagctcgttcaggtgacaactcgttagccatgcttggtttcagacagccaagtgcaagccctgaatgtccacaaagggaattacaaggtccagagacgtggttgccagcgcgaggtgcttggaagacgaagaatggtgggggatagaaactctttttgatcaatggacggaagagtcattgcaactgcatttagacgtgtccatatactttagtattttttgaattttgagataaagtcgtggtattgaaaaatattatagtttttcccaagtgtttggctaccttgtaaaagctctcttttgaatactataatttagtagttctatggtttagtagataccatggtatttatttttggagtatttaaaactccactccaatctaaaatttttttatctatgactggcttttggtatatatacattaaatatcatggtttaag

SEQ ID NO: 84678 - DNA, 2425 bp, Zea Mays
ctttcatcgtcttgcttgccgccgccgtggccgatcttcgctgcctgccagccatggaagacttttgtgcggtgtgcgcagatacgctggagtgggtggcctatgggtcgtgcgggcaccgcgacgtgtgctccacatgcatcgtccgcctgcgtttcgtgatgggcgacaacaagtgttgcatctgcaagaccgtctgccccttcgtctttgtcactaaggccatgggtaaatacactagagtgatcactgatttctctgtgttacctgatggggtaaatgagggcaaagctggggatttctggtaccatgaagatacaaaggcatactttgatgatgcggaccactaccggatgatacggaccatgtgtcaactttcctgtaatgtttgtgacaacgcagaagatcaggttgctcaagcaaagcgcaaaagcaagtgttcatttgtgaacaaaagctttattcgaagtcacagttagctcagcatatgaagactggcgactctgaagtggatggctctgaggtagagcgcaatggttttgctgggcatccaatgtgtgagttctgcagaagttcattttatggagatagtgagctttacatgcatatgtctagggaacactattcttgccacatatgcaagagaaccctggtcgtgttgaatatttcgcgaactatgaggacattgagttgcattttagagaagatcatttcctatgtgaagatgaagcatgtttggaaaagaagtttgttgtcttcctgagtaaagcgcagctgaagaagcataatgctatggagcacggtgggcggatgtctcgttctcagaggaatgctgcacttgagacacctagcagctttatatatcgcagaaatgagcaagaacaacggcgcggcaggggccgtaatgctttccatgatggatctgattgtcatatctcatcgtctgcaaatgctttccatgatcgatctgactgtcatatctcatcatctgcaaatgctttccatgataaatctgactgccatatcccatcaactgcacaaaaagaccgggcagctgccgatggccatgcagggcgtcttgacaatgtttcagagtcgtttcagtcattaagtattggatccagttctagggaagctgaagttggcgaaggctcgaggactggacgagtgctggaacagttgtccttccgacctctttctgacccggatattcctgacaatagtgttgaaacctcattcccttcattatcagagcagcaatccagtctcaatcagagtgcaagggacgctccgaggcttggagatgagtcactgttcccccctttgactgggtctagtaacaagatgaagcagcctgtttttacgcctaagcgtcctcgaacttttcctgctgccgaggatatccatgctgcaaagatgcgctatgctctgggaatgaacgaggacatgtactctgcgttcaaagagatcgctggtgaataccgtcgaggtaccatagatgcttttgagtatctttcatatgtcgagcagttcggactgtcgcaccttgttcctgagatggttaggctattgcctgattctcgaaaacagagggaacttgctgatgcgcactatacaaatacacggttgaaaaacctccaagaaaatggaaataataggaatgggggattcttcttatcaaagaagaaaagcctccaagaaaatggaggtggaactagcagaaagttcatgatatagaaagcactgctgatggatgatgtgaacatggcacaagcagataacattcaggacactgtaagaaggcttcaatcaaaccatcttgcttagaaaggagaagctgaggtgttgtccaaggataggtatcgatcttccatggaggtccaaccggccgccgctggaccttcatctaatctggatagtgaaagtcatctagtgcaacggaggaggcaataagcaaccaaagaagacatcaaggtttctaagagctcgttcaggtgacaactcgttagccatgcttggtttcagacagccaagtgcaagccctgaatgtccacaaagggaattacaaggtccagagacgtggttgccagcgcgaggtgcttggaagacgaagaatggtgggggatagaaactctttttgatcaatggacggaagagtcattgcaactgcatttagacgtgtccatatactttagtattttttgaattttgagataaagtcgtggtattgaaaaatattatagtttttcccaagtgtttggctaccttgtaaaagctctcttttgaatactataatttagtagttctatggtttagtagataccatggtatttatttttggagtatttaaaactccactccaatctaaaatttttttatctatgactggcttttggtatatatacattaaatatcatggtttaag

SEQ ID NO: 84679 - DNA, 2403 bp, Zea Mays
ctttcatcgtcttgcttgccgccgccgtggccgatcttcgctgcctgccagccatggaagacttttgtgcggtgtgcgcagatacgctggagtgggtggcctatgggtcgtgcgggcaccgcgacgtgtgctccacatgcatcgtccgcctgcgtttcgtgatgggcgacaacaagtgttgcatctgcaagaccgtctgccccttcgtctttgtcactaaggccatgggtaaatacactagagtgatcactgatttctctgtgttacctgatggggtaaatgagggcaaagctggggatttctggtaccatgaagatacaaaggcatactttgatgatgcggaccactaccggatgatacggaccatgtgtcaactttcctgtaatgtttgtgacaacgcagaagatcaggtgttcatttgtgaacaaaagctttattcgaagtcacagttagctcagcatatgaagactggcgactctgaagtggatggctctgaggtagagcgcaatggttttgctgggcatccaatgtgtgagttctgcagaagttcattttatggagatagtgagctttacatgcatatgtctagggaacactattcttgccacatatgcaagaggcagaaccctggtcgtgttgaatatttcgcgaactatgaggacattgagttgcattttagagaagatcatttcctatgtgaagatgaagcatgtttggaaaagaagtttgttgtcttcctgagtaaagcgcagctgaagaagcataatgctatggagcacggtgggcggatgtctcgttctcagaggaatgctgcacttgagacacctagcagctttatatatcgcagaaatgagcaagaacaacggcgcggcaggggccgtaatgctttccatgatggatctgattgtcatatctcatcgtctgcaaatgctttccatgatcgatctgactgtcatatctcatcatctgcaaatgctttccatgataaatctgactgccatatcccatcaactgcacaaaaagaccgggcagctgccgatggccatgcagggcgtcttgacaatgtttcagagtcgtttcagtcattaagtattggatccagttctagggaagctgaagttggcgaaggctcgaggactggacgagtgctggaacagttgtccttccgacctctttctgacccggatattcctgacaatagtgttgaaacctcattcccttcattatcagagcagcaatccagtctcaatcagagtgcaagggacgctccgaggcttggagatgagtcactgttcccccctttgactgggtctagtaacaagatgaagcagcctgtttttacgcctaagcgtcctcgaacttttcctgctgccgaggatatccatgctgcaaagatgcgctatgctctgggaatgaacgaggacatgtactctgcgttcaaagagatcgctggtgaataccgtcgaggtaccatagatgcttttgagtatctttcatatgtcgagcagttcggactgtcgcaccttgttcctgagatggttaggctattgcctgattctcgaaaacagagggaacttgctgatgcgcactatacaaatacacggttgaaaaacctccaagaaaatggaaataataggaatgggggattcttcttatcaaagaagaaaagcctccaagaaaatggaggtggaactagcagaaagttcatgatatagaaagcactgctgatggatgatgtgaacatggcacaagcagataacattcaggacactgtaagaaggcttcaatcaaaccatcttgcttagaaaggagaagctgaggtgttgtccaaggataggtatcgatcttccatggaggtccaaccggccgccgctggaccttcatctaatctggatagtgaaagtcatctagtgcaacggaggaggcaataagcaaccaaagaagacatcaaggtttctaagagctcgttcaggtgacaactcgttagccatgcttggtttcagacagccaagtgcaagccctgaatgtccacaaagggaattacaaggtccagagacgtggttgccagcgcgaggtgcttggaagacgaagaatggtgggggatagaaactctttttgatcaatggacggaagagtcattgcaactgcatttagacgtgtccatatactttagtattttttgaattttgagataaagtcgtggtattgaaaaatattatagtttttcccaagtgtttggctaccttgtaaaagctctcttttgaatactataatttagtagttctatggtttagtagataccatggtatttatttttggagtatttaaaactccactccaatctaaaatttttttatctatgactggcttttggtatatatacattaaatatcatggtttaag

SEQ ID NO: 84680 - DNA, 2511 bp, Zea Mays
ctttcatcgtcttgcttgccgccgccgtggccgatcttcgctgcctgccagccatggaagacttttgtgcggtgtgcgcagatacgctggagtgggtggcctatgggtcgtgcgggcaccgcgacgtgtgctccacatgcatcgtccgcctgcgtttcgtgatgggcgacaacaagtgttgcatctgcaagaccgtctgccccttcgtctttgtcactaaggccatgggtaaatacactagagtgatcactgatttctctgtgttacctgatggggtaaatgagggcaaagctggggatttctggtaccatgaagatacaaaggcatactttgatgatgcggaccactaccggatgatacggaccatgtgtcaactttcctgtaatgtttgtgacaacgcagaagatcaggttgctcaagcaaagcgcaaaagcaagttcaggagcattgaacaactgaagggacatttatactgcgtgcatagattatttattgaaatggtttcgtgtgttttgaaggtgttcatttgtgaacaaaagctttattcgaagtcacagttagctcagcatatgaagactggcgactctgaagtggatggctctgaggtagagcgcaatggttttgctgggcatccaatgtgtgagttctgcagaagttcattttatggagatagtgagctttacatgcatatgtctagggaacactattcttgccacatatgcaagaggcagaaccctggtcgtgttgaatatttcgcgaactatgaggacattgagttgcattttagagaagatcatttcctatgtgaagatgaagcatgtttggaaaagaagtttgttgtcttcctgagtaaagcgcagctgaagaagcataatgctatggagcacggtgggcggatgtctcgttctcagaggaatgctgcacttgagacacctagcagctttatatatcgcagaaatgagcaagaacaacggcgcggcaggggccgtaatgctttccatgatggatctgattgtcatatctcatcgtctgcaaatgctttccatgatcgatctgactgtcatatctcatcatctgcaaatgctttccatgataaatctgactgccatatcccatcaactgcacaaaaagaccgggcagctgccgatggccatgcagggcgtcttgacaatgtttcagagtcgtttcagtcattaagtattggatccagttctagggaagctgaagttggcgaaggctcgaggactggacgagtgctggaacagttgtccttccgacctctttctgacccggatattcctgacaatagtgttgaaacctcattcccttcattatcagagcagcaatccagtctcaatcagagtgcaagggacgctccgaggcttggagatgagtcactgttcccccctttgactgggtctagtaacaagatgaagcagcctgtttttacgcctaagcgtcctcgaacttttcctgctgccgaggatatccatgctgcaaagatgcgctatgctctgggaatgaacgaggacatgtactctgcgttcaaagagatcgctggtgaataccgtcgaggtaccatagatgcttttgagtatctttcatatgtcgagcagttcggactgtcgcaccttgttcctgagatggttaggctattgcctgattctcgaaaacagagggaacttgctgatgcgcactatacaaatacacggttgaaaaacctccaagaaaatggaaataataggaatgggggattcttcttatcaaagaagaaaagcctccaagaaaatggaggtggaactagcagaaagttcatgatatagaaagcactgctgatggatgatgtgaacatggcacaagcagataacattcaggacactgtaagaaggcttcaatcaaaccatcttgcttagaaaggagaagctgaggtgttgtccaaggataggtatcgatcttccatggaggtccaaccggccgccgctggaccttcatctaatctggatagtgaaagtcatctagtgcaacggaggaggcaataagcaaccaaagaagacatcaaggtttctaagagctcgttcaggtgacaactcgttagccatgcttggtttcagacagccaagtgcaagccctgaatgtccacaaagggaattacaaggtccagagacgtggttgccagcgcgaggtgcttggaagacgaagaatggtgggggatagaaactctttttgatcaatggacggaagagtcattgcaactgcatttagacgtgtccatatactttagtattttttgaattttgagataaagtcgtggtattgaaaaatattatagtttttcccaagtgtttggctaccttgtaaaagctctcttttgaatactataatttagtagttctatggtttagtagataccatggtatttatttttggagtatttaaaactccactccaatctaaaatttttttatctatgactggcttttggtatatatacattaaatatcatggtttaag

SEQ ID NO: 84681 - DNA, 3398 bp, Zea Mays
tcgtcgcctccctctccatcccttcccttcccttcccttccccgagcagccagccaagaaccgaacgagagagagagagagtagaaagcgcgtaatggggaaccgggcgtacgcggcggcagcgaagccggttcccgtacgcgccgccgtccatgctgccgggcggccgcgtgccccctccgccgatgtaccggccgaaacccgcgcaggcgcggctgccggcgccgcggcggcgccttcccctactcgagttcgaattaacagtggaatccgatcccaaaagaatcgatccctatcttaccagatttgaagatatattcggacttcggagattagagctgcgcagatagccatggaagacttttgtgcggtgtgcgcagatacgctggagtgggtggcctatgggtcgtgcgggcaccgcgacgtgtgctccacatgcatcgtccgcctgcgtttcgtgatgggcgacaacaagtgttgcatctgcaagaccgtctgccccttcgtctttgtcactaaggccatgggtaaatacactagagtgatcactgatttctctgtgttacctgatggggtaaatgagggcaaagctggggatttctggtaccatgaagatacaaaggcatactttgatgatgcggaccactaccggatgatacggaccatgtgtcaactttcctgtaatgtttgtgacaacgcagaagatcaggttgctcaagcaaagcgcaaaagcaagttcaggagcattgaacaactgaagggacatttatactgcgtgcatagttgatttcatggattatgctgtcaaatttagcatcaaactttagacatgttttgaataatctagagctgatttttctttgtttctatttcatgcataatggtttctttttagtttataggcctttcattgtgcatgtacagttcagtgcagtttgtcttgtctatcagtatatgacgctggtacctatgctatagcttacctagtgagctgttatgttactgtacaatatattttgaaattgaaaaatgttgtttccttcctgtagtttttttgcttagtataatgagcagaatttattcgtttatgtatataacatggtttaatttaaagatgttttccagagtatgcatctcaacccactacaggcaattgacatgaatagcctatttgaactatttaagctgaatacctaattattgcttgcaactagcatgcttgacattgtgctatcagttgctaattatgtgacttggccatacgagtgttcactaattttttattggtcattgttgtcctatagtcaacattgtagaaccggggtcatgtaatttacactctaaattacacttgcgatttttatattcatgattatttattgaaatggtttcgtgtgttttgaaggtgttcatttgtgaacaaaagctttattcgaagtcacagttagctcagcatatgaagactggcgactctgaagtggatggctctgaggtagagcgcaatggttttgctgggcatccaatgtgtgagttctgcagaagttcattttatggagatagtgagctttacatgcatatgtctagggaacactattcttgccacatatgcaagaggcagaaccctggtcgtgttgaatatttcgcgaactatgaggacattgagttgcattttagagaagatcatttcctatgtgaagatgaagcatgtttggaaaagaagtttgttgtcttcctgagtaaagcgcagctgaagaagcataatgctatggagcacggtgggcggatgtctcgttctcagaggaatgctgcacttgagacacctagcagctttatatatcgcagaaatgagcaagaacaacggcgcggcaggggccgtaatgctttccatgatggatctgattgtcatatctcatcgtctgcaaatgctttccatgatcgatctgactgtcatatctcatcatctgcaaatgctttccatgataaatctgactgccatatcccatcaactgcacaaaaagaccgggcagctgccgatggccatgcagggcgtcttgacaatgtttcagagtcgtttcagtcattaagtattggatccagttctagggaagctgaagttggcgaaggctcgaggactggacgagtgctggaacagttgtccttccgacctctttctgacccggatattcctgacaatagtgttgaaacctcattcccttcattatcagagcagcaatccagtctcaatcagagtgcaagggacgctccgaggcttggagatgagtcactgttcccccctttgactgggtctagtaacaagatgaagcagcctgtttttacgcctaagcgtcctcgaacttttcctgctgccgaggatatccatgctgcaaagatgcgctatgctctgggaatgaacgaggacatgtactctgcgttcaaagagatcgctggtgaataccgtcgaggtaccatagatgcttttgagtatctttcatatgtcgagcagttcggactgtcgcaccttgttcctgagatggttaggctattgcctgattctcgaaaacagagggaacttgctgatgcgcactatacaaatacacggttgaaaaacctccaagaaaatggaaataataggaatgggggattcttcttatcaaagaagaaaagcctccaagaaaatggaggtggaactagcagaaagttcatgatatagaaagcactgctgatggatgatgtgaacatggcacaagcagataacattcaggacactgtaagaaggcttcaatcaaaccatcttgcttagaaaggagaagctgaggtgttgtccaaggataggtatcgatcttccatggaggtccaaccggccgccgctggaccttcatctaatctggatagtgaaagtcatctagtgcaacggaggaggcaataagcaaccaaagaagacatcaaggtttctaagagctcgttcaggtgacaactcgttagccatgcttggtttcagacagccaagtgcaagccctgaatgtccacaaagggaattacaaggtccagagacgtggttgccagcgcgaggtgcttggaagacgaagaatggtgggggatagaaactctttttgatcaatggacggaagagtcattgcaactgcatttagacgtgtccatatactttagtattttttgaattttgagataaagtcgtggtattgaaaaatattatagtttttcccaagtgtttggctaccttgtaaaagctctcttttgaatactataatttagtagttctatggtttagtagataccatggtatttatttttggagtatttaaaactccactccaatctaaaatttttttatctatgactggcttttggtatatatacattaaatatcatggtttaag

SEQ ID NO: 84682 - DNA, 3356 bp, Zea Mays
tcgtcgcctccctctccatcccttcccttcccttcccttccccgagcagccagccaagaaccgaacgagagagagagagagtagaaagcgcgtaatggggaaccgggcgtacgcggcggcagcgaagccggttcccgtacgcgccgccgtccatgctgccgggcggccgcgtgccccctccgccgatgtaccggccgaaacccgcgcaggcgcggctgccggcgccgcggcggcgccttcccctactcgagttcgaattaacagtggaatccgatcccaaaagaatcgatccctatcttaccagatttgaagatatattcggacttcggagattagagctgcgcagatagccatggaagacttttgtgcggtgtgcgcagatacgctggagtgggtggcctatgggtcgtgcgggcaccgcgacgtgtgctccacatgcatcgtccgcctgcgtttcgtgatgggcgacaacaagtgttgcatctgcaagaccgtctgccccttcgtctttgtcactaaggccatgggtaaatacactagagtgatcactgatttctctgtgttacctgatggggtaaatgagggcaaagctggggatttctggtaccatgaagatacaaaggcatactttgatgatgcggaccactaccggatgatacggaccatgtgtcaactttcctgtaatgtttgtgacaacgcagaagatcaggttgctcaagcaaagcgcaaaagcaagttcaggagcattgaacaactgaagggacatttatactgcgtgcatagttgatttcatggattatgctgtcaaatttagcatcaaactttagacatgttttgaataatctagagctgatttttctttgtttctatttcatgcataatggtttctttttagtttataggcctttcattgtgcatgtacagttcagtgcagtttgtcttgtctatcagtatatgacgctggtacctatgctatagcttacctagtgagctgttatgttactgtacaatatattttgaaattgaaaaatgttgtttccttcctgtagtttttttgcttagtataatgagcagaatttattcgtttatgtatataacatggtttaatttaaagatgttttccagagtatgcatctcaacccactacaggcaattgacatgaatagcctatttgaactatttaagctgaatacctaattattgcttgcaactagcatgcttgacattgtgctatcagttgctaattatgtgacttggccatacgagtgttcactaattttttattggtcattgttgtcctatagtcaacattgtagaaccggggtcatgtaatttacactctaaattacacttgcgatttttatattcatgattatttattgaaatggtttcgtgtgttttgaaggtgttcatttgtgaacaaaagctttattcgaagtcacagttagctcagcatatgaagactggcgactctgaagtggatggctctgaggtagagcgcaatggttttgctgggcatccaatgtgtgagttctgcagaagttcattttatggagatagtgagctttacatgcatatgtctagggaacactattcttgccacatatgcaagaggcagaaccctggtcgtgttgaatatttcgcgaactatgaggacattgagttgcattttagagaagatcatttcctatgtgaagatgaagcatgtttgaagcataatgctatggagcacggtgggcggatgtctcgttctcagaggaatgctgcacttgagacacctagcagctttatatatcgcagaaatgagcaagaacaacggcgcggcaggggccgtaatgctttccatgatggatctgattgtcatatctcatcgtctgcaaatgctttccatgatcgatctgactgtcatatctcatcatctgcaaatgctttccatgataaatctgactgccatatcccatcaactgcacaaaaagaccgggcagctgccgatggccatgcagggcgtcttgacaatgtttcagagtcgtttcagtcattaagtattggatccagttctagggaagctgaagttggcgaaggctcgaggactggacgagtgctggaacagttgtccttccgacctctttctgacccggatattcctgacaatagtgttgaaacctcattcccttcattatcagagcagcaatccagtctcaatcagagtgcaagggacgctccgaggcttggagatgagtcactgttcccccctttgactgggtctagtaacaagatgaagcagcctgtttttacgcctaagcgtcctcgaacttttcctgctgccgaggatatccatgctgcaaagatgcgctatgctctgggaatgaacgaggacatgtactctgcgttcaaagagatcgctggtgaataccgtcgaggtaccatagatgcttttgagtatctttcatatgtcgagcagttcggactgtcgcaccttgttcctgagatggttaggctattgcctgattctcgaaaacagagggaacttgctgatgcgcactatacaaatacacggttgaaaaacctccaagaaaatggaaataataggaatgggggattcttcttatcaaagaagaaaagcctccaagaaaatggaggtggaactagcagaaagttcatgatatagaaagcactgctgatggatgatgtgaacatggcacaagcagataacattcaggacactgtaagaaggcttcaatcaaaccatcttgcttagaaaggagaagctgaggtgttgtccaaggataggtatcgatcttccatggaggtccaaccggccgccgctggaccttcatctaatctggatagtgaaagtcatctagtgcaacggaggaggcaataagcaaccaaagaagacatcaaggtttctaagagctcgttcaggtgacaactcgttagccatgcttggtttcagacagccaagtgcaagccctgaatgtccacaaagggaattacaaggtccagagacgtggttgccagcgcgaggtgcttggaagacgaagaatggtgggggatagaaactctttttgatcaatggacggaagagtcattgcaactgcatttagacgtgtccatatactttagtattttttgaattttgagataaagtcgtggtattgaaaaatattatagtttttcccaagtgtttggctaccttgtaaaagctctcttttgaatactataatttagtagttctatggtttagtagataccatggtatttatttttggagtatttaaaactccactccaatctaaaatttttttatctatgactggcttttggtatatatacattaaatatcatggtttaag

SEQ ID NO: 84683 - DNA, 2011 bp, Zea Mays
cctccttcccctgctctccccaccacccccgcagcgcaggccgccgctcgggacctcttcctccccaaccaaaactttatcttcgcgcccccctcaaacgtcgtcgtaatgtcggcgcggaccgtcgcccgacccctcaaacaggagcatcgtcgtcctgtcggcgcggggtggagcgacatcctatccttcgtgtgccgacttcaattggagctccatccccttctctcttggacatcgtccccgtgctcgagccgccatgacgcgggaagccgcccggaacttctccctccccgcaccatcctatcctccttgtgtcaactccaattggagctccatcccctccccacctcagacaccgtaccgtagcggtgctcgagccgctgccaagagctctattctcctcccccttcccctcaagcgatgtcgccttgcccgtgtaggacggctcaacatgtggtaatccatcgctcttttgtcaagtcagcaacaggggcaactgaccggtacaacaaatcctttgcacgacgctaccggagtggcacgagctaccacggccactagacgtagctgcctcatcccctgtctccctccttgcctcccctgccgatctcctcttggcttcctgctttaccgtctctagagttctagatccccaagtttattttcagacaattccatttcacctgtcattcacatggccacgatgtatcaaacaccttatctttgcactgcaccgatgaagttccagtatgcaaactacaagaacaacgtctgcaacaagagtgggaagggatcctaaggctggagctgatcaaccagagagcgaacttcgcctttgcgctcttctccgaatacttctcggtgggaccaggtgacagagatgaaaccatcgaaagcaaccatccaaaccttttccagtgctgctaagaagggatcaattttctgcacaaagatgcaaactgtggtgtctgagacagcagatcgaacctggaccaggtatattgagaattaatggctaagctgctattctctgcaaaaacgtcaatgttccttcccttcgatccatagatgtgtccatgtaaaaagagcaagaggcaaccagtacacttagttttcaatcatcatttttatagtagcaatatgacgatctaagcctccaacaacttcaccccgtcagaaacgcgtgcacccgtgcgtccacgtcggcaaaaaaaacatgtgcgtaggatgttccatcaacggacgagatttcttctcagcctccccgggccgctgtagacgcctggagaattctagcgatgtgcagttcataaaaaaatcaactgttttctagaagggcgtataaataggcatcgcgtgcctagcgtcggctaccgtgactgcggcgtcggcggctgggaccagcggctgtgcgtcccctctctagaagcttcgtccgtcttcaccatctgtgcagctgaagctagggcgtcgccaccgtcaatgtcatggcactcccgctctgttcaccaatcgcatcgacaggagccctatcctcaatcatgtcatgtctttcccgccgagctacacaccttcatgagcccaccccctcctcccccaaacgacgccgggtgacaaggaggaaaagtagtaatgacgacatgcaaactgaataagattatgtattttgaatacgattctagagatgcacacgctctgttcatcaatgctgctacgttttgaaacttcagcatttcattactgctacaaatatatgtacacggtaatataatctcttagctcctcatgttgctacatttgtaaacttcaatatttcattactgctacaaatctatttacagttccaattgactatggtagcttccttgctttctgttcttgccttaccagactgagctaaagttttattaattaaatcgtgatgcaatgttgcatcaatgctggacttcgacatttgaattttacgtgcactctggtttttatgttgtttaccgtccatctttctcct

SEQ ID NO: 84684 - DNA, 513 bp, Zea Mays
atggagtgcgcgtcgatgcggaccaggtcggcgcccagcccgacctccctgaccaggggcaggttcgccgtgttgagcaccaccacgcggcccccgcccgggatgtccacgtccagcggcgcctccaggcagttgagcgccaccccctcgcggtcctgcgccgagggcgccggcagcggggacgaggccctgacgatgcccgacgccggctggctcgacaccagcgccgcggcgttcgcctccggcaggtcccacgcgcgcgacacgaactcggtggagaagcccgtgaagatgccgctcgcgcccgtcagctggaagttggtgaactgccccggcctgtggcccttggaggtgtcgccgaggaagaggaccgtgagctgggtcggcgcggcggggccgttgtgccaccacgtgaccacgccgaaggggagcgcgagggcgtcgccctccttcacggccagcaccttctccttggtcgcctccggcaggacgatgccgcaggtgccagtgcct

SEQ ID NO: 84685 - DNA, 791 bp, Zea Mays
aaataattaaatatataaatgtggaatagaatatcacccttcaatattatgaataacctaaattatgaaatatcataaatgtatcataaaaaccaagaaacaaccatattattatctatagaattataatatttattattattttatagattaattaaaacaatatagctcgcgagcctgaacaagccgcggcttaaagtttttttccagccctagacctagacaaaacagagggtgacaataataataattaacaaaacttggcagttcgacgaacggacacgacaaccgaccgacgcaacgactgaaccactgaacgactgaagctactgaagaagcagtgagccgaggaccaccaccattctctctttattaaggcgagctaagctaatgctaatctaaccacgacgacttcacgagagcactccaccgtgggcttccgcctatttgctcagttggacgggggcgcgaagaagatctccgagtcaagcctcttggaccggaacagcttctccatctccggcgtggtgttgaacgacgcctgcagcacctccgccgagatggctttccacaccgacgtctttccggccagatggctgaagatcgggctgcaatgcaaacattcccgtgcaatcaaatgtccagtgcaattcgcaacagcagaccaaaaaaagaaagatcgatcgagacaaattacttgggggtggtgatgatggagaaccattccatgcccgacgcgtccgcgatcttggacaccacgtggaagcggggcacgatgaagaggaagccgc

SEQ ID NO: 84686 - DNA, 2015 bp, Zea Mays
cgaaagctcgccgcaccccgcacgtcggggtccagctgcgcggtgccgcgtgcgtgtccgcctcgcccacctcactcaacgacccaaccccacccgccttataaaagcgagcgcccgggcacacaggtctccctccactgcacacacacacacacaccacacgccggctatctggctctgtacgtgtgtggcacggggcgcggggacgagagagccgtgtcgtcgtccatttgggttttgggcatcgatcgagtagtagcgatggcgctggaggccgtggtgttctcccagccccaggcggcggcgggccacttcggctacggccgcggggactcgacgacgtacgcggtgccgtggtgcgacctgctacagggaggcgtaggaggaggagggggagggtttggcgatctctgcgcggcgggcgagtgggacctcgacatcgacacctgggccgccgccgccgccgccgcgcccaccgtggagctggggggcgacgactgggactgggaggcgctctcccgggactaccagtcctcggacgcctccacggagtactaccacggcggcagcaggaaggcggcggcggcgcccgagcctgcggggaggaggaagcggaggcgcgccaaggccgtcaagaacaaggaggagatcgagagccagcgcatgacccacattgccgtcgagcgcaaccgccgccgccagatgaacgagtacctcgccgtgctccgctccctcatgccgccgtcctacgcgcacaggggtgaccaggcatccatcgtcggtggcgcgatcaactacgtgagggagctggagcagctgctgcagtcgctagaggtccaaaagagcatcaggagccggccgggtgcaggcgccggcgccgctgacagctccccgttcgccggcttcttcagcttcccgcagtactccgccaccaccacctcggcccacggaggctgctcgggcaacaacaacaacaacacgggcagcggaggaaaccgcagcgacgcggccgccgcaggagcaggagcagcagggtcgtcggcggtcgcggacgtggaggtgacgatggtggaagggcacgccagcctcaaggtgctggcgcggcggcggcccaagcagctgctgaagctcgtcgcggggctgcaccagctgcgcatcccgccgctgcacctcaacgtgaccaccgtcgacgccatggtcctctacaccttcagcctcaaggtggaggatgactccaacatgggctctgttgaggatatcgccgccgctgtgcatgagattatcggcagcatagagcagcagcagcaggaggagggagagaccgccgtcatgtgaagctctgcactctgcacgactgcacccgcacatatctgcactctctgcatgccctcgtcctgccaatggaatccatttgcctctgtagtagtctgtacacatgtgagctagtgactgcgattgcgcccagctgggcacctgagccatacatgcagagcattatttgtccaatccgtggtcacaagcagaatatgctgagagatctagctagctagtgggctgtatgcaatgatctaagcaagcgacaacctccgttttggagtgagagcagtacctgtagatagacacacatacaaatttgcctccctcaactcaagctacaaccactactgcagtgtgcagtctgcatacgccagacagaagaatgagtacgtgctcggtgatctatgtatggcgtgtcgatctgctgtatcatcagttgctagctggtactataccactagctcatctctggaaatgcgttagcttcagtaccgcggccgtcgtcacctcgttctgttcccttatcaggttcagatcgatggaatgaatgtttcagtcaactgtagcacacacgtacgtgtacgtcagtgggaactaaaaaaaattgttctgcggacaaaaaatggcgcagtcgaggtgctactagagtacacggacagcatgagtgtgctcctgtgctgtgccgctagagattccat

SEQ ID NO: 84687 - DNA, 2707 bp, Zea Mays
tttggcgtgatacagatgagaggattttttaaccacaacctgaaattcggtcccacagggagtcaaacccagtacctgaggagtgctactcataccacctaaccaactcaactagaggccctttcgcaacttttccattgttttagatatttcgaaatataatagtggcaagccaaattatattttggggtattttgttttttatttgaaatgttatgtttgtaaattaagttttttataacttttggtggtatctggatctggatatcattttctgcctttgaatctataaatcttagaaaaagtgaactcataatgcttcatttgttggaaaattcagttgtagctttgtgttcagtattctgcacttctcatgcacctgcttatatgatttataccagtagtccattttttctcctggattctatttgaatgcatggataagtctgcttgaagaatgaagataaatgcttcttgatctacggtgtggagcaaagaagtctttagctgatctacccaaacatccattggcactgaagtcttgtgacattagctctgtctgttcccatcaaatccttgttggtgggagcgatgcatttgctaggttgtacgatagaagaatgcttccaccattgagctcgtgtcaaaccaaaaggaagccaccaccatgtgttaaaatgttctgcccattgcatcttgctgacagtaagaagacatattcacaccttacacatgttgcattcagcccaaatgggaaggaggttcttttaagttacagtggtgaacatgtttatctgttcgatgttgacccagatggtatgagttctagatacacagcagactatgtaagggaacaattatttgtacctccttttcacaaagtatcagcaaaaggacatgcaaaacaaaagaaggcttcagtaaatacaacttcaagaagtttgtctagggtagatatgtgcaagaaatttatgcaagtcgcaacaagatctctggagacaggtaagaacttaatgcttgggattgaagcatgcagtgaagtccttgaatcaatggaacctgatattgacgatgacacgaggcacgagtttttgtgtactcgagcagcattgtacctaaagaacgtggaagattgatgtcacatcgtatcaagcacacttgcatatggctgaggcactattgcagttaggaagactgaaggaggcatctgagcatgcagaggtggcaaatggtcttcttccacctcattgtccattgagggagcaggtggatgatttcaagcaacgcatcgcttcagctgagcttgagaagaacagagcggataaaaatgggagctcaaaagctgatactcatggaaaattacgctcattgagtgagatactctttagacctgatgttggtggttcatcacaggagggacgagaagattcagattatgatgatgatacggaaatggactatgaaacaacggtatctggtcatgaaagccgagagaatgatcaaggtgtcttccggggtagtttaagtttccaatttcatcaaagagaggatcaaaccaatgtacacactgatgagaatgggtcagttgagtcccctcgaaaagatgattatgcttttcagtcagatgttgccattgatatgaaacaaagatatgttgcacactgcaatgtagggacagatataaaacaagccagttttcttggtgagcaaggggagttcattgccagtggaagtgatgatggtagatggttcatatgggagaagagaacaggaaggcttattaaaatgcttgcaggggacggagctgttgtgaactgcatacagtctcatcccttcgactgtgccgttgcaacaagcggaatcgataacacaataaagctatggacacccgatgcaaatgctacatcaatggtttctggacctgaacttgatgtattgagtgccatagagaataatcagcagaagttatgtcggaaccgtcactttgtactgccttctgaatttttagaacgatttcagatgcatgagttttcagaaggtttcgagtgtgcccagagctgatttactatcgctggagctgcttgaggaaaagggtaatacttggaagaatgatatcatccaagctacaagcagcctatgtttgaattagtgaaatcggaaggccttgttgccattatagagtgtagacgcacctggatagataaacaggtgtgccggtgctgaaactattgcttgagatgtcaataaacactggaattatgttgttgtttgggggtggtataatgattcatacgtgtgtaatgcagtgtggattcattcccttgtacagattgtagataggtgagattctgcaataagtgacaatcacagatgtacatgtgtggtattcttgtctctgcgtgccgcaggtaggtcatgctagtttgtggctgacgattggggtatatcttctcttaaagacttgctgggtctggatgtggtgtaggaactgtgttactttatgtttcctaaatatgttactctttccatcccaatttataattcatttaatttcttttgttcttcctgcgtgcattagggataggaatattctgttataaagattagttcctttattttagttttatttagtctctaaattgtcaaagggtgagactaaactgttttcgtctctagtttctcaaggggtaaataaaagagattaaat

SEQ ID NO: 84688 - DNA, 2746 bp, Zea Mays
tttggcgtgatacagatgagaggattttttaaccacaacctgaaattcggtcccacagggagtcaaacccagtacctgaggagtgctactcataccacctaaccaactcaactagaggccctttcgcaacttttccattgttttagatatttcgaaatataatagtggcaagccaaattatattttggggtattttgttttttatttgaaatgttatgtttgtaaattaagttttttataacttttggtggtatctggatctggatatcattttctgcctttgaatctataaatcttagaaaaagtgaactcataatgcttcatttgttggaaaattcagttgtagctttgtgttcagtattctgcacttctcatgcacctgcttatatgatttataccagtagtccattttttctcctggattctatttgaatgcatggataagtctgcttgaagaatgaagataaatgcttcttgatctacggtgtggagcaaagaagtctttagctgatctacccaaacatccattggcactgaagtcttgtgacattagctctgtctgttcccatcaaatccttgttggtgggagcgatgcatttgctaggttgtacgatagaagaatgcttccaccattgagctcgtgtcaaaccaaaaggaagccaccaccatgtgttaaaatgttctgcccattgcatcttgctgacagtaagaagacatattcacaccttacacatgttgcattcagcccaaatgggaaggaggttcttttaagttacagtggtgaacatgtttatctgttcgatgttgacccagatggtatgagttctagatacacagcagactatgtaagggaacaattatttgtacctccttttcacaaagtatcagcaaaaggacatgcaaaacaaaagaaggcttcagtaaatacaacttcaagaagtttgtctaggatatgtgcaagaaatttatgcaagtcgcaacaagatctctggagacaggtaagaacttaatgcttgggattgaagcatgcagtgaagtccttgaatcaatggaacctgatattgacgatgacacgaggcacgagtttttgtgtactcgagcagcattgtacctaaagaggaaatggaaaaatgatgtttacatggcgattcgagattgcaatagaacgtggaagattgatgtcacatcgtatcaagcacacttgcatatggctgaggcactattgcaggaagactgaaggaggcatctgagcatgcagaggtggcaaatggtcttcttccacctcattgtccattgagggagcaggtggatgatttcaagcaacgcatcgcttcagctgagcttgagaagaacagagcggataaaaatgggagctcaaaagctgatactcatggaaaattacgctcattgagtgagatactctttagacctgatgttggtggttcatcacaggagggacgagaagattcagattatgatgatgatacggaaatggactatgaaacaacggtatctggtcatgaaagccgagagaatgatcaaggtgtcttccggggtagtttaagtttccaatttcatcaaagagaggatcaaaccaatgtacacactgatgagaatgggtcagttgagtcccctcgaaaagatgattatgcttttcagtcagatgttgccattgatatgaaacaaagatatgttgcacactgcaatgtagggacagatataaaacaagccagttttcttggtgagcaaggggagttcattgccagtggaagtgatgatggtagatggttcatatgggagaagagaacaggaaggcttattaaaatgcttgcaggggacggagctgttgtgaactgcatacagtctcatcccttcgactgtgccgttgcaacaagcggaatcgataacacaataaagctatggacacccgatgcaaatgctacatcaatggtttctggacctgaacttgatgtattgagtgccatagagaataatcagcagaagttatgtcggaaccgtcactttgtactgccttctgaatttttagaacgatttcagatgcatgagttttcagaaggtttcgagtgtgcccagagctgatttactatcgctggagctgcttgaggaaaagggtaatacttggaagaatgatatcatccaagctacaagcagcctatgtttgaattagtgaaatcggaaggccttgttgccattatagagtgtagacgcacctggatagataaacaggtgtgccggtgctgaaactattgcttgagatgtcaataaacactggaattatgttgttgtttgggggtggtataatgattcatacgtgtgtaatgcagtgtggattcattcccttgtacagattgtagataggtgagattctgcaataagtgacaatcacagatgtacatgtgtggtattcttgtctctgcgtgccgcaggtaggtcatgctagtttgtggctgacgattggggtatatcttctcttaaagacttgctgggtctggatgtggtgtaggaactgtgttactttatgtttcctaaatatgttactctttccatcccaatttataattcatttaatttcttttgttcttcctgcgtgcattagggataggaatattctgttataaagattagttcctttattttagttttatttagtctctaaattgtcaaagggtgagactaaactgttttcgtctctagtttctcaaggggtaaataaaagagattaaat

SEQ ID NO: 84689 - DNA, 2415 bp, Zea Mays
tttggcgtgatacagatgagaggattttttaaccacaacctgaaattcggtcccacagggagtcaaacccagtacctgaggagtgctactcataccacctaaccaactcaactagaggccctttcgcaacttttccattgttttagatatttcgaaatataatagtggcaagccaaattatattttggggtattttgttttttatttgaaatgttatgtttgtaaattaagttttttataacttttggtggtatctggatctggatatcattttctgcctttgaatctataaatcttagaaaaagtgaactcataatgcttcatttgttggaaaattcagttgtagctttgtgttcagtattctgcacttctcatgcacctgcttatatgatttataccagtagtccattttttctcctggattctatttgaatgcatggataagtctgcttgaagaatgaagataaatgcttcttgatctacggtgtggagcaaagaagtctttagctgatctacccaaacatccattggcactgaagtcttgtgacattagctctgtctgttcccatcaaatccttgttggtgggagcgatgcatttgctaggttgtacgatagaagaatgcttccaccattgagctcgtgtcaaaccaaaaggaagccaccaccatgtgttaaaatgttctgcccattgcatcttgctgacagtaagaagacatattcacaccttacacatgttgcattcagcccaaatgggaaggaggttcttttaagttacagtggtgaacatgtttatctgttcgatgttgacccagatggtatgagttctagatacacagcagactatgtaagggaacaattatttgtacctccttttcacaaagtatcagcaaaaggacatgcaaaacaaaagaaggcttcagtaaatacaacttcaagaagtttgtctagggtagatatgtgcaagaaatttatgcaagtcgcaacaagatctctggagacaggtaagaacttaatgcttgggattgaagcatgcagtgaagtccttgaatcaatggaacctgatattgacgatgacacgaggcacgagtttttgtgtactcgagcagcattgtacctaaaggagggacgagaagattcagattatgatgatgatacggaaatggactatgaaacaacggtatctggtcatgaaagccgagagaatgatcaaggtgtcttccggggtagtttaagtttccaatttcatcaaagagaggatcaaaccaatgtacacactgatgagaatgggtcagttgagtcccctcgaaaagatgattatgcttttcagtcagatgttgccattgatatgaaacaaagatatgttgcacactgcaatgtagggacagatataaaacaagccagttttcttggtgagcaaggggagttcattgccagtggaagtgatgatggtagatggttcatatgggagaagagaacaggaaggcttattaaaatgcttgcaggggacggagctgttgtgaactgcatacagtctcatcccttcgactgtgccgttgcaacaagcggaatcgataacacaataaagctatggacacccgatgcaaatgctacatcaatggtttctggacctgaacttgatgtattgagtgccatagagaataatcagcagaagttatgtcggaaccgtcactttgtactgccttctgaatttttagaacgatttcagatgcatgagttttcagaaggtttcgagtgtgcccagagctgatttactatcgctggagctgcttgaggaaaagggtaatacttggaagaatgatatcatccaagctacaagcagcctatgtttgaattagtgaaatcggaaggccttgttgccattatagagtgtagacgcacctggatagataaacaggtgtgccggtgctgaaactattgcttgagatgtcaataaacactggaattatgttgttgtttgggggtggtataatgattcatacgtgtgtaatgcagtgtggattcattcccttgtacagattgtagataggtgagattctgcaataagtgacaatcacagatgtacatgtgtggtattcttgtctctgcgtgccgcaggtaggtcatgctagtttgtggctgacgattggggtatatcttctcttaaagacttgctgggtctggatgtggtgtaggaactgtgttactttatgtttcctaaatatgttactctttccatcccaatttataattcatttaatttcttttgttcttcctgcgtgcattagggataggaatattctgttataaagattagttcctttattttagttttatttagtctctaaattgtcaaagggtgagactaaactgttttcgtctctagtttctcaaggggtaaataaaagagattaaat

SEQ ID NO: 84690 - DNA, 2745 bp, Zea Mays
tttggcgtgatacagatgagaggattttttaaccacaacctgaaattcggtcccacagggagtcaaacccagtacctgaggagtgctactcataccacctaaccaactcaactagaggccctttcgcaacttttccattgttttagatatttcgaaatataatagtggcaagccaaattatattttggggtattttgttttttatttgaaatgttatgtttgtaaattaagttttttataacttttggtggtatctggatctggatatcattttctgcctttgaatctataaatcttagaaaaagtgaactcataatgcttcatttgttggaaaattcagttgtagctttgtgttcagtattctgcacttctcatgcacctgcttatatgatttataccagtagtccattttttctcctggattctatttgaatgcatggataagtctgcttgaagaatgaagataaatgcttcttgatctacggtgtggagcaaagaagtctttagctgatctacccaaacatccattggcactgaagtcttgtgacattagctctgtctgttcccatcaaatccttgttggtgggagcgatgcatttgctaggttgtacgatagaagaatgcttccaccattgagctcgtgtcaaaccaaaaggaagccaccaccatgtgttaaaatgttctgcccattgcatcttgctgacagtaagaagacatattcacaccttacacatgttgcattcagcccaaatgggaaggaggttcttttaagttacagtggtgaacatgtttatctgttcgatgttgacccagatggtatgagttctagatacacagcagactatgtaagggaacaattatttgtacctccttttcacaaagtatcagcaaaaggacatgcaaaacaaaagaaggcttcagtaaatacaacttcaagaagtttgtctagggtagatatgtgcaagaaatttatgcaagtcgcaacaagatctctggagacaggtaagaacttaatgcttgggattgaagcatgcagtgaagtccttgaatcaatggaacctgatattgacgatgacacgaggcacgagtttttgtgtactcgagcagcattgtacctaaagaggaaatggaaaaatgatgtttacatggcgattcgagattgcaatagaacgtggaagattgatgtcacatcgtatcaagcacacttgcatatggctgaggcactattgcagttaggaagactgaaggaggcatctgagcatgcagaggtggcaaatggtcttcttccacctcattgtccattgagggagcaggtggatgatttcaagcaacgcatcgcttcagctgagcttgagaagaacagagcggataaaaatgggagctcaaaagctgatactcatggaaaattacgctcattgagtgagatactctttagacctgatgttggtggttcatcacaggagggacgagaagattcagattatgatgatgatacggaaatggactatgaaacaacggtatctggtcatgaaagccgagagaatgatcaaggtgtcttccggggtagtttaagtttccaatttcatcaaagagaggatcaaaccaatgtacacactgatgagaatgggtcagttgagtcccctcgaaaagatgattatgcttttcagtcagatgttgccattgatatgaaacaaagatatgttgcacactgcaatgtagggacagatataaaacaagccagttttcttggggagttcattgccagtggaagtgatgatggtagatggttcatatgggagaagagaacaggaaggcttattaaaatgcttgcaggggacggagctgttgtgaactgcatacagtctcatcccttcgactgtgccgttgcaacaagcggaatcgataacacaataaagctatggacacccgatgcaaatgctacatcaatggtttctggacctgaacttgatgtattgagtgccatagagaataatcagcagaagttatgtcggaaccgtcactttgtactgccttctgaatttttagaacgatttcagatgcatgagttttcagaaggtttcgagtgtgcccagagctgatttactatcgctggagctgcttgaggaaaagggtaatacttggaagaatgatatcatccaagctacaagcagcctatgtttgaattagtgaaatcggaaggccttgttgccattatagagtgtagacgcacctggatagataaacaggtgtgccggtgctgaaactattgcttgagatgtcaataaacactggaattatgttgttgtttgggggtggtataatgattcatacgtgtgtaatgcagtgtggattcattcccttgtacagattgtagataggtgagattctgcaataagtgacaatcacagatgtacatgtgtggtattcttgtctctgcgtgccgcaggtaggtcatgctagtttgtggctgacgattggggtatatcttctcttaaagacttgctgggtctggatgtggtgtaggaactgtgttactttatgtttcctaaatatgttactctttccatcccaatttataattcatttaatttcttttgttcttcctgcgtgcattagggataggaatattctgttataaagattagttcctttattttagttttatttagtctctaaattgtcaaagggtgagactaaactgttttcgtctctagtttctcaaggggtaaataaaagagattaaat

SEQ ID NO: 84691 - DNA, 2741 bp, Zea Mays
tttggcgtgatacagatgagaggattttttaaccacaacctgaaattcggtcccacagggagtcaaacccagtacctgaggagtgctactcataccacctaaccaactcaactagaggccctttcgcaacttttccattgttttagatatttcgaaatataatagtggcaagccaaattatattttggggtattttgttttttatttgaaatgttatgtttgtaaattaagttttttataacttttggtggtatctggatctggatatcattttctgcctttgaatctataaatcttagaaaaagtgaactcataatgcttcatttgttggaaaattcagttgtagctttgtgttcagtattctgcacttctcatgcacctgcttatatgatttataccagtagtccattttttctcctggattctatttgaatgcatggataagtctgcttgaagaatgaagataaatgcttcttgatctacggtgtggagcaaagaagtctttagctgatctacccaaacatccattggcactgaagtcttgtgacattagctctgtctgttcccatcaaatccttgttggtgggagcgatgcatttgctaggttgtacgatagaagaatgcttccaccattgagctcgtgtcaaaccaaaaggaagccaccaccatgtgttaaaatgttctgcccattgcatcttgctgacagtaagaagacatattcacaccttacacatgttgcattcagcccaaatgggaaggaggttcttttaagttacagtggtgaacatgtttatctgttcgatgttgacccagatggtatgagttctagatacacagcagactatgtaagggaacaattatttgtacctccttttcacaaagtatcagcaaaaggacatgcaaaacaaaagaaggcttcagtaaatacaacttcaagaagtttgtctaggatatgtgcaagaaatttatgcaagtcgcaacaagatctctggagacaggtaagaacttaatgcttgggattgaagcatgcagtgaagtccttgaatcaatggaacctgatattgacgatgacacgaggcacgagtttttgtgtactcgagcagcattgtacctaaagaggaaatggaaaaatgatgtttacatggcgattcgagattgcaatagaacgtggaagattgatgtcacatcgtatcaagcacacttgcatatggctgaggcactattgcagttaggaagactgaaggaggcatctgagcatgcagaggtggcaaatggtcttcttccacctcattgtccattgagggagcaggtggatgatttcaagcaacgcatcgcttcagctgagcttgagaagaacagagcggataaaaatgggagctcaaaagctgatactcatggaaaattacgctcattgagtgagatactctttagacctgatgttggtggttcatcacaggagggacgagaagattcagattatgatgatgatacggaaatggactatgaaacaacggtatctggtcatgaaagccgagagaatgatcaaggtgtcttccggggtagtttaagtttccaatttcatcaaagagaggatcaaaccaatgtacacactgatgagaatgggtcagttgagtcccctcgaaaagatgattatgcttttcagtcagatgttgccattgatatgaaacaaagatatgttgcacactgcaatgtagggacagatataaaacaagccagttttcttggggagttcattgccagtggaagtgatgatggtagatggttcatatgggagaagagaacaggaaggcttattaaaatgcttgcaggggacggagctgttgtgaactgcatacagtctcatcccttcgactgtgccgttgcaacaagcggaatcgataacacaataaagctatggacacccgatgcaaatgctacatcaatggtttctggacctgaacttgatgtattgagtgccatagagaataatcagcagaagttatgtcggaaccgtcactttgtactgccttctgaatttttagaacgatttcagatgcatgagttttcagaaggtttcgagtgtgcccagagctgatttactatcgctggagctgcttgaggaaaagggtaatacttggaagaatgatatcatccaagctacaagcagcctatgtttgaattagtgaaatcggaaggccttgttgccattatagagtgtagacgcacctggatagataaacaggtgtgccggtgctgaaactattgcttgagatgtcaataaacactggaattatgttgttgtttgggggtggtataatgattcatacgtgtgtaatgcagtgtggattcattcccttgtacagattgtagataggtgagattctgcaataagtgacaatcacagatgtacatgtgtggtattcttgtctctgcgtgccgcaggtaggtcatgctagtttgtggctgacgattggggtatatcttctcttaaagacttgctgggtctggatgtggtgtaggaactgtgttactttatgtttcctaaatatgttactctttccatcccaatttataattcatttaatttcttttgttcttcctgcgtgcattagggataggaatattctgttataaagattagttcctttattttagttttatttagtctctaaattgtcaaagggtgagactaaactgttttcgtctctagtttctcaaggggtaaataaaagagattaaat

SEQ ID NO: 84692 - DNA, 2750 bp, Zea Mays
tttggcgtgatacagatgagaggattttttaaccacaacctgaaattcggtcccacagggagtcaaacccagtacctgaggagtgctactcataccacctaaccaactcaactagaggccctttcgcaacttttccattgttttagatatttcgaaatataatagtggcaagccaaattatattttggggtattttgttttttatttgaaatgttatgtttgtaaattaagttttttataacttttggtggtatctggatctggatatcattttctgcctttgaatctataaatcttagaaaaagtgaactcataatgcttcatttgttggaaaattcagttgtagctttgtgttcagtattctgcacttctcatgcacctgcttatatgatttataccagtagtccattttttctcctggattctatttgaatgcatggataagtctgcttgaagaatgaagataaatgcttcttgatctacggtgtggagcaaagaagtctttagctgatctacccaaacatccattggcactgaagtcttgtgacattagctctgtctgttcccatcaaatccttgttggtgggagcgatgcatttgctaggttgtacgatagaagaatgcttccaccattgagctcgtgtcaaaccaaaaggaagccaccaccatgtgttaaaatgttctgcccattgcatcttgctgacagtaagaagacatattcacaccttacacatgttgcattcagcccaaatgggaaggaggttcttttaagttacagtggtgaacatgtttatctgttcgatgttgacccagatggtatgagttctagatacacagcagactatgtaagggaacaattatttgtacctccttttcacaaagtatcagcaaaaggacatgcaaaacaaaagaaggcttcagtaaatacaacttcaagaagtttgtctagggtagatatgtgcaagaaatttatgcaagtcgcaacaagatctctggagacaggtaagaacttaatgcttgggattgaagcatgcagtgaagtccttgaatcaatggaacctgatattgacgatgacacgaggcacgagtttttgtgtactcgagcagcattgtacctaaagaggaaatggaaaaatgatgtttacatggcgattcgagattgcaatagaacgtggaagattgatgtcacatcgtatcaagcacacttgcatatggctgaggcactattgcaggaagactgaaggaggcatctgagcatgcagaggtggcaaatggtcttcttccacctcattgtccattgagggagcaggtggatgatttcaagcaacgcatcgcttcagctgagcttgagaagaacagagcggataaaaatgggagctcaaaagctgatactcatggaaaattacgctcattgagtgagatactctttagacctgatgttggtggttcatcacaggagggacgagaagattcagattatgatgatgatacggaaatggactatgaaacaacggtatctggtcatgaaagccgagagaatgatcaaggtgtcttccggggtagtttaagtttccaatttcatcaaagagaggatcaaaccaatgtacacactgatgagaatgggtcagttgagtcccctcgaaaagatgattatgcttttcagtcagatgttgccattgatatgaaacaaagatatgttgcacactgcaatgtagggacagatataaaacaagccagttttcttggtgagcaaggggagttcattgccagtggaagtgatgatggtagatggttcatatgggagaagagaacaggaaggcttattaaaatgcttgcaggggacggagctgttgtgaactgcatacagtctcatcccttcgactgtgccgttgcaacaagcggaatcgataacacaataaagctatggacacccgatgcaaatgctacatcaatggtttctggacctgaacttgatgtattgagtgccatagagaataatcagcagaagttatgtcggaaccgtcactttgtactgccttctgaatttttagaacgatttcagatgcatgagttttcagaaggtttcgagtgtgcccagagctgatttactatcgctggagctgcttgaggaaaagggtaatacttggaagaatgatatcatccaagctacaagcagcctatgtttgaattagtgaaatcggaaggccttgttgccattatagagtgtagacgcacctggatagataaacaggtgtgccggtgctgaaactattgcttgagatgtcaataaacactggaattatgttgttgtttgggggtggtataatgattcatacgtgtgtaatgcagtgtggattcattcccttgtacagattgtagataggtgagattctgcaataagtgacaatcacagatgtacatgtgtggtattcttgtctctgcgtgccgcaggtaggtcatgctagtttgtggctgacgattggggtatatcttctcttaaagacttgctgggtctggatgtggtgtaggaactgtgttactttatgtttcctaaatatgttactctttccatcccaatttataattcatttaatttcttttgttcttcctgcgtgcattagggataggaatattctgttataaagattagttcctttattttagttttatttagtctctaaattgtcaaagggtgagactaaactgttttcgtctctagtttctcaaggggtaaataaaagagattaaat

SEQ ID NO: 84693 - DNA, 2858 bp, Zea Mays
ttctcacacaggtcgagaaaaccccggaacccctgccccacccatacacagcggcatcaaagcccatgtgagaacgatcgcgaccggggccgagccttagacctgtgttttggcgtgatacagatgagaggattttttaaccacaacctgaaattcggtcccacagggagtcaaacccagtacctgaggagtgctactcataccacctaaccaactcaactagaggccctttcgcaacttttccattgttttagatatttcgaaatataatagtggcaagccaaattatattttggggtattttgttttttatttgaaatgttatgtttgtaaattaagttttttataacttttggtggtatctggatctggatatcattttctgcctttgaatctataaatcttagaaaaagtgaactcataatgcttcatttgttggaaaattcagttgtagctttgtgttcagtattctgcacttctcatgcacctgcttatatgatttataccagtagtccattttttctcctggattctatttgaatgcatggataagtctgcttgaagaatgaagataaatgcttcttgatctacggtgtggagcaaagaagtctttagctgatctacccaaacatccattggcactgaagtcttgtgacattagctctgtctgttcccatcaaatccttgttggtgggagcgatgcatttgctaggttgtacgatagaagaatgcttccaccattgagctcgtgtcaaaccaaaaggaagccaccaccatgtgttaaaatgttctgcccattgcatcttgctgacagtaagaagacatattcacaccttacacatgttgcattcagcccaaatgggaaggaggttcttttaagttacagtggtgaacatgtttatctgttcgatgttgacccagatggtatgagttctagatacacagcagactatgtaagggaacaattatttgtacctccttttcacaaagtatcagcaaaaggacatgcaaaacaaaagaaggcttcagtaaatacaacttcaagaagtttgtctaggatatgtgcaagaaatttatgcaagtcgcaacaagatctctggagacaggtaagaacttaatgcttgggattgaagcatgcagtgaagtccttgaatcaatggaacctgatattgacgatgacacgaggcacgagtttttgtgtactcgagcagcattgtacctaaagaggaaatggaaaaatgatgtttacatggcgattcgagattgcaatagaacgtggaagattgatgtcacatcgtatcaagcacacttgcatatggctgaggcactattgcagttaggaagactgaaggaggcatctgagcatgcagaggtggcaaatggtcttcttccacctcattgtccattgagggagcaggtggatgatttcaagcaacgcatcgcttcagctgagcttgagaagaacagagcggataaaaatgggagctcaaaagctgatactcatggaaaattacgctcattgagtgagatactctttagacctgatgttggtggttcatcacaggagggacgagaagattcagattatgatgatgatacggaaatggactatgaaacaacggtatctggtcatgaaagccgagagaatgatcaaggtgtcttccggggtagtttaagtttccaatttcatcaaagagaggatcaaaccaatgtacacactgatgagaatgggtcagttgagtcccctcgaaaagatgattatgcttttcagtcagatgttgccattgatatgaaacaaagatatgttgcacactgcaatgtagggacagatataaaacaagccagttttcttggtgagcaaggggagttcattgccagtggaagtgatgatggtagatggttcatatgggagaagagaacaggaaggcttattaaaatgcttgcaggggacggagctgttgtgaactgcatacagtctcatcccttcgactgtgccgttgcaacaagcggaatcgataacacaataaagctatggacacccgatgcaaatgctacatcaatggtttctggacctgaacttgatgtattgagtgccatagagaataatcagcagaagttatgtcggaaccgtcactttgtactgccttctgaatttttagaacgatttcagatgcatgagttttcagaaggtttcgagtgtgcccagagctgatttactatcgctggagctgcttgaggaaaagggtaatacttggaagaatgatatcatccaagctacaagcagcctatgtttgaattagtgaaatcggaaggccttgttgccattatagagtgtagacgcacctggatagataaacaggtgtgccggtgctgaaactattgcttgagatgtcaataaacactggaattatgttgttgtttgggggtggtataatgattcatacgtgtgtaatgcagtgtggattcattcccttgtacagattgtagataggtgagattctgcaataagtgacaatcacagatgtacatgtgtggtattcttgtctctgcgtgccgcaggtaggtcatgctagtttgtggctgacgattggggtatatcttctcttaaagacttgctgggtctggatgtggtgtaggaactgtgttactttatgtttcctaaatatgttactctttccatcccaatttataattcatttaatttcttttgttcttcctgcgtgcattagggataggaatattctgttataaagattagttcctttattttagttttatttagtctctaaattgtcaaagggtgagactaaactgttttcgtctctagtttctcaaggggtaaataaaagagattaaat

SEQ ID NO: 84694 - DNA, 2920 bp, Zea Mays
aaaaaatcgacctgcggggggcaagacagcccccgagtattgtattaagaagaagaccttctcacacaggtcgagaaaaccccggaacccctgccccacccatacacagcggcatcaaagcccatgtgagaacgatcgcgaccggggccgagccttagacctgtgttttggcgtgatacagatgagaggattttttaaccacaacctgaaattcggtcccacagggagtcaaacccagtacctgaggagtgctactcataccacctaaccaactcaactagaggccctttcgcaacttttccattgttttagatatttcgaaatataatagtggcaagccaaattatattttggggtattttgttttttatttgaaatgttatgtttgtaaattaagttttttataacttttggtggtatctggatctggatatcattttctgcctttgaatctataaatcttagaaaaagtgaactcataatgcttcatttgttggaaaattcagttgtagctttgtgttcagtattctgcacttctcatgcacctgcttatatgatttataccagtagtccattttttctcctggattctatttgaatgcatggataagtctgcttgaagaatgaagataaatgcttcttgatctacggtgtggagcaaagaagtctttagctgatctacccaaacatccattggcactgaagtcttgtgacattagctctgtctgttcccatcaaatccttgttggtgggagcgatgcatttgctaggttgtacgatagaagaatgcttccaccattgagctcgtgtcaaaccaaaaggaagccaccaccatgtgttaaaatgttctgcccattgcatcttgctgacagtaagaagacatattcacaccttacacatgttgcattcagcccaaatgggaaggaggttcttttaagttacagtggtgaacatgtttatctgttcgatgttgacccagatggtatgagttctagatacacagcagactatgtaagggaacaattatttgtacctccttttcacaaagtatcagcaaaaggacatgcaaaacaaaagaaggcttcagtaaatacaacttcaagaagtttgtctagggtagatatgtgcaagaaatttatgcaagtcgcaacaagatctctggagacaggtaagaacttaatgcttgggattgaagcatgcagtgaagtccttgaatcaatggaacctgatattgacgatgacacgaggcacgagtttttgtgtactcgagcagcattgtacctaaagaggaaatggaaaaatgatgtttacatggcgattcgagattgcaatagaacgtggaagattgatgtcacatcgtatcaagcacacttgcatatggctgaggcactattgcagttaggaagactgaaggaggcatctgagcatgcagaggtggcaaatggtcttcttccacctcattgtccattgagggagcaggtggatgatttcaagcaacgcatcgcttcagctgagcttgagaagaacagagcggataaaaatgggagctcaaaagctgatactcatggaaaattacgctcattgagtgagatactctttagacctgatgttggtggttcatcacaggagggacgagaagattcagattatgatgatgatacggaaatggactatgaaacaacggtatctggtcatgaaagccgagagaatgatcaaggtgtcttccggggtagtttaagtttccaatttcatcaaagagaggatcaaaccaatgtacacactgatgagaatgggtcagttgagtcccctcgaaaagatgattatgcttttcagtcagatgttgccattgatatgaaacaaagatatgttgcacactgcaatgtagggacagatataaaacaagccagttttcttggtgagcaaggggagttcattgccagtggaagtgatgatggtagatggttcatatgggagaagagaacaggaaggcttattaaaatgcttgcaggggacggagctgttgtgaactgcatacagtctcatcccttcgactgtgccgttgcaacaagcggaatcgataacacaataaagctatggacacccgatgcaaatgctacatcaatggtttctggacctgaacttgatgtattgagtgccatagagaataatcagcagaagttatgtcggaaccgtcactttgtactgccttctgaatttttagaacgatttcagatgcatgagttttcagaaggtttcgagtgtgcccagagctgatttactatcgctggagctgcttgaggaaaagggtaatacttggaagaatgatatcatccaagctacaagcagcctatgtttgaattagtgaaatcggaaggccttgttgccattatagagtgtagacgcacctggatagataaacaggtgtgccggtgctgaaactattgcttgagatgtcaataaacactggaattatgttgttgtttgggggtggtataatgattcatacgtgtgtaatgcagtgtggattcattcccttgtacagattgtagataggtgagattctgcaataagtgacaatcacagatgtacatgtgtggtattcttgtctctgcgtgccgcaggtaggtcatgctagtttgtggctgacgattggggtatatcttctcttaaagacttgctgggtctggatgtggtgtaggaactgtgttactttatgtttcctaaatatgttactctttccatcccaatttataattcatttaatttcttttgttcttcctgcgtgcattagggataggaatattctgttataaagattagttcctttattttagttttatttagtctctaaattgtcaaagggtgagactaaactgttttcgtctctagtttctcaaggggtaaataaaagagattaaat

SEQ ID NO: 84695 - DNA, 2888 bp, Zea Mays
ttgttcctggaacccagacctcaagccttcgccaccgcgcagtgtccagaatcatcccccacccggtccgcggcgatcgtgcggaagctggcgacgcgggagagcgagtggcagcgagggttagctggagatgaacggggccgagaagctgcggtgggccttctcggacggcagcgtcaccgatctcctggacgcccgcagcctccacggctcccccgacattaagaaaaaagtacagttccattcttctctagtgcaaaagcttgctttggaaaaggagatggagggtcacgtaggttgcgtgaatgccattgcgtggaactcaagtggttcgcttcttgtatcaggatcagatgacactagaattaacatctggaattataataaccgagagctggtgcatgatattgacactggccattctgcaaatatcttttgcacaaagtttgttccagaaacatgtgatgaagtagtagtctctggagcaggagatgcagaggttcgtgttttcaatatgtctcgattaagtggcagaaggcctagagaaatttctatggaaccaacagcagtttaccagtgtcactcaagaagggtcaagaaactagctcttgatctacggtgtggagcaaagaagtctttagctgatctacccaaacatccattggcactgaagtcttgtgacattagctctgtctgttcccatcaaatccttgttggtgggagcgatgcatttgctaggttgtacgatagaagaatgcttccaccattgagctcgtgtcaaaccaaaaggaagccaccaccatgtgttaaaatgttctgcccattgcatcttgctgacagtaagaagacatattcacaccttacacatgttgcattcagcccaaatgggaaggaggttcttttaagttacagtggtgaacatgtttatctgttcgatgttgacccagatggtatgagttctagatacacagcagactatgtaagggaacaattatttgtacctccttttcacaaagtatcagcaaaaggacatgcaaaacaaaagaaggcttcagtaaatacaacttcaagaagtttgtctagggtagatatgtgcaagaaatttatgcaagtcgcaacaagatctctggagacaggtaagaacttaatgcttgggattgaagcatgcagtgaagtccttgaatcaatggaacctgatattgacgatgacacgaggcacgagtttttgtgtactcgagcagcattgtacctaaagaggaaatggaaaaatgatgtttacatggcgattcgagattgcaatagaacgtggaagattgatgtcacatcgtatcaagcacacttgcatatggctgaggcactattgcagttaggaagactgaaggaggcatctgagcatgcagaggtggcaaatggtcttcttccacctcattgtccattgagggagcaggtggatgatttcaagcaacgcatcgcttcagctgagcttgagaagaacagagcggataaaaatgggagctcaaaagctgatactcatggaaaattacgctcattgagtgagatactctttagacctgatgttggtggttcatcacaggagggacgagaagattcagattatgatgatgatacggaaatggactatgaaacaacggtatctggtcatgaaagccgagagaatgatcaaggtgtcttccggggtagtttaagtttccaatttcatcaaagagaggatcaaaccaatgtacacactgatgagaatgggtcagttgagtcccctcgaaaagatgattatgcttttcagtcagatgttgccattgatatgaaacaaagatatgttgcacactgcaatgtagggacagatataaaacaagccagttttcttggtgagcaaggggagttcattgccagtggaagtgatgatggtagatggttcatatgggagaagagaacaggaaggcttattaaaatgcttgcaggggacggagctgttgtgaactgcatacagtctcatcccttcgactgtgccgttgcaacaagcggaatcgataacacaataaagctatggacacccgatgcaaatgctacatcaatggtttctggacctgaacttgatgtattgagtgccatagagaataatcagcagaagttatgtcggaaccgtcactttgtactgccttctgaatttttagaacgatttcagatgcatgagttttcagaaggtttcgagtgtgcccagagctgatttactatcgctggagctgcttgaggaaaagggtaatacttggaagaatgatatcatccaagctacaagcagcctatgtttgaattagtgaaatcggaaggccttgttgccattatagagtgtagacgcacctggatagataaacaggtgtgccggtgctgaaactattgcttgagatgtcaataaacactggaattatgttgttgtttgggggtggtataatgattcatacgtgtgtaatgcagtgtggattcattcccttgtacagattgtagataggtgagattctgcaataagtgacaatcacagatgtacatgtgtggtattcttgtctctgcgtgccgcaggtaggtcatgctagtttgtggctgacgattggggtatatcttctcttaaagacttgctgggtctggatgtggtgtaggaactgtgttactttatgtttcctaaatatgttactctttccatcccaatttataattcatttaatttcttttgttcttcctgcgtgcattagggataggaatattctgttataaagattagttcctttattttagttttatttagtctctaaattgtcaaagggtgagactaaactgttttcgtctctagtttctcaaggggtaaataaaagagattaaat

SEQ ID NO: 84696 - DNA, 443 bp, Zea Mays
cttaattgtattctttgtactgttcttcttcgctcctgcattctgacattaagaaaaaagtacagttccattcttctctagtgcaaaagcttgctttggaaaaggagatggagggtcacgtaggttgcgtgaatgccattgcgtggaactcaagtggttcgcttcttgtatcaggatcagatgacactagaattaacatctggaattataataaccgagagctggtgcatgatattgacactggccattctgcaaatatcttttgcacaaagtttgttccagaaacatgtgatgaagtagtagtctctggagcaggagatgcagaggttcgtgttttcaatatgtctcgattaagtggcagaaggcctagagaaatttctatggaaccaacagcagtttaccagtgtcactcaagaagggtcaagaaactagctgtaagttag

SEQ ID NO: 84697 - DNA, 4347 bp, Zea Mays
atgtacaagctccgcggccgtggcggcgggcgcggcggcagcggcgtagcaaagcgaccgatgccctccaacgcccgcggccgtggcgttgcctcctctatcggcgggatggccgggcctcctcgcagtcgcgccgccgccgccgccttgaaacagccggtgggacgcgaggaggcgttctgcctcgagtccagcgggctgcctgcctttgcggctataatacggctgacgcccgacctcgtcgacgagatacggcggacggaggaggccggtggaggcgcccgcatcaagttcaaccctaacatgtacaactcatcggagaacgttatagatgttagtggtaaagaattcaaattcacctgggcatctgaacgaggcgaattgtgtgatatttatgaagaacgtcggagtggagaggatggaaatgggttgcttctggagtgtggctctgcttggcgcaagatcaatcgtgctggaccctgccaatccatctgtcaagagtcaggccaagtcaatggctgctgcagctgtagaaggtaatccacggaggatgcactggaagcagaagagcgaatttcttaagaagaataaagctgctgttatcaccccaaccaaatcagttttgaaggtgaagttatctaacaacatccccaaagggaatatctcaagttcacctgcaccttctcctgaacaacctggagaaagcaatccttcgtttcctgttggatcagatgcaaataatgaagtcataacaccttttgattttaacaaagaggaaaacagtaaatatgagaaatcagttagaaataagatgtctaacaaagatataaatcgccgagcaagttctcatgctgcaaatgtggatgataatacaaatgaagtgcgaagctacttgatatccgtgctctcaaaaaatccaaaaggaatgggcctaaaggccttggagaaagctgttgcagatgcatttccaaatgcatcaaagaaaatacagagcatcatcaagaatattgcaaattaccaaggacctgagaggtatgttctgaaatcagggttggaggtagaaagctcaaaaagtcatgtatctgaaggagtaagatccatcagtaagaaaattgaggaatcggctccaagcctgacgattgatgatcctgatatatgtgagaggattgacattgtgggctccctagttgctccaactgatggaaaactcagtaatgacagtgaaggtaaggctggaacttccagtgacagtggaagcgatagcgatagtgacagcagtaacagtggaagtgatagtgggagccaaagcagaagtgctgcagaaactggtagtggaagcagcagcaatagtgacagtgatggctcatcaagcagcaaggaaggatctgatgcagctgttgatattacgagtgatgatgacaaagcaaatatagcacacacaaaagtagtggatgaccttaatttgtcttcatcgccaagagatttgaaaagactcgatgttgatgatgaacaaattgacattgaaacaaatcttgactacaggagtacatcacctcatattggtctgaataagtttaataccggtaatgatgatgcagcagcagagggctttagtgccggcaaccttagtaagccatctgaaatgtcaggaagcaagaacatgacgagcaccagaatggattctattggagttgataccaaatataatgaaatgtcttttctggacaacctttttgatgactccatgagaatagccagtgaaaactcacccaagggggaagctggtcaattgacagtgcagcatgtcaacaagagaaaatcaacatcaaaggatgaatcaaaatttggcccagtgagtattgctaaacctaaattaaaaaggtcttctggcagcgagaactctacagcaaagcctgagagtgctaaaaaggtcaaagctgacatagcatcgtcaataggttctttatcagagcacaaaagaagtttaccacctgaaaaatatagcaatgataggtttaacaaggggacatgggatgttagccgccatgcttcacaagatagcagtcctgccatgaaaggaagacctttggctcctggaaatttacagaggatagatcagagcccaaatttacctgtcccaacaatgcactctgagagaacaaaagaaaatactgtgaaatcaagtttgaagaaaaaatcagataagtcgcagaaaccatggcatggtatggatggtgactttgggccaggttattcacatggtgtagatcaccacgctaattttgatggctctgatgatttttccacaagaaaaaggagtagacatgggaatcttcttattgatgataaaatgtttaagcgttcgaaggacgctaatgccaatgtagattccatgaatttaaccaaaagttccagagaaactgttgtgcctgatgaaataactgcttttcctgaatctaatgaatgtaatggtgagcagtcaaattctcaaagagataatgttgagagatcaccttacggtaaaaaaaagctccagagggagttttctgatcttgagttggctgaacttcgcaagacttctttggaaaatgacgatggaaggataaggaagcaatttgagagtagttcctccaagtcgcttgatgctaaattaaatgtaattaactcctaccccagtatgaatgacagaaaggttcctgttaccgtctttaatgatactaagaggaaaccttcacctcaagaatatggaattggaggccatataaaccaggaagggtttcccaggaaggcagcagggtatgagtttgatgataataggcctcagcaaaatattccagacagtcagcatttgccaaggatttataatacagattttgagaatttaatatatccagatagttcaggaaaaacaagcaaaagggaaactaggatgacacatggtggaatgctagagtatgctgatatccagaagaagaaaacaacctcaaggcttccacagaatggtactaataatgtcagagtgtctcgaatgcagaaatcaatatccccatcagataatgatgaaagaagtaggaacgactctttgattgagacaaagacaggtaggaagagaaggggcagttcttcagatgatgataatttgtttttctccaagtatgataaagatgctccggagcttaaagatccaataaaagatttctcacaatacaaggattatgtgcaggagtacaatgagaagtatggggtttattcttatttgaatagtcagatagacaaaactatgtcagaatttttaaagattcaggatgatctcaatgttggaaaagaaagaggcaaggaacagtattataacaccttagaaagactcagagacatgtatcatgaatcaggaacaagacataaattgatgaagaaggtcttcgttttgcttcatgaggaactgcagaacaacagccaactgaggtctgacgacgaactacattattgatctgtggcaactatgcaggaaacctgagagacttagggtgtgtttggttgaatgtacatgaagggatggaaaaaggtggccacagatttaatagtgtttggatgagagtcgcgtaggggcgaggtgaacaccggagtagttttaggtggcggcgtgttgccctgcctcatcccactttgtcctcaaaccaaatcagcgtgatgaatttgatagtaatcacggtgaagtggaatcaaagacagttcaaatatcaatggcgtcgctggatacctgcgcggttccgcacaggagagcagaagaaatgattcattactcagggaagaggtgaggttatctctgaggaaacgagtaggccttacatcagcagttttgcagctagtttggcactgtgaccgggcggttctctttgtagatgttctgtgtttttttaaccccctgtgaagggcgagatctctcctctcttggcatttgtacatcgctttgtattagtgtgatccatgtcaaactgaaataaattgctaactgtgtacatatctgtagagccgatagagaagaagttttggagggagagaaaagtctgggacatttttttttgtcgcaaacacccacacaccaattcctaaatcttgcaactggtaacgaagatattggttcgatttttcttcttttacgtcattgacctctttatgtctatgaaactgcgacccatttctcgtctcttgcgaattacgatgtcttcggttggtggtgatgctcctttctatccagcgctcggctttgacgacacctcatgctcttttctatcctgcaatcggctttgacgacccttccctcgggccttcttggaactgatgatgacc

SEQ ID NO: 84698 - DNA, 4614 bp, Zea Mays
atgtacaagctccgcggccgtggcggcgggcgcggcggcagcggcgtagcaaagcgaccgatgccctccaacgcccgcggccgtggcgttgcctcctctatcggcgggatggccgggcctcctcgcagtcgcgccgccgccgccgccttgaaacagccggtgggacgcgaggaggcgttctgcctcgagtccagcgggctgcctgcctttgcggctataatacggctgacgcccgacctcgtcgacgagatacggcggacggaggaggccggtggaggcgcccgcatcaagttcaaccctaacatgtacaactcatcggagaacgttatagatgttagtggtaaagaattcaaattcacctgggcatctgaacgaggcgaattgtgtgatatttatgaagaacgtcggagtggagaggatggaaatgggttgcttctggagtgtggctctgcttggcgcaaggtgaatgtgcaacgcattttggatgaatcaacaaagaaccttgtgaaaatgcgctcagaagaggctgaacgtctctcaaaatctcgaaaatcaatcgtgctggaccctgccaatccatctgtcaagagtcaggccaagtcaatggctgctgcagctgtagaaggtaatccacggaggatgcactggaagcagaagagcgaatttcttaagaagaataaagctgctgttatcaccccaaccaaatcagttttgaaggtgaagttatctaacaacatccccaaagggaatatctcaagttcacctgcaccttctcctgaacaacctggagaaagcaatccttcgtttcctgttggatcagatgcaaataatgaagtcataacaccttttgattttaacaaagaggaaaacagtaaatatgagaaatcagttagaaataagatgtctaacaaagatataaatcgccgagcaagttctcatgctgcaaatgtggatgataatacaaatgaagtgcgaagctacttgatatccgtgctctcaaaaaatccaaaaggaatgggcctaaaggccttggagaaagctgttgcagatgcatttccaaatgcatcaaagaaaatacagagcatcatcaagaatattgcaaattaccaaggacctgagaggtatgttctgaaatcagggttggaggtagaaagctcaaaaagtcatgtatctgaaggaatccatcagtaagaaaattgaggaatcggctccaagcctgacgattgatgatcctgatatatgtgagaggattgacattgtgggctccctagttgctccaactgatggaaaactcagtaatgacagtgaaggtaaggctggaacttccagtgacagtggaagcgatagcgatagtgacagcagtaacagtggaagtgatagtgggagccaaagcagaagtgctgcagaaactggtagtggaagcagcagcaatagtgacagtgatggctcatcaagcagcaaggaaggatctgatgcagctgttgatattacgagtgatgatgacaaagcaaatatagcacacacaaaagtagtggatgaccttaatttgtcttcatcgccaagagatttgaaaagactcgatgttgatgatgaacaaattgacattgaaacaaatcttgactacaggagtacatcacctcatattggtctgaataagtttaataccggtaatgatgatgcagcagcagagggctttagtgccggcaaccttagtaagccatctgaaatgtcaggaagcaagaacatgacgagcaccagaatggattctattggagttgataccaaatataatgaaatgtcttttctggacaacctttttgatgactccatgagaatagccagtgaaaactcacccaagggggaagctggtcaattgacagtgcagcatgtcaacaagagaaaatcaacatcaaaggatgaatcaaaatttggcccagtgagtattgctaaacctaaattaaaaaggtcttctggcagcgagaactctacagcaaagcctgagagtgctaaaaaggtcaaagctgacatagcatcgtcaataggttctttatcagagcacaaaagaagtttaccacctgaaaaatatagcaatgataggtttaacaaggggacatgggatgttagccgccatgcttcacaagatagcagtcctgccatgaaaggaagacctttggctcctggaaatttacagaggatagatcagagcccaaatttacctgtcccaacaatgcactctgagagaacaaaagaaaatactgtgaaatcaagtttgaagaaaaaatcagataagtcgcagaaaccatggcatggtatggatggtgactttgggccaggttattcacatggtgtagatcaccacgctaattttgatggctctgatgatttttccacaagaaaaaggagtagacatgggaatcttcttattgatgataaaatgtttaagcgttcgaaggacgctaatgccaatgtagattccatgaatttaaccaaaagttccagagaaactgttgtgcctgatgaaataactgcttttcctgaatctaatgaatgtaatggtgagcagtcaaattctcaaagagataatgttgagagatcaccttacggtaaaaaaaagctccagagggagttttctgatcttgagttggctgaacttcgcaagacttctttggaaaatgacgatggaaggataaggaagcaatttgagagtagttcctccaagtcgcttgatgctaaattaaatgtaattaactcctaccccagtatgaatgacagaaaggttcctgttaccgtctttaatgatactaagaggaaaccttcacctcaagaatatggaattggaggccatataaaccaggaagggtttcccaggaaggcagcagggtatgagtttgatgataataggcctcagcaaaatattccagacagtcagcatttgccaaggatttataatacagattttgagaatttaatatatccagatagttcaggaaaaacaagcaaaagggaaactaggatgacacatggtggaatgctagagtatgctgatatccagaagaagaaaacaacctcaaggcttccacagaatggtactaataatgtcagagtgtctcgaatgcagaaatcaatatccccatcagataatgatgaaagaagtaggaacgactctttgattgagacaaagacaggtaggaagagaaggggcagttcttcagatgatgataatttgtttttctccaagtatgataaagatgctccggagcttaaagatccaataaaagatttctcacaatacaaggattatgtgcaggagtacaatgagaagtatggggtttattcttatttgaatagtcagatagacaaaactatgtcagaatttttaaagattcaggatgatctcaatgttggaaaagaaagaggcaaggaacagtattataacaccttagaaagactcagagacatgtatcatgaatcaggaacaagacataaattgatgaagaaggtcttcgttttgcttcatgaggaactgcaggtgtgtttactatagtagtttaccatagttatctgatttctgatttccttggttgttaccccagattattaaggaaagaatcaacgattttacggacgcctattcaaatgagtagctgttttactctcataacatgtgactgcttcttgtcaaggctgataatatctgggcatcagcattatgctttgcctttgtagaaatttacttggcttggaaatattcagtcgaaggcacgtatcacaggaaacctgagagacttagggtgtgtttggttgaatgtacatgaagggatggaaaaaggtggccacagatttaatagtgtttggatgagagtcgcgtaggggcgaggtgaacaccggagtagttttaggtggcggcgtgttgccctgcctcatcccactttgtcctcaaaccaaatcagcgtgatgaatttgatagtaatcacggtgaagtggaatcaaagacagttcaaatatcaatggcgtcgctggatacctgcgcggttccgcacaggagagcagaagaaatgattcattactcagggaagaggtgaggttatctctgaggaaacgagtaggccttacatcagcagttttgcagctagtttggcactgtgaccgggcggttctctttgtagatgttctgtgtttttttaaccccctgtgaagggcgagatctctcctctcttggcatttgtacatcgctttgtattagtgtgatccatgtcaaactgaaataaattgctaactgtgtacatatctgtagagccgatagagaagaagttttggagggagagaaaagtctgggacatttttttttgtcgcaaacacccacacaccaattcctaaatcttgcaactggtaacgaagatattggttcgatttttcttcttttacgtcattgacctctttatgtctatgaaactgcgacccatttctcgtctcttgcgaattacgatgtcttcggttggtggtgatgctcctttctatccagcgctcggctttgacgacacctcatgctcttttctatcctgcaatcggctttgacgacccttccctcgggccttcttggaactgatgatgacc

SEQ ID NO: 84699 - DNA, 5071 bp, Zea Mays
atgtacaagctccgcggccgtggcggcgggcgcggcggcagcggcgtagcaaagcgaccgatgccctccaacgcccgcggccgtggcgttgcctcctctatcggcgggatggccgggcctcctcgcagtcgcgccgccgccgccgccttgaaacagccggtgggacgcgaggaggcgttctgcctcgagtccagcgggctgcctgcctttgcggctataatacggctgacgcccgacctcgtcgacgagatacggcggacggaggaggccggtggaggcgcccgcatcaagttcaaccctaacatgtacaactcatcggagaacgttatagatgttagtggtaaagaattcaaattcacctgggcatctgaacgaggcgaattgtgtgatatttatgaagaacgtcggagtggagaggatggaaatgggttgcttctggagtgtggctctgcttggcgcaaggtgaatgtgcaacgcattttggatgaatcaacaaagaaccttgtgaaaatgcgctcagaagaggctgaacgtctctcaaaatctcgaaaatcaatcgtgctggaccctgccaatccatctgtcaagagtcaggccaagtcaatggctgctgcagctgtagaaggtaatccacggaggatgcactggaagcagaagagcgaatttcttaagaagaataaagctgctgttatcaccccaaccaaatcagttttgaaggtgaagttatctaacaacatccccaaagggaatatctcaagttcacctgcaccttctcctgaacaacctggagaaagcaatccttcgtttcctgttggatcagatgcaaataatgaagtcataacaccttttgattttaacaaagaggaaaacagtaaatatgagaaatcagttagaaataagatgtctaacaaagatataaatcgccgagcaagttctcatgctgcaaatgtggatgataatacaaatgaagtgcgaagctacttgatatccgtgctctcaaaaaatccaaaaggaatgggcctaaaggtaaatctctctatctctctgagcatgggtaacatgatattaatcaagtccatgtgcaaatggtaaaaatactcaggaaccttgtgcactcctttgtaaagactcataccttattagttattaatgttgaaggtgttgggacttacatttctgcagagtttgttgccttttcttttgactgtcaaacccatttgcatcttggtgcttttatcaagtggtattgtatttgtatctctattttgtggtttgatgatttctcttttaccttttgaacatagtgcatagtaacatttttttgttcatacacatgaaatgtttcttgtttgttacgtaacaccattttttttgttttaccatactctgtagatgcttatggacgtcatattccattattctagtattccacaaatatttgtctgattttgttttcacatgttatgaatcatatgcaggccttggagaaagctgttgcagatgcatttccaaatgcatcaaagaaaatacagagcatcatcaagaatattgcaaattaccaaggacctgagaggtatgttctgaaatcagggttggaggtagaaagctcaaaaagtcatgtatctgaaggagtaagatccatcagtaagaaaattgaggaatcggctccaagcctgacgattgatgatcctgatatatgtgagaggattgacattgtgggctccctagttgctccaactgatggaaaactcagtaatgacagtgaaggtaaggctggaacttccagtgacagtggaagcgatagcgatagtgacagcagtaacagtggaagtgatagtgggagccaaagcagaagtgctgcagaaactggtagtggaagcagcagcaatagtgacagtgatggctcatcaagcagcaaggaaggatctgatgcagctgttgatattacgagtgatgatgacaaagcaaatatagcacacacaaaagtagtggatgaccttaatttgtcttcatcgccaagagatttgaaaagactcgatgttgatgatgaacaaattgacattgaaacaaatcttgactacaggagtacatcacctcatattggtctgaataagtttaataccggtaatgatgatgcagcagcagagggctttagtgccggcaaccttagtaagccatctgaaatgtcaggaagcaagaacatgacgagcaccagaatggattctattggagttgataccaaatataatgaaatgtcttttctggacaacctttttgatgactccatgagaatagccagtgaaaactcacccaagggggaagctggtcaattgacagtgcagcatgtcaacaagagaaaatcaacatcaaaggatgaatcaaaatttggcccagtgagtattgctaaacctaaattaaaaaggtcttctggcagcgagaactctacagcaaagcctgagagtgctaaaaaggtcaaagctgacatagcatcgtcaataggttctttatcagagcacaaaagaagtttaccacctgaaaaatatagcaatgataggtttaacaaggggacatgggatgttagccgccatgcttcacaagatagcagtcctgccatgaaaggaagacctttggctcctggaaatttacagaggatagatcagagcccaaatttacctgtcccaacaatgcactctgagagaacaaaagaaaatactgtgaaatcaagtttgaagaaaaaatcagataagtcgcagaaaccatggcatggtatggatggtgactttgggccaggttattcacatggtgtagatcaccacgctaattttgatggctctgatgatttttccacaagaaaaaggagtagacatgggaatcttcttattgatgataaaatgtttaagcgttcgaaggacgctaatgccaatgtagattccatgaatttaaccaaaagttccagagaaactgttgtgcctgatgaaataactgcttttcctgaatctaatgaatgtaatggtgagcagtcaaattctcaaagagataatgttgagagatcaccttacggtaaaaaaaagctccagagggagttttctgatcttgagttggctgaacttcgcaagacttctttggaaaatgacgatggaaggataaggaagcaatttgagagtagttcctccaagtcgcttgatgctaaattaaatgtaattaactcctaccccagtatgaatgacagaaaggttcctgttaccgtctttaatgatactaagaggaaaccttcacctcaagaatatggaattggaggccatataaaccaggaagggtttcccaggaaggcagcagggtatgagtttgatgataataggcctcagcaaaatattccagacagtcagcatttgccaaggatttataatacagattttgagaatttaatatatccagatagttcaggaaaaacaagcaaaagggaaactaggatgacacatggtggaatgctagagtatgctgatatccagaagaagaaaacaacctcaaggcttccacagaatggtactaataatgtcagagtgtctcgaatgcagaaatcaatatccccatcagataatgatgaaagaagtaggaacgactctttgattgagacaaagacaggtaggaagagaaggggcagttcttcagatgatgataatttgtttttctccaagtatgataaagatgctccggagcttaaagatccaataaaagatttctcacaatacaaggattatgtgcaggagtacaatgagaagtatggggtttattcttatttgaatagtcagatagacaaaactatgtcagaatttttaaagattcaggatgatctcaatgttggaaaagaaagaggcaaggaacagtattataacaccttagaaagactcagagacatgtatcatgaatcaggaacaagacataaattgatgaagaaggtcttcgttttgcttcatgaggaactgcaggtgtgtttactatagtagtttaccatagttatctgatttctgatttccttggttgttaccccagattattaaggaaagaatcaacgattttacggacgcctattcaaatgagtagctgttttactctcataacatgtgactgcttcttgtcaaggctgataatatctgggcatcagcattatgctttgcctttgtagaaatttacttggcttggaaatattcagtcgaaggcacgtatcacaggaaacctgagagacttagggtgtgtttggttgaatgtacatgaagggatggaaaaaggtggccacagatttaatagtgtttggatgagagtcgcgtaggggcgaggtgaacaccggagtagttttaggtggcggcgtgttgccctgcctcatcccactttgtcctcaaaccaaatcagcgtgatgaatttgatagtaatcacggtgaagtggaatcaaagacagttcaaatatcaatggcgtcgctggatacctgcgcggttccgcacaggagagcagaagaaatgattcattactcagggaagaggtgaggttatctctgaggaaacgagtaggccttacatcagcagttttgcagctagtttggcactgtgaccgggcggttctctttgtagatgttctgtgtttttttaaccccctgtgaagggcgagatctctcctctcttggcatttgtacatcgctttgtattagtgtgatccatgtcaaactgaaataaattgctaactgtgtacatatctgtagagccgatagagaagaagttttggagggagagaaaagtctgggacatttttttttgtcgcaaacacccacacaccaattcctaaatcttgcaactggtaacgaagatattggttcgatttttcttcttttacgtcattgacctctttatgtctatgaaactgcgacccatttctcgtctcttgcgaattacgatgtcttcggttggtggtgatgctcctttctatccagcgctcggctttgacgacacctcatgctcttttctatcctgcaatcggctttgacgacccttccctcgggccttcttggaactgatgatgacc

SEQ ID NO: 84700 - DNA, 4388 bp, Zea Mays
atgtacaagctccgcggccgtggcggcgggcgcggcggcagcggcgtagcaaagcgaccgatgccctccaacgcccgcggccgtggcgttgcctcctctatcggcgggatggccgggcctcctcgcagtcgcgccgccgccgccgccttgaaacagccggtgggacgcgaggaggcgttctgcctcgagtccagcgggctgcctgcctttgcggctataatacggctgacgcccgacctcgtcgacgagatacggcggacggaggaggccggtggaggcgcccgcatcaagttcaaccctaacatgtacaactcatcggagaacgttatagatgttagtggtaaagaattcaaattcacctgggcatctgaacgaggcgaattgtgtgatatttatgaagaacgtcggagtggagaggatggaaatgggttgcttctggagtgtggctctgcttggcgcaagatcaatcgtgctggaccctgccaatccatctgtcaagagtcaggccaagtcaatggctgctgcagctgtagaaggtaatccacggaggatgcactggaagcagaagagcgaatttcttaagaagaataaagctgctgttatcaccccaaccaaatcagttttgaaggtgaagttatctaacaacatccccaaagggaatatctcaagttcacctgcaccttctcctgaacaacctggagaaagcaatccttcgtttcctgttggatcagatgcaaataatgaagtcataacaccttttgattttaacaaagaggaaaacagtaaatatgagaaatcagttagaaataagatgtctaacaaagatataaatcgccgagcaagttctcatgctgcaaatgtggatgataatacaaatgaagtgcgaagctacttgatatccgtgctctcaaaaaatccaaaaggaatgggcctaaaggccttggagaaagctgttgcagatgcatttccaaatgcatcaaagaaaatacagagcatcatcaagaatattgcaaattaccaaggacctgagaggtatgttctgaaatcagggttggaggtagaaagctcaaaaagtcatgtatctgaaggagtaagatccatcagtaagaaaattgaggaatcggctccaagcctgacgattgatgatcctgatatatgtgagaggattgacattgtgggctccctagttgctccaactgatggaaaactcagtaatgacagtgaaggtaaggctggaacttccagtgacagtggaagcgatagcgatagtgacagcagtaacagtggaagtgatagtgggagccaaagcagaagtgctgcagaaactggtagtggaagcagcagcaatagtgacagtgatggctcatcaagcagcaaggaaggatctgatgcagctgttgatattacgagtgatgatgacaaagcaaatatagcacacacaaaagtagtggatgaccttaatttgtcttcatcgccaagagatttgaaaagactcgatgttgatgatgaacaaattgacattgaaacaaatcttgactacaggagtacatcacctcatattggtctgaataagtttaataccggtaatgatgatgcagcagcagagggctttagtgccggcaaccttagtaagccatctgaaatgtcaggaagcaagaacatgacgagcaccagaatggattctattggagttgataccaaatataatgaaatgtcttttctggacaacctttttgatgactccatgagaatagccagtgaaaactcacccaagggggaagctggtcaattgacagtgcagcatgtcaacaagagaaaatcaacatcaaaggatgaatcaaaatttggcccagtgagtattgctaaacctaaattaaaaaggtcttctggcagcgagaactctacagcaaagcctgagagtgctaaaaaggtcaaagctgacatagcatcgtcaataggttctttatcagagcacaaaagaagtttaccacctgaaaaatatagcaatgataggtttaacaaggggacatgggatgttagccgccatgcttcacaagatagcagtcctgccatgaaaggaagacctttggctcctggaaatttacagaggatagatcagagcccaaatttacctgtcccaacaatgcactctgagagaacaaaagaaaatactgtgaaatcaagtttgaagaaaaaatcagataagtcgcagaaaccatggcatggtatggatggtgactttgggccaggttattcacatggtgtagatcaccacgctaattttgatggctctgatgatttttccacaagaaaaaggagtagacatgggaatcttcttattgatgataaaatgtttaagcgttcgaaggacgctaatgccaatgtagattccatgaatttaaccaaaagttccagagaaactgttgtgcctgatgaaataactgcttttcctgaatctaatgaatgtaatggtgagcagtcaaattctcaaagagataatgttgagagatcaccttacggtaaaaaaaagctccagagggagttttctgatcttgagttggctgaacttcgcaagacttctttggaaaatgacgatggaaggataaggaagcaatttgagagtagttcctccaagtcgcttgatgctaaattaaatgtaattaactcctaccccagtatgaatgacagaaaggttcctgttaccgtctttaatgatactaagaggaaaccttcacctcaagaatatggaattggaggccatataaaccaggaagggtttcccaggaaggcagcagggtatgagtttgatgataataggcctcagcaaaatattccagacagtcagcatttgccaaggatttataatacagattttgagaatttaatatatccagatagttcaggaaaaacaagcaaaagggaaactaggatgacacatggtggaatgctagagtatgctgatatccagaagaagaaaacaacctcaaggcttccacagaatggtactaataatgtcagagtgtctcgaatgcagaaatcaatatccccatcagataatgatgaaagaagtaggaacgactctttgattgagacaaagacaggtaggaagagaaggggcagttcttcagatgatgataatttgtttttctccaagtatgataaagatgctccggagcttaaagatccaataaaagatttctcacagtcagaatttttaaagattcaggatgatctcaatgttggaaaagaaagaggcaaggaacagtattataacaccttagaaagactcagagacatgtatcatgaatcaggaacaagacataaattgatgaagaaggtcttcgttttgcttcatgaggaactgcagattattaaggaaagaatcaacgattttacggacgcctattcaaatgagtagctgttttactctcataacatgtgactgcttcttgtcaaggctgataatatctgggcatcagcattatgctttgcctttgtagaaatttacttggcttggaaatattcagtcgaaggcacgtatcacaggaaacctgagagacttagggtgtgtttggttgaatgtacatgaagggatggaaaaaggtggccacagatttaatagtgtttggatgagagtcgcgtaggggcgaggtgaacaccggagtagttttaggtggcggcgtgttgccctgcctcatcccactttgtcctcaaaccaaatcagcgtgatgaatttgatagtaatcacggtgaagtggaatcaaagacagttcaaatatcaatggcgtcgctggatacctgcgcggttccgcacaggagagcagaagaaatgattcattactcagggaagaggtgaggttatctctgaggaaacgagtaggccttacatcagcagttttgcagctagtttggcactgtgaccgggcggttctctttgtagatgttctgtgtttttttaaccccctgtgaagggcgagatctctcctctcttggcatttgtacatcgctttgtattagtgtgatccatgtcaaactgaaataaattgctaactgtgtacatatctgtagagccgatagagaagaagttttggagggagagaaaagtctgggacatttttttttgtcgcaaacacccacacaccaattcctaaatcttgcaactggtaacgaagatattggttcgatttttcttcttttacgtcattgacctctttatgtctatgaaactgcgacccatttctcgtctcttgcgaattacgatgtcttcggttggtggtgatgctcctttctatccagcgctcggctttgacgacacctcatgctcttttctatcctgcaatcggctttgacgacccttccctcgggccttcttggaactgatgatgacc

SEQ ID NO: 84701 - DNA, 4528 bp, Zea Mays
cccccccccagcgagcccctgtacgaccaaccctcccgccgcgccgccgctcgccgcgggccatgtacaagctccgcggccgtggcggcgggcgcggcggcagcggcgtagcaaagcgaccgatgccctccaacgcccgcggccgtggcgttgcctcctctatcggcgggatggccgggcctcctcgcagtcgcgccgccgccgccgccttgaaacagccggtgggacgcgaggaggcgttctgcctcgagtccagcgggctgcctgcctttgcggctataatacggctgacgcccgacctcgtcgacgagatacggcggacggaggaggccggtggaggcgcccgcatcaagttcaaccctaacatgtacaactcatcggagaacgttatagatgttagtggtaaagaattcaaattcacctgggcatctgaacgaggcgaattgtgtgatatttatgaagaacgtcggagtggagaggatggaaatgggttgcttctggagtgtggctctgcttggcgcaagatcaatcgtgctggaccctgccaatccatctgtcaagagtcaggccaagtcaatggctgctgcagctgtagaaggtaatccacggaggatgcactggaagcagaagagcgaatttcttaagaagaataaagctgctgttatcaccccaaccaaatcagttttgaaggtgaagttatctaacaacatccccaaagggaatatctcaagttcacctgcaccttctcctgaacaacctggagaaagcaatccttcgtttcctgttggatcagatgcaaataatgaagtcataacaccttttgattttaacaaagaggaaaacagtaaatatgagaaatcagttagaaataagatgtctaacaaagatataaatcgccgagcaagttctcatgctgcaaatgtggatgataatacaaatgaagtgcgaagctacttgatatccgtgctctcaaaaaatccaaaaggaatgggcctaaaggccttggagaaagctgttgcagatgcatttccaaatgcatcaaagaaaatacagagcatcatcaagaatattgcaaattaccaaggacctgagaggtatgttctgaaatcagggttggaggtagaaagctcaaaaagtcatgtatctgaaggagtaagatccatcagtaagaaaattgaggaatcggctccaagcctgacgattgatgatcctgatatatgtgagaggattgacattgtgggctccctagttgctccaactgatggaaaactcagtaatgacagtgaaggtaaggctggaacttccagtgacagtggaagcgatagcgatagtgacagcagtaacagtggaagtgatagtgggagccaaagcagaagtgctgcagaaactggtagtggaagcagcagcaatagtgacagtgatggctcatcaagcagcaaggaaggatctgatgcagctgttgatattacgagtgatgatgacaaagcaaatatagcacacacaaaagtagtggatgaccttaatttgtcttcatcgccaagagatttgaaaagactcgatgttgatgatgaacaaattgacattgaaacaaatcttgactacaggagtacatcacctcatattggtctgaataagtttaataccggtaatgatgatgcagcagcagagggctttagtgccggcaaccttagtaagccatctgaaatgtcaggaagcaagaacatgacgagcaccagaatggattctattggagttgataccaaatataatgaaatgtcttttctggacaacctttttgatgactccatgagaatagccagtgaaaactcacccaagggggaagctggtcaattgacagtgcagcatgtcaacaagagaaaatcaacatcaaaggatgaatcaaaatttggcccagtgagtattgctaaacctaaattaaaaaggtcttctggcagcgagaactctacagcaaagcctgagagtgctaaaaaggtcaaagctgacatagcatcgtcaataggttctttatcagagcacaaaagaagtttaccacctgaaaaatatagcaatgataggtttaacaaggggacatgggatgttagccgccatgcttcacaagatagcagtcctgccatgaaaggaagacctttggctcctggaaatttacagaggatagatcagagcccaaatttacctgtcccaacaatgcactctgagagaacaaaagaaaatactgtgaaatcaagtttgaagaaaaaatcagataagtcgcagaaaccatggcatggtatggatggtgactttgggccaggttattcacatggtgtagatcaccacgctaattttgatggctctgatgatttttccacaagaaaaaggagtagacatgggaatcttcttattgatgataaaatgtttaagcgttcgaaggacgctaatgccaatgtagattccatgaatttaaccaaaagttccagagaaactgttgtgcctgatgaaataactgcttttcctgaatctaatgaatgtaatggtgagcagtcaaattctcaaagagataatgttgagagatcaccttacggtaaaaaaaagctccagagggagttttctgatcttgagttggctgaacttcgcaagacttctttggaaaatgacgatggaaggataaggaagcaatttgagagtagttcctccaagtcgcttgatgctaaattaaatgtaattaactcctaccccagtatgaatgacagaaaggttcctgttaccgtctttaatgatactaagaggaaaccttcacctcaagaatatggaattggaggccatataaaccaggaagggtttcccaggaaggcagcagggtatgagtttgatgataataggcctcagcaaaatattccagacagtcagcatttgccaaggatttataatacagattttgagaatttaatatatccagatagttcaggaaaaacaagcaaaagggaaactaggatgacacatggtggaatgctagagtatgctgatatccagaagaagaaaacaacctcaaggcttccacagaatggtactaataatgtcagagtgtctcgaatgcagaaatcaatatccccatcagataatgatgaaagaagtaggaacgactctttgattgagacaaagacaggtaggaagagaaggggcagttcttcagatgatgataatttgtttttctccaagtatgataaagatgctccggagcttaaagatccaataaaagatttctcacaatacaaggattatgtgcaggagtacaatgagaagtatggggtttattcttatttgaatagtcagatagacaaaactatgtcagaatttttaaagattcaggatgatctcaatgttggaaaagaaagaggcaaggaacagtattataacaccttagaaagactcagagacatgtatcatgaatcaggaacaagacataaattgatgaagaaggtcttcgttttgcttcatgaggaactgcagattattaaggaaagaatcaacgattttacggacgcctattcaaatgagtagctgttttactctcataacatgtgactgcttcttgtcaaggctgataatatctgggcatcagcattatgctttgcctttgtagaaatttacttggcttggaaatattcagtcgaaggcacgtatcacaggaaacctgagagacttagggtgtgtttggttgaatgtacatgaagggatggaaaaaggtggccacagatttaatagtgtttggatgagagtcgcgtaggggcgaggtgaacaccggagtagttttaggtggcggcgtgttgccctgcctcatcccactttgtcctcaaaccaaatcagcgtgatgaatttgatagtaatcacggtgaagtggaatcaaagacagttcaaatatcaatggcgtcgctggatacctgcgcggttccgcacaggagagcagaagaaatgattcattactcagggaagaggtgaggttatctctgaggaaacgagtaggccttacatcagcagttttgcagctagtttggcactgtgaccgggcggttctctttgtagatgttctgtgtttttttaaccccctgtgaagggcgagatctctcctctcttggcatttgtacatcgctttgtattagtgtgatccatgtcaaactgaaataaattgctaactgtgtacatatctgtagagccgatagagaagaagttttggagggagagaaaagtctgggacatttttttttgtcgcaaacacccacacaccaattcctaaatcttgcaactggtaacgaagatattggttcgatttttcttcttttacgtcattgacctctttatgtctatgaaactgcgacccatttctcgtctcttgcgaattacgatgtcttcggttggtggtgatgctcctttctatccagcgctcggctttgacgacacctcatgctcttttctatcctgcaatcggctttgacgacccttccctcgggccttcttggaactgatgatgacc

SEQ ID NO: 84702 - DNA, 3558 bp, Zea Mays
atgtacaagctccgcggccgtggcggcgggcgcggcggcagcggcgtagcaaagcgaccgatgccctccaacgcccgcggccgtggcgttgcctcctctatcggcgggatggccgggcctcctcgcagtcgcgccgccgccgccgccttgaaacagccggtgggacgcgaggaggcgttctgcctcgagtccagcgggctgcctgcctttgcggctataatacggctgacgcccgacctcgtcgacgagatacggcggacggaggaggccggtggaggcgcccgcatcaagttcaaccctaacatgtacaactcatcggagaacgttatagatgttagtggtaaagaattcaaattcacctgggcatctgaacgaggcgaattgtgtgatatttatgaagaacgtcggagtggagaggatggaaatgggttgcttctggagtgtggctctgcttggcgcaaggtgaatgtgcaacgcattttggatgaatcaacaaagaaccttgtgaaaatgcgctcagaagaggctgaacgtctctcaaaatctcgaaaatcaatcgtgctggaccctgccaatccatctgtcaagagtcaggccaagtcaatggctgctgcagctgtagaaggtaatccacggaggatgcactggaagcagaagagcgaatttcttaagaagaataaagctgctgttatcaccccaaccaaatcagttttgaaggtgaagttatctaacaacatccccaaagggaatatctcaagttcacctgcaccttctcctgaacaacctggagaaagcaatccttcgtttcctgttggatcagatgcaaataatgaagtcataacaccttttgattttaacaaagaggaaaacagtaaatatgagaaatcagttagaaataagatgtctaacaaagatataaatcgccgagcaagttctcatgctgcaaatgtggatgataatacaaatgaagtgcgaagctacttgatatccgtgctctcaaaaaatccaaaaggaatgggcctaaaggccttggagaaagctgttgcagatgcatttccaaatgcatcaaagaaaatacagagcatcatcaagaatattgcaaattaccaaggacctgagaggtatgttctgaaatcagggttggaggtagaaagctcaaaaagtcatgtatctgaaggagtaagatccatcagtaagaaaattgaggaatcggctccaagcctgacgattgatgatcctgatatatgtgagaggattgacattgtgggctccctagttgctccaactgatggaaaactcagtaatgacagtgaaggtaaggctggaacttccagtgacagtggaagcgatagcgatagtgacagcagtaacagtggaagtgatagtgggagccaaagcagaagtgctgcagaaactggtagtggaagcagcagcaatagtgacagtgatggctcatcaagcagcaaggaaggatctgatgcagctgttgatattacgagtgatgatgacaaagcaaatatagcacacacaaaagtagtggatgaccttaatttgtcttcatcgccaagagatttgaaaagactcgatgttgatgatgaacaaattgacattgaaacaaatcttgactacaggagtacatcacctcatattggtctgaataagtttaataccggtaatgatgatgcagcagcagagggctttagtgccggcaaccttagtaagccatctgaaatgtcaggaagcaagaacatgacgagcaccagaatggattctattggagttgataccaaatataatgaaatgtcttttctggacaacctttttgatgactccatgagaatagccagtgaaaactcacccaagggggaagctggtcaattgacagtgcagcatgtcaacaagagaaaatcaacatcaaaggatgaatcaaaatttggcccagtgagtattgctaaacctaaattaaaaaggtcttctggcagcgagaactctacagcaaagcctgagagtgctaaaaaggtcaaagctgacatagcatcgtcaataggttctttatcagagcacaaaagaagtttaccacctgaaaaatatagcaatgataggtttaacaaggggacatgggatgttagccgccatgcttcacaagatagcagtcctgccatgaaaggaagacctttggctcctggaaatttacagaggatagatcagagcccaaatttacctgtcccaacaatgcactctgagagaacaaaagaaaatactgtgaaatcaagtttgaagaaaaaatcagataagtcgcagaaaccatggcatggtatggatggtgactttgggccaggttattcacatggtgtagatcaccacgctaattttgatggctctgatgatttttccacaagaaaaaggagtagacatgggaatcttcttattgatgataaaatgtttaagcgttcgaaggacgctaatgccaatgtagattccatgaatttaaccaaaagttccagagaaactgttgtgcctgatgaaataactgcttttcctgaatctaatgaatgtaatggtgagcagtcaaattctcaaagagataatgttgagagatcaccttacggtaaaaaaaagctccagagggagttttctgatcttgagttggctgaacttcgcaagacttctttggaaaatgacgatggaaggataaggaagcaatttgagagtagttcctccaagtcgcttgatgctaaattaaatgtaattaactcctaccccagtatgaatgacagaaaggttcctgttaccgtctttaatgatactaagaggaaaccttcacctcaagaatatggaattggaggccatataaaccaggaagggtttcccaggaaggcagcagggtatgagtttgatgataataggcctcagcaaaatattccagacagtcagcatttgccaaggatttataatacagattttgagaatttaatatatccagatagttcaggaaaaacaagcaaaagggaaactaggatgacacatggtggaatgctagagtatgctgatatccagaagaagaaaacaacctcaaggcttccacagaatggtactaataatgtcagagtgtctcgaatgcagaaatcaatatccccatcagataatgatgaaagaagtaggaacgactctttgattgagacaaagacaggtaggaagagaaggggcagttcttcagatgatgataatttgtttttctccaagtatgataaagatgctccggagcttaaagatccaataaaagatttctcacaatacaaggattatgtgcaggagtacaatgagaagtatggggtttattcttatttgaatagtcagatagacaaaactatgtcagaatttttaaagattcaggatgatctcaatgttggaaaagaaagaggcaaggaacagtattataacaccttagaaagactcagagacatgtatcatgaatcaggaacaagacataaattgatgaagaaggtcttcgttttgcttcatgaggaactgcagaacaacagccaactgaggtctgac

SEQ ID NO: 84703 - DNA, 3330 bp, Zea Mays
atgtacaagctccgcggccgtggcggcgggcgcggcggcagcggcgtagcaaagcgaccgatgccctccaacgcccgcggccgtggcgttgcctcctctatcggcgggatggccgggcctcctcgcagtcgcgccgccgccgccgccttgaaacagccggtgggacgcgaggaggcgttctgcctcgagtccagcgggctgcctgcctttgcggctataatacggctgacgcccgacctcgtcgacgagatacggcggacggaggaggccggtggaggcgcccgcatcaagttcaaccctaacatgtacaactcatcggagaacgttatagatgttagtggtaaagaattcaaattcacctgggcatctgaacgaggcgaattgtgtgatatttatgaagaacgtcggagtggagaggatggaaatgggttgcttctggagtgtggctctgcttggcgcaaggtgaatgtgcaacgcattttggatgaatcaacaaagaaccttgtgaaaatgcgctcagaagaggctgaacgtctctcaaaatctcgaaaatcaatcgtgctggaccctgccaatccatctgtcaagagtcaggccaagtcaatggctgctgcagctgtagaaggtaatccacggaggatgcactggaagcagaagagcgaatttcttaagaagaataaagctgctgttatcaccccaaccaaatcagttttgaaggtgaagttatctaacaacatccccaaagggaatatctcaagttcacctgcaccttctcctgaacaacctggagaaagcaatccttcgtttcctgttggatcagatgcaaataatgaagtcataacaccttttgattttaacaaagaggaaaacagtaaatatgagaaatcagttagaaataagatgtctaacaaagatataaatcgccgagcaagttctcatgctgcaaatgtggatgataatacaaatgaagtgcgaagctacttgatatccgtgctctcaaaaaatccaaaaggaatgggcctaaaggccttggagaaagctgttgcagatgcatttccaaatgcatcaaagaaaatacagagcatcatcaagaatattgcaaattaccaaggacctgagaggtatgttctgaaatcagggttggaggtagaaagctcaaaaagtcatgtatctgaaggagtaagatccatcagtaagaaaattgaggaatcggctccaagcctgacgattgatgatcctgatatatgtgagaggattgacattgtgggctccctagttgctccaactgatggaaaactcagtaatgacagtgaaggtaaggctggaacttccagtgacagtggaagcgatagcgatagtgacagcagtaacagtggaagtgatagtgggagccaaagcagaagtgctgcagaaactggtagtggaagcagcagcaatagtgacagtgatggctcatcaagcagcaaggaaggatctgatgcagctgttgatattacgagtgatgatgacaaagcaaatatagcacacacaaaagtagtggatgaccttaatttgtcttcatcgccaagagatttgaaaagactcgatgttgatgatgaacaaattgacattgaaacaaatcttgactacaggagtacatcacctcatattggtctgaataagtttaataccggtaatgatgatgcagcagcagagggctttagtgccggcaaccttagtaagccatctgaaatgtcaggaagcaagaacatgacgagcaccagaatggattctattggagttgataccaaatataatgaaatgtcttttctggacaacctttttgatgactccatgagaatagccagtgaaaactcacccaagggggaagctggtcaattgacagtgcagcatgtcaacaagagaaaatcaacatcaaaggatgaatcaaaatttggcccagtgagtattgctaaacctaaattaaaaaggtcttctggcagcgagaactctacagcaaagcctgagagtgctaaaaaggtcaaagctgacatagcatcgtcaataggttctttatcagagcacaaaagaagtttaccacctgaaaaatatagcaatgataggtttaacaaggggacatgggatgttagccgccatgcttcacaagatagcagtcctgccatgaaaggaagacctttggctcctggaaatttacagaggatagatcagagcccaaatttacctgtcccaacaatgcactctgagagaacaaaagaaaatactgtgaaatcaagtttgaagaaaaaatcagataagtcgcagaaaccatggcatggtatggatggtgactttgggccaggttattcacatggtgtagatcaccacgctaattttgatggctctgatgatttttccacaagaaaaaggagtagacatgggaatcttcttattgatgataaaatgtttaagcgttcgaaggacgctaatgccaatgtagattccatgaatttaaccaaaagttccagagaaactgttgtgcctgatgaaataactgcttttcctgaatctaatgaatgtaatggtgagcagtcaaattctcaaagagataatgttgagagatcaccttacggtaaaaaaaagctccagagggagttttctgatcttgagttggctgaacttcgcaagacttctttggaaaatgacgatggaaggataaggaagcaatttgagagtagttcctccaagtcgcttgatgctaaattaaatgtaattaactcctaccccagtatgaatgacagaaaggttcctgttaccgtctttaatgatactaagaggaaaccttcacctcaagaatatggaattggaggccatataaaccaggaagggtttcccaggaaggcagcagggtatgagtttgatgataataggcctcagcaaaatattccagacagtcagcatttgccaaggatttataatacagattttgagaatttaatatatccagatagttcaggaaaaacaagcaaaagggaaactaggatgacacatggtggaatgctagagtatgctgatatccagaagaagaaaacaacctcaaggcttccacagaatggtactaataatgtcagagtgtctcgaatgcagaaatcaatatccccatcagataatgatgaaagaagtaggaacgactctttgattgagacaaagacaggtaggaagagaaggggcagttcttcagatgatgataatttgtttttctccaagtatgataaagatgctccggagcttaaagatccaataaaagatttctcacagcgtcgcctaggcgtctaggtgcccaaaagatccaag

SEQ ID NO: 84704 - DNA, 2802 bp, Zea Mays
atgaagtgtgctagagtaccagaagtggtttcaaaggagatgcacacctatctgagaaggaacatgagggttgtgattactgcggatggtgatgaaggtgaagaggaaggggagcagattgatgtaggccccctaccaagttctgggacaaaaaccaagcaaacaaaaaagcaaattgctcaagcttccatgtcttcatttgttgtagcagctcctataaaaccaaatacacagaaggcaagcaaatcagtgagtgccatgctttgcaagactccagaggaagttgtagcagagagacataaaaatagaacttctcagaccactcttgagcattgcacaaagaaaggaacagaagcaaagcaaattgttgacgaccatgtagctgattttctatatgagaacaagattccattgaatgtcgtcaattcaagaagctggcagattatgatggagtccattggtcagtatggtcctggatatcgtggcccatcatactatgaggcaagggtaccttggcttgaaagggcagtgaagagaacatcaacattgagagctaagcacgaagaggcttggaaggaatatggttgctcaattatgtcagatgggtggactgacatacgacaacggcatttgataaacttccttgccaacagtccagcggggacctacttcttaggttctgtcgatgcatcaagtgagatagcaaatgccaatatgttggcagatctattggagaagcaaataattaaggtggggaaagaacatgtggtacatgtgatcactgacaatggagccaatttcaaagcagcagggaggatccttatggacagaattccccatctgttttggactccttgtgctgcgcattgcttggatttgttgttggaggatattggcaagatcaaggagttcaacacttgcatcaacatggccaagaaggtttcgaggttcctgtacaagcatgggcgacttcacagcctaatgagagaaaagctaggtggggaccttgttaggccaggtgtgactcgatttgcaacatcattcttgactttggcaagcatgtataagcataagagtaaattacaaggcttgtttgttagtgatgaatggaacgggtctaaatttgccctagttaaagaaggtgaacaagctgaaaatattgtcctttcagtatcattttggcaaactcttgaaaattgtcttcgggcttcacaaccactactcattgctctaaggattgctgacggtgatgagacgccaacagctccagagataatggcagctatggacaaagcaaaagctaccatacaagagtctttgaaagagaagccacgattacttgctgaagtaatctcatgctttgagaagaggtgggatactcagatggagcaaaaattatatggggcagccctttatttgaatccaggtaaattctttaccttaagggataaagacaggaggcaagctgcaagacttcgagctatgttcaatgatgttttgtggaaaatgatcagtgatgaggatgagcaaacaaaaataagtaaacaagcagatgactatgaaagatcagaaggggaatgcttttcaaaggctggagcaataagagaaagagagaaaaaaagtcctagttgtgagagaaattggtcagattttgcagcaatccatacaaaaaagaggaaccgactagaacaccagaggcttaataaattggtctatgtcagttacaataggaagatggaaaataggtttcaaacactaagagagctgggatccaaaggaaaaagaagcaacccactcgtgcttgaagagttcatgtgggaaaatgaatgggttgaagaaaatgaagatgatggtgacaacaacatatggcatgctgtggatgaggctttaggagcaactcaggctcttcgaggcagaaacttgccaagaatagctgctgcaggtgctggttcgtcttctcagcctcaacgaacatatgttaggacaaggaagcgttcaagaaatacagcagctcaagatattggagaggaggatagtgatgatcaagaagatggtgttgctgcagcacaagcagaacaaacccaagaagcaactggattggacgaagatggtagcagccagcagtgcacaataattagaaccacacaactggctgctgctcaagaccggcttactgatttggagaggcaaaaggatgatattatgaggtcctattcccctgctgcactactcgacaaactccaaacgtcgatggcaaagctggacgaggagtctgaggagctgcagcagaagttcctggcaaaggacatcgacttcccacacttggtacagaagtacaagaagctccgcacggcttatcacaagcaggcgttgctccatctcgccggccagacataactccactgacatccggcctgcatcatgtcaactttgctgtattcctctgcttggccctgttttattgctgcagcttcctatagggcttgccaaacactttgcacgatttgttggatgataataaagctttcgtatgcttcatgtttcgtggatgctggctctggtgagaggggaattggagggaatccatggagaaattctcttgctattcaaaattgtcccatgatctcctcttattagggtaaattcttcttagggtctgtttgtttccgttcattttgatgaattgtaatttaactaacacagtaggctattttttagaatgtgacatttcacaactttctaaagtgtatatataagcttatctcaaattcatgaggtgaaagatgaaaattaattccatag

SEQ ID NO: 84705 - DNA, 1184 bp, Zea Mays
ccctgtataaccctgcagtccaaaagttctttagttaacaaaagagaattttacctgattgctatatgtgccatttcctgtggatgcatcttaacagttatactggatgtaggatgccatatacgaaattatgccttacaagttctgaaaattttgcttctcttggttactgttatttgctcctttgaatgcactcatagcagttcccagcagcagcaatcagatccaaatttccaggacattcctatgcagtcttggtaccctacctcggttgtaggtttgtcttcatctccagccacacctacctcttctagctccagtccacatcaaagagcttcaaataatctgcagttttcatcccgtgggcaaccatctcctgctgaggctgcagagataattgcccatttgaaggacaagaggtgcgtggcgagcttagaaaggagacattgcaacttgcaagggaaaatttagaaaaggagcagcggattttggagcttgggaatcagtgcacaataattagaaccacacaactggctgctgctcaagaccggcttactgatttggagaggcaaaaggatgatattatgaggtcctattcccctgctgcactactcgacaaactccaaacgtcgatggcaaagctggacgaggagtctgaggagctgcagcagaagttcctggcaaaggacatcgacttcccacacttggtacagaagtacaagaagctccgcacggcttatcacaagcaggcgttgctccatctcgccggccagacataactccactgacatccggcctgcatcatgtcaactttgctgtattcctctgcttggccctgttttattgctgcagcttcctatagggcttgccaaacactttgcacgatttgttggatgataataaagctttcgtatgcttcatgtttcgtggatgctggctctggtgagaggggaattggagggaatccatggagaaattctcttgctattcaaaattgtcccatgatctcctcttattagggtaaattcttcttagggtctgtttgtttccgttcattttgatgaattgtaatttaactaacacagtaggctattttttagaatgtgacatttcacaactttctaaagtgtatatataagcttatctcaaattcatgaggtgaaagatgaaaattaattccatag

SEQ ID NO: 84706 - DNA, 1016 bp, Zea Mays
ctggagatttcctctattcgggtttgtcttcatctccagccacacctacctcttctagctccagtccacatcaaagagcttcaaataatctgcagttttcatcccgtgggcaaccatctcctgctgaggctgcagagataattgcccatttgaaggacaagagtattgaggagttacagaggctattgaaagagaaagaggcatataatgcattctttaacacattcgatcaagtgaaaacccagaacaatgtgcgtggcgagcttagaaaggagacattgcaacttgcaagggaaaatttagaaaaggagcagcggattttggagcttgggaatcagtgcacaataattagaaccacacaactggctgctgctcaagaccggcttactgatttggagaggcaaaaggatgatattatgaggtcctattcccctgctgcactactcgacaaactccaaacgtcgatggcaaagctggacgaggagtctgaggagctgcagcagaagttcctggcaaaggacatcgacttcccacacttggtacagaagtacaagaagctccgcacggcttatcacaagcaggcgttgctccatctcgccggccagacataactccactgacatccggcctgcatcatgtcaactttgctgtattcctctgcttggccctgttttattgctgcagcttcctatagggcttgccaaacactttgcacgatttgttggatgataataaagctttcgtatgcttcatgtttcgtggatgctggctctggtgagaggggaattggagggaatccatggagaaattctcttgctattcaaaattgtcccatgatctcctcttattagggtaaattcttcttagggtctgtttgtttccgttcattttgatgaattgtaatttaactaacacagtaggctattttttagaatgtgacatttcacaactttctaaagtgtatatataagcttatctcaaattcatgaggtgaaagatgaaaattaattccatag

SEQ ID NO: 84707 - DNA, 1623 bp, Zea Mays
cccccacacacacacactcgcgctcgacacgcaggcgacggtggcggcgatcaggcccggtatctcagcacggccgacagtcccaggctcgacggcggcgtcagcggctccccttcccgcctctagccagtggcctcgtgccctcggctccggtcctctgcacaccggccggagaccctgcatttctttatacgatgagctggagatttcctctattcgggtatgttgatcttattgaaaccaatctatgctgatgtcacaatctatgttttatgagccctgacatctcatttatctgtctaattagttaggttttacatattcctaatttgctatatgcatttggtacatgtttcctttggaacctgctagttcaaatacgttgcacaatcacaacactatgatgcccagttttagttttttctccctgtataaccctgcagtccaaaagttctttagttaacaaaagagaattttacctgattgctatatgtgccatttcctgtggatgcatcttaacagttatactggatgtaggatgccatatacgaaattatgccttacaagttctgaaaattttgcttctcttggttactgttatttgctcctttgaatgcactcatagcagttcccagcagcagcaatcagatccaaatttccaggacattcctatgcagtcttggtaccctacctcggttgtagttttcatcccgtgggcaaccatctcctgctgaggctgcagagataattgcccatttgaaggacaagagtattgaggagttacagaggctattgaaagagaaagaggcatataatgcattctttaacacattcgatcaagtgaaaacccagaacaatgtgcgtggcgagcttagaaaggagacattgcaacttgcaagggaaaatttagaaaaggagcagcggattttggagcttgggaatcagtgcacaataattagaaccacacaactggctgctgctcaagaccggcttactgatttggagaggcaaaaggatgatattatgaggtcctattcccctgctgcactactcgacaaactccaaacgtcgatggcaaagctggacgaggagtctgaggagctgcagcagaagttcctggcaaaggacatcgacttcccacacttggtacagaagtacaagaagctccgcacggcttatcacaagcaggcgttgctccatctcgccggccagacataactccactgacatccggcctgcatcatgtcaactttgctgtattcctctgcttggccctgttttattgctgcagcttcctatagggcttgccaaacactttgcacgatttgttggatgataataaagctttcgtatgcttcatgtttcgtggatgctggctctggtgagaggggaattggagggaatccatggagaaattctcttgctattcaaaattgtcccatgatctcctcttattagggtaaattcttcttagggtctgtttgtttccgttcattttgatgaattgtaatttaactaacacagtaggctattttttagaatgtgacatttcacaactttctaaagtgtatatataagcttatctcaaattcatgaggtgaaagatgaaaattaattccatag

SEQ ID NO: 84708 - DNA, 1289 bp, Zea Mays
cccccacacacacacactcgcgctcgacacgcaggcgacggtggcggcgatcaggcccggtatctcagcacggccgacagtcccaggctcgacggcggcgtcagcggctccccttcccgcctctagccagtggcctcgtgccctcggctccggtcctctgcacaccggccggagaccctgcatttctttatacgatgagctggagatttcctctattcggttcccagcagcagcaatcagatccaaatttccaggacattcctatgcagtcttggtaccctacctcggttgtaggtttgtcttcatctccagccacacctacctcttctagctccagtccacatcaaagagcttcaaataatctgcagttttcatcccgtgggcaaccatctcctgctgaggctgcagagataattgcccatttgaaggacaagagtattgaggagttacagaggctattgaaagagaaagaggcatataatgcattctttaacacattcgatcaagtgaaaacccagaacaatgtgcgtggcgagcttagaaaggagacattgcaacttgcaagggaaaatttagaaaaggagcagcggattttggagcttgggaatcagtgcacaataattagaaccacacaactggctgctgctcaagaccggcttactgatttggagaggcaaaaggatgatattatgaggtcctattcccctgctgcactactcgacaaactccaaacgtcgatggcaaagctggacgaggagtctgaggagctgcagcagaagttcctggcaaaggacatcgacttcccacacttggtacagaagtacaagaagctccgcacggcttatcacaagcaggcgttgctccatctcgccggccagacataactccactgacatccggcctgcatcatgtcaactttgctgtattcctctgcttggccctgttttattgctgcagcttcctatagggcttgccaaacactttgcacgatttgttggatgataataaagctttcgtatgcttcatgtttcgtggatgctggctctggtgagaggggaattggagggaatccatggagaaattctcttgctattcaaaattgtcccatgatctcctcttattagggtaaattcttcttagggtctgtttgtttccgttcattttgatgaattgtaatttaactaacacagtaggctattttttagaatgtgacatttcacaactttctaaagtgtatatataagcttatctcaaattcatgaggtgaaagatgaaaattaattccatag

SEQ ID NO: 84709 - DNA, 2486 bp, Zea Mays
atgaagtgtgctagagtaccagaagtggtttcaaaggagatgcacacctatctgagaaggaacatgagggttgtgattactgcggatggtgatgaaggtgaagaggaaggggagcagattgatgtaggccccctaccaagttctgggacaaaaaccaagcaaacaaaaaagcaaattgctcaagcttccatgtcttcatttgttgtagcagctcctataaaaccaaatacacagaaggcaagcaaatcagtgagtgccatgctttgcaagactccagaggaagttgtagcagagagacataaaaatagaacttctcagaccactcttgagcattgcacaaagaaaggaacagaagcaaagcaaattgttgacgaccatgtagctgattttctatatgagaacaagattccattgaatgtcgtcaattcaagaagctggcagattatgatggagtccattggtcagtatggtcctggatatcgtggcccatcatactatgaggcaagggtaccttggcttgaaagggcagtgaagagaacatcaacattgagagctaagcacgaagaggcttggaaggaatatggttgctcaattatgtcagatgggtggactgacatacgacaacggcatttgataaacttccttgccaacagtccagcggggacctacttcttaggttctgtcgatgcatcaagtgagatagcaaatgccaatatgttggcagatctattggagaagcaaataattaaggtggggaaagaacatgtggtacatgtgatcactgacaatggagccaatttcaaagcagcagggaggatccttatggacagaattccccatctgttttggactccttgtgctgcgcattgcttggatttgttgttggaggatattggcaagatcaaggagttcaacacttgcatcaacatggccaagaaggtttcgaggttcctgtacaagcatgggcgacttcacagcctaatgagagaaaagctaggtggggaccttgttaggccaggtgtgactcgatttgcaacatcattcttgactttggcaagcatgtataagcataagagtaaattacaaggcttgtttgttagtgatgaatggaacgggtctaaatttgccctagttaaagaaggtgaacaagctgaaaatattgtcctttcagtatcattttggcaaactcttgaaaattgtcttcgggcttcacaaccactactcattgctctaaggattgctgacggtgatgagacgccaacagctccagagataatggcagctatggacaaagcaaaagctaccatacaagagtctttgaaagagaagccacgattacttgctgaagtaatctcatgctttgagaagaggtgggatactcagatggagcaaaaattatatggggcagccctttatttgaatccaggtaaattctttaccttaagggataaagacaggaggcaagctgcaagacttcgagctatgttcaatgatgttttgtggaaaatgatcagtgatgaggatgagcaaacaaaaataagtaaacaagcagatgactatgaaagatcagaaggggaatgcttttcaaaggctggagcaataagagaaagagagaaaaaaagtcctagttgtgagagaaattggtcagattttgcagcaatccatacaaaaaagaggaaccgactagaacaccagaggcttaataaattggtctatgtcagttacaataggaagatggaaaataggtttcaaacactaagagagctgggatccaaaggaaaaagaagcaacccactcgtgcttgaagagttcatgtgggaaaatgaatgggttgaagaaaatgaagatgatggtgacaacaacatatggcatgctgtggatgaggctttaggagcaactcaggctcttcgaggcagaaacttgccaagaatagctgctgcaggtgctggttcgtcttctcagcctcaacgaacatatgttaggacaaggaagcgttcaagaaatacagcagctcaagatattggagaggaggatagtgatgatcaagaagatggtgttgctgcagcacaagcagaacaaacccaagaagcaactggattggacgaagatggtagcagccagcagtgcacaataattagaaccacacaactggctgctgctcaagaccggcttactgatttggagaggcaaaaggatgatattatgaggtcctattcccctgctgcactactcgacaaactccaaaccatttaccttggcgctgtcagccgcctgtggcccagggagatcgaccctagttactggtgggggcagggcgggccatgggagtgcgtagaacatagttgtcggatatcactgtttgagaggtcacctcgtcgttggagctcctgacgggtcgtccatggccgtcggcggctagattttggctctgtgctgaatgggagttgagcgggatagaggagtcgggcagatctgttcggtggggg

SEQ ID NO: 84710 - DNA, 1109 bp, Zea Mays
ctttggaacctgctagttcaaatacgttgcacaatcacaacactatgatgcccagttttagttttttctccctgtataaccctgcagtccaaaagttctttagttaacaaaagagaattttacctgattgctatatgtgccatttcctgtggatgcatcttaacagttatactggatgtaggatgccatatacgaaattatgccttacaagttctgaaaattttgcttctcttggttactgttatttgctcctttgaatgcactcatagcagttcccagcagcagcaatcagatccaaatttccaggacattcctatgcagtcttggtaccctacctcggttgtaggtttgtcttcatctccagccacacctacctcttctagctccagtccacatcaaagagcttcaaataatctgcagttttcatcccgtgggcaaccatctcctgctgaggctgcagagataattgcccatttgaaggacaagagtattgaggagttacagaggctattgaaagagaaagaggcatataatgcattctttaacacattcgatcaagtgaaaacccagaacaatgtgcgtggcgagcttagaaaggagacattgcaacttgcaagggaaaatttagaaaaggagcagcggattttggagcttgggaatcagtgcacaataattagaaccacacaactggctgctgctcaagaccggcttactgatttggagaggcaaaaggatgatattatgaggtcctattcccctgctgcactactcgacaaactccaaatgtgcagtatcaccaactatcaaactacagctagcctcaattggccaaattataatcctattaattcactaccgcgtattgcagccatttaccttggcgctgtcagccgcctgtggcccagggagatcgaccctagttactggtgggggcagggcgggccatgggagtgcgtagaacatagttgtcggatatcactgtttgagaggtcacctcgtcgttggagctcctgacgggtcgtccatggccgtcggcggctagattttggctctgtgctgaatgggagttgagcgggatagaggagtcgggcagatctgttcggtggggg

SEQ ID NO: 84711 - DNA, 867 bp, Zea Mays
gatgagctggagatttcctctattcggcagttcccagcagcagcaatcagatccaaatttccaggacattcctatgcagtcttggtaccctacctcggttgtaggtttgtcttcatctccagccacacctacctcttctagctccagtccacatcaaagagcttcaaataatctgcagttttcatcccgtgggcaaccatctcctgctgaggctgcagagataattgcccatttgaaggacaagagtattgaggagttacagaggctattgaaagagaaagaggcatataatgcattctttaacacattcgatcaagtgaaaacccagaacaatgtgcgtggcgagcttagaaaggagacattgcaacttgcaagggaaaatttagaaaaggagcagcggattttggagcttgggaatcagtgcacaataattagaaccacacaactggctgctgctcaagaccggcttactgatttggagaggcaaaaggatgatattatgaggtcctattcccctgctgcactactcgacaaactccaaatgtgcagtatcaccaactatcaaactacagctagcctcaattggccaaattataatcctattaattcactaccgcgtattgcagccatttaccttggcgctgtcagccgcctgtggcccagggagatcgaccctagttactggtgggggcagggcgggccatgggagtgcgtagaacatagttgtcggatatcactgtttgagaggtcacctcgtcgttggagctcctgacgggtcgtccatggccgtcggcggctagattttggctctgtgctgaatgggagttgagcgggatagaggagtcgggcagatctgttcggtggggg

SEQ ID NO: 84712 - DNA, 973 bp, Zea Mays
cccccacacacacacactcgcgctcgacacgcaggcgacggtggcggcgatcaggcccggtatctcagcacggccgacagtcccaggctcgacggcggcgtcagcggctccccttcccgcctctagccagtggcctcgtgccctcggctccggtcctctgcacaccggccggagaccctgcatttctttatacgatgagctggagatttcctctattcggttcccagcagcagcaatcagatccaaatttccaggacattcctatgcagtcttggtaccctacctcggttgtaggtttgtcttcatctccagccacacctacctcttctagctccagtccacatcaaagagcttcaaataatctgcagttttcatcccgtgggcaaccatctcctgctgaggctgcagagataattgcccatttgaaggacaagagtattgaggagttacagaggctattgaaagagaaagaggcatataatgcattctttaacacattcgatcaagtgaaaacccagaacaatgtgcgtggcgagcttagaaaggagacattgcaacttgcaagggaaaatttagaaaaggagcagcggattttggagcttgggaatcagtgcacaataattagaaccacacaactggctgctgctcaagaccggcttactgatttggagaggcaaaaggatgatattatgaggtcctattcccctgctgcactactcgacaaactccaaaccatttaccttggcgctgtcagccgcctgtggcccagggagatcgaccctagttactggtgggggcagggcgggccatgggagtgcgtagaacatagttgtcggatatcactgtttgagaggtcacctcgtcgttggagctcctgacgggtcgtccatggccgtcggcggctagattttggctctgtgctgaatgggagttgagcgggatagaggagtcgggcagatctgttcggtggggg

SEQ ID NO: 84713 - DNA, 1061 bp, Zea Mays
cccccacacacacacactcgcgctcgacacgcaggcgacggtggcggcgatcaggcccggtatctcagcacggccgacagtcccaggctcgacggcggcgtcagcggctccccttcccgcctctagccagtggcctcgtgccctcggctccggtcctctgcacaccggccggagaccctgcatttctttatacgatgagctggagatttcctctattcgggtatgttgatcttattgaaaccaatctatgctgatgtcacaatctatgttttatgagccctgacatctcatttatctgtctaattagttaggttttacatattcctaatttgctatatgcatttggtacatgtttcctttggaacctgctagttcaaatacgttgcacaatcacaacactatgatgcccagttttagttttttctccctgtataaccctgcagtccaaaagttctttagttaacaaaagagaattttacctgattgctatatgtgccatttcctgtggatgcatcttaacagttatactggatgtaggatgccatatacgaaattatgccttacaagttctgaaaattttgcttctcttggttactgttatttgctcctttgaatgcactcatagcagttcccagcagcagcaatcagatccaaatttccaggacattcctatgcagtcttggtaccctacctcggttgtaggtttgtcttcatctccagccacacctacctcttctagctccagtccacatcaaagagcttcaaataatctgcagttttcatcccgtgggcaaccatctcctgctgaggctgcagagataattgcccatttgaaggacaagagtattgaggagttacagaggctattgaaagagaaagaggcatataatgcattctttaacacattcgatcaagtgaaaacccagaacaatgtgcgtggcgagcttagaaaggagacattgcaacttgcaagggaaaatttagaaaaggagcagcggattttggagcttgggaatcagcggtcaggcctccaagtgctccagccgtccggcgtctgccag

SEQ ID NO: 84714 - DNA, 4667 bp, Zea Mays
gtccttcctcaactccggcggcgcgtgggtgtgctcctcccttagctccggcggcgtgtgggcgtggagcagctgcgctcacggcggcacgccagcgagctccctcagccctctctttatgatcctatggctgatccgaagtggagagcaaagtccaatgatcccggatggaagtatgggtattggacagaaattgggaaccgagataaggtcacatgcaacctttgcaagaccgtgacaaccggaggaatcaaaaggttgaaagaacaccttgcgggtggttttgcggatacattaatgtgttctaagacaacaacagagattagaaaagaaatgtaagcatatttggacaagaataagagatgcagacctatttttcttgatgaggatgatggtcatgagcagcaggagcagcaggatactacttatgtacatcaacctagcttggggacagccgctaaaaggaagagagctgcatttcaatttagaacagcagctccacaaccatccaacatggaaaaagaaaaaagaaaggttgcaaccatgcttcggagaactcccaaacaagttgtggatgacaggcgttcctcagggtcacaccaaaccaccatagaggctgcactgaagccaaaggctgacagggaatatgtgaatgagcaatgggcactgtggttctatgagtgtggcattatgccatcagttcttgacaatttcaggttgcttgtgaagctactgcacaatatggttccggttatgtgcctcctagtttccatgatttgagggagcctttgcttaattcatgtgtgaagaggacaaacaacatgagagctgagcatgagatagcatggaacaactatggctgcactctaatgtctgatggatggaatgatagaaggggtcgtcagctaatcaacttccttgatcgcagcccagaagcggacaggattctaatggactggattccaacattattttggacaccttgtgctgcacattgtttggatctcatgttggaagatattggcaaattgaaagacttcaagaaacctattgcatatgccaaaagggtgaccacttttatttatagacatggaagaattttaagtgcaatgagggagaagacaagtgggatggatctggtaagaccagcagcaactcgatttgccacatacttccttacattgaagagcttacacaaacattgatatgccttgagagctctcttttcaagtgatgaatggaagaacaacaaattagcgaagacagaggcaggcaagagtgtgtacaacattgttctatctaaggcgttttggactacagttgaagattgccttagagcttcggcgccacttcttattgtgcttagggctgttgatggtgatgaaaaaccagccatgccagaagttgctgcactcatgaatgttgtaatagagaagataaggcttagctttcctacccaaaacaagcagacattgttgaaaaaaatcatggacatcattgagcgccggtgggtgacacaaatggaccatccattatatggagctgcactctatttgaacccgagaaagttttttccatccgaaagaagggggattctagatatgttgcagagctaaggagttgtttcaatgatgtactagcaagaatggagcccgatgaagagattaggtccaagattgatgagtatgacatgcatcatgaagaccaaagaggacctatcttttctaacaagctggcactcgaaaatattcaatcaaaaagccctcttgattggtggtgtgcatatggtggacaggcatttgaactacaaagatttgtgatgcgtgtggttagcctttgtgcttcatcatcgggttgtgaatggatttggagtacatttgaatttatgcatacaaagaagagaaatcggttgttgcgcaagaggttgaatgacttggtcttatctgcctatttcatgggaactcaacccaccaaatggtcatgttggagacacccgctgtgcctgtgcggctgtggtcctttggcaaatccttagagttgaattgtgacggcagttgatatccttagaccttcgggaaagcaaaaagcgataaagagatcgcagatggatattgtgctgtagcactttcagatggtggttcgtgtcagtcgattaatccactcccacatgagaagaattgtatattgtgctccctgaactctatcaggagagctgctgtagcagtcactggacatcgataatctcgaagatactgttgctagtctgtactggtactgcacaggagtgtttgttatctggccatccagtccagcaagctggatgtgtgcgtatgttacatctgtctgcctgaaccaggtggtgtaaaaataggccaagaaagcatcggaatgaataaaagcattgcggattattcaggggcgccgtcggagacggcagataactattgcctgcctagcccgcgcccattcctcttcctgttgcagtgcaggacaaggcggcggcggtgcagatctttctcccttttcttgcgggcggcaaaggagagagactgcgagccaaggaacaggccaacaaatatctgaggcccgatattttctcctgccccagccacgtggaaaagcgccgtcacgtaggcgtaaagctcccgtccagtccagggcccggtcggctcggctgccgatccttcttcaatccctcgcctgcaactggctctctgtccccttctgctccccccacggttccccagagcccgagccaaatctaggggcttccttcatccgagcgtggtttcaattctaggggtagtcacctcacctgaattccgcccaaataaattcgtcgctgccttgtgatccttggggtttccttggttcttgagttgcgatcttctgctggttcgtgtcccccaatccgtaatcaatccggcgtctaggaaaccaattgctgctcagttctcttatttgctcctcgccttccttcctccagcctggttaaaatatcgaaaggggatttttttttaaaaatctgctcatcgaggaagcagggaagacaagaattgttgcatcggataaaggtcgggtgaaaatacaagcaaatcctgggaactcgcgtccctttgctaggtggttctttcctgatacaaagaacacaatgggcgatgtgtccttgaacggacccattaaggctgctgagccaggtgccggtggcattgccaagggcaatcaagttctggacacgatgtccgccgggtggacagacgagagacacaggctgtatataagctctatggaggcctctttcgtcgatcaactgtacaaccacgggagccgtccgcgcaacgcaaacggcaccgccttcaaggctctccgcagggagtacgtcgagtatgagaagaccgatgctcctgtgcgaaggggggctaagtgctgcggcgttcctgcaaatccttggatgcagcatttcaggccacgtagtgatggcggtaataacgcgcgaggcgatgggctcggggattctgtgggcgatcttgaatctggcactgaggcaaaccggaagagcctctcagcgtctcatggaagggaacgggacgcttgtgagggagaaccccagcttctccatgaaagtagaggtgattaacttcatttttatattgcattggtatgctttggtcaactgcctgcccagactcagctgtagttatctgaacatcttaaattagtatccgcaacattgttttcactaagcatcacagcccagctataaaagtgtcctaattagctagctatgcagctagttcttaattcaatgcagttcatccgtgattgtttcccatggcacgtactgagactgcacaactggtgccataaacctcactcatacgttttattagcagtagcatatctatagaagagatatggatgacagaacatctcaattactccaataacttttgtttttgttctgaattcaactagcacggctcagcagctgcaccgtgcagtaaacttgttttctaatgccaattttgtgtcttccctccgtctccagaggtctctgatcaaaattttgctgacgacgaggctgaagctgaaacagaatcaatgaaagcatacaagaaaaggagattaagcaggacaatgatcaactaaatttgcagggtcaattagcttagcctgttgcaggaattgagatgactgtcctaaaaggaggcagtaagatgatgggacatgtcttacgaaattttcagctgttgcctcttggtagccaaggcactttgaatccgaaggaaggtgttgaagggtagttgttagtgatcttgtgatgatataacgagctctggagcagttagcatcggcattttagtggattatgttcttgttatgtgtatctgtctatttttcagtcctcatcggtagtgctgcatagtacctcgctctctcgtcagaaggatattaggctaggtcactgttattaaatttttcaataacagtgaagtgtacatgtgtttgccaaatggtgagaatcattattgatttccaattcacaaactattctttatgcctcactccgtggatgtcgcggacatgtaacatggtcccggaaggaaggtacagcatacgacgtgcttgctgttgaacgatgatctttttaaaaaagaaaaaaaaaa

SEQ ID NO: 84715 - DNA, 8825 bp, Zea Mays
tcagtcggatttggaggagtcgaataaacaaggaaactcctcccggcccaaaaagcacttcacttgcaacagtccccgtcagggagggagcattgctgtgcgggatggcgataaggaagagcggaggcggtggcggggtgggggatgtggcgcggcggctgctgcttctggcctgctgctgcatttggcctggtggacggatcttcactgctgcggacactgaccccaacgatcttaatgtcctcaatacgctcttcaccagtctgaattctcctgggcagctcagagcttggcaggcgaatggcggtgatccttgtggccagtcatggcagggcattacttgctcaggatcaggggtcactaaaatcctattaccaaacttgtcactcaccggaaatctggcctacaacatgaataacttgggttcattagttgagcttgacttgagccaaaataaccttggtggtggaggccaaatacagtacaatcttcccaatgtgaagcttgagaaactcaatcttgcaggaaatcaatttggtggaaatttaccctactcaatttcgacgatgcctaatcttaagtatttaaaccttaatcataaccaactacaaggaaacatcactgatgtattttccaacctttatagtttgtcagagctggatctctcctttaattctcttactggtgatctaccacaaagtttcactggattgtcaagcctgaaaagaatgtatttgcagaacaaccaatttactggttatatcaatgtcttagccaaccttccccttgaaaccctgaatgttggaaacaaccatttcactggttggattcccagtcagcttaagaagataaacaatctacagaccgacggaaattcttggagcacaggaccagcgccacctccacctccatatacagcgcctcctcctccaaaccattggaatggcgcgggtcagaatgatgatggttcatcaagttctggtggaagacctgggataggtggtggaggtgtagcaggaatcattatatcattgctgattgttggatcagttgttgcattttttctaatcaaaagaagaaaacacaaagctattatggaagaacaatttgaacagcatcagccgttcacttccttcccttcaaatgaagttaacgacatgaagcctatctatgagtccaccacagtagacatagagtctttggcttcacctgcttcgattaatctgaaaccacccccgaagatagaacagaacaaatcatttgatgatgatgatgatttttcaaacaagactgctgcaaatagaagtaatataacacctatgaaggcaactgtttattcagttgcagatctacagatggcaacagatagcttcagcttcgataaccttgttggagagggtacttttggacgtgtttacagggcacagttcaatggtggaaaggttctggccatcaagaaattagacattactgtgatgccatttcaatcgtctgatgactttgctgaactggtctcgaacatttcaaaattgcaccatccgaatctgaatgagcttgtaggctattgcatggaacatggccagcacttgcttgtgtatgatttccataggaatggatcgcttcatgatctactccacctttcagatgagtacagcaaggcacttagctggaactctcgcatcaagatcgcactcggctctgcccgtgcactggagtaccttcatgaaatatgttctccatccatcatccataagaatttcaaggcatcaaatattttgctggactcagaattcaatccacacctttcagatactggacttgcaagcttcattcctgatgctgaattccaggcagcagaacaaagtgccggatacactgccccagaagtggacatgaccggtcagtacaccctcaagagtgatgtttacagctttggagttgtcatgcttgagctactgacaggacgtagaccatttgacagctctagacccaggtcagagcagtcacttgtgcggtgggcagcacctcagctgcatgacatcgatgcattggacagaatggtcgatcctgcactcaagggtctatacccagccaaatctctatcccgatttgctgatgtcctcgccctgtgtgtccagcctgaaccagaattcaggccaccaatgtcagaggtggtgcaagcattggttcgacttgtgcagagggccaacatgacgaagaggatgcttgatggaggagatacttctcgtggaccagatgatcaggaccaatatttcatatgacaagctgaactcgagcttttcagctacctctcagattgtatttatctcgtctcgttccactagcgcccggcagagacataatcacacaagtggaagaaacagaactttgtcagcttcgccagtacttggtagcaaatgagttgtgctctatggttgatggttgtattgtgtctaggaaacagtatcttgatcttgcactaatgacattctgttatattctttgggtagattatatgcaaatgccccggataaataaaactatggtgtcaagtttgcggaatgttaaaagaatcaattactccagtcctgctgcataaactgaaacatgttgcatggtggaatagtcatttgtcctatcatctgacgcttgttttcgtccttgaactttcaaaacgactattttaaatggaagtcttttaaaaccaccattcagattccctaagcatgctgctggctgtcagtccgaagaccgaaccaaacggataaatttaactgactagtctttgtatttagttgatatcttcaagcttcttgtacctcaagagtggagtgaaattacttatttcaagaagcttgagaagttggtgggagttcctgttatcaatgtccatatatggtttgttgattaaaatatttggttctgaattgggaacgacttgattcccttgtctggttatgcttgttccttgagacatttctgaagctttgctgagagtttctgttgttttgaatacctcaggtttgacagaaaactgaaaaacacatatggccaccttcttttcagcaggagttcacttttaagtgtctatgcagacatgtcagtaacctgtaaggtactaaggcatcttggttttggataagtttggagggacatcatttgtgggcttctatcttcgtctagcactcaggtgcttctgaatggcattccgggagtacctattgagcataggagaggactcggacaacgggatcctctctcccccatgcctgttattgtagtaatagatgttcttggcctgctgttttctagggctgaacatgcaggactgctcacaggtctccgcaacaacgaacaaaagtctaatgtttatcccattcaatgtgggcatgaggagttggaagtggttcagggcctcctcccatgtgacatctcagctcttccttgtagatacctgagactgtcgttgtccttgaaaaatctcaccaaggatcagttgcagcctattgtggatagaattgttgatcgactcctaggatggaaagcagatttgatgacaagggctggtagaaaagtgcaagtacaatatgtgcttactggaatgcttatatatctcgttatggcgataaatatcccctcttggactatcaaggctattgaaaaaattagaaaatgtttcttagggagggggcgcaaggaggtcaaaggagggaattgcctggttgcttggggcagagtttgtagacctctccagctgggcggtcttggcatttgtagtcttaagaagctcagttgggccctgcgcatgcggtggctatggctccaaaagaccgagcctagcagaccctagtgcagcctaccaatctaggtgccggacaaagcaagggctttcttctcggtggtgttgatttcaaaagttggtaatggggcaaatactttgttttggattgataaatgggttcatggatagaaaattgcaaatctagtacctagattatttgtagtcattccgaaaagaatcactaacagaagaacggtttaggagggcgttgacaaatagaagatggatttcagatatcataggaactctttctgtggtggtcttagtggatcatcttcatctctggaatcagattttagattttgagctattactagatgtggaagataagcatatattcagtattgctgctaatggggcttattcggctaaggctgcatatgaagtgttgttccctaggtctgttcatttcagtcactataaaagagtttgaaaaacttaggcccactccaaatgccacttcttcctttggctgacggcatgcttatcaaggcgtcgccttagcgtcgctttagcgctaaggctcgcgcagaaagcagagtgtctagcttgccttgccacgatgcgtaaggcgtccgccccgtcctaaggcgtcggcgaggtgttggcgaggcgacgccttaggggtagatagggttttgagtgggggtttcagttaggtggacgcacgtgtacacatcggttcgggtcagagcttgaggcggcggcggctgggaacgtctttgctagtagtggcgtccttcctcaactccggcggcgcgtgggtgtgctcctcccttagctccggcggcgtgtgggcgtggagcagctgcgctcacggcggcacgccagcgagctccctcagccctctctttatgatcctatggctgatccgaagtggagagcaaagtccaatgatcccggatggaagtatgggtattggacagaaattgggaaccgagataaggtcacatgcaacctttgcaagaccgtgacaaccggaggaatcaaaaggttgaaagaacaccttgcgggtggttttgcggatacattaatgtgttctaagacaacaacagagattagaaaagaaatgtaagcatatttggacaagaataagagatgcagacctatttttcttgatgaggatgatggtcatgagcagcaggagcagcaggatactacttatgtacatcaacctagcttggggacagccgctaaaaggaagagagctgcatttcaatttagaacagcagctccacaaccatccaacatggaaaaagaaaaaagaaaggttgcaaccatgcttcggagaactcccaaacaagttgtggatgacaggcgttcctcagggtcacaccaaaccaccatagaggctgcactgaagccaaaggctgacagggaatatgtgaatgagcaatgggcactgtggttctatgagtgtggcattatgccatcagttcttgacaatttcaggttgcttgtgaagctactgcacaatatggttccggttatgtgcctcctagtttccatgatttgagggagcctttgcttaattcatgtgtgaagaggacaaacaacatgagagctgagcatgagatagcatggaacaactatggctgcactctaatgtctgatggatggaatgatagaaggggtcgtcagctaatcaacttccttgatcgcagcccagaagcggacaggattctaatggactggattccaacattattttggacaccttgtgctgcacattgtttggatctcatgttggaagatattggcaaattgaaagacttcaagaaacctattgcatatgccaaaagggtgaccacttttatttatagacatggaagaattttaagtgcaatgagggagaagacaagtgggatggatctggtaagaccagcagcaactcgatttgccacatacttccttacattgaagagcttacacaaacattgatatgccttgagagctctcttttcaagtgatgaatggaagaacaacaaattagcgaagacagaggcaggcaagagtgtgtacaacattgttctatctaaggcgttttggactacagttgaagattgccttagagcttcggcgccacttcttattgtgcttagggctgttgatggtgatgaaaaaccagccatgccagaagttgctgcactcatgaatgttgtaatagagaagataaggcttagctttcctacccaaaacaagcagacattgttgaaaaaaatcatggacatcattgagcgccggtgggtgacacaaatggaccatccattatatggagctgcactctatttgaacccgagaaagttttttccatccgaaagaagggggattctagatatgttgcagagctaaggagttgtttcaatgatgtactagcaagaatggagcccgatgaagagattaggtccaagattgatgagtatgacatgcatcatgaagaccaaagaggacctatcttttctaacaagctggcactcgaaaatattcaatcaaaaagccctcttgattggtggtgtgcatatggtggacaggcatttgaactacaaagatttgtgatgcgtgtggttagcctttgtgcttcatcatcgggttgtgaatggatttggagtacatttgaatttatgcatacaaagaagagaaatcggttgttgcgcaagaggttgaatgacttggtcttatctgcctatttcatgggaactcaacccaccaaatggtcatgttggagacacccgctgtgcctgtgcggctgtggtcctttggcaaatccttagagttgaattgtgacggcagttgatatccttagaccttcgggaaagcaaaaagcgataaagagatcgcagatggatattgtgctgtagcactttcagatggtggttcgtgtcagtcgattaatccactcccacatgagaagaattgtatattgtgctccctgaactctatcaggagagctgctgtagcagtcactggacatcgataatctcgaagatactgttgctagtctgtactggtactgcacaggagtgtttgttatctggccatccagtccagcaagctggatgtgtgcgtatgttacatctgtctgcctgaaccaggtggtgtaaaaataggccaagaaagcatcggaatgaataaaagcattgcggattattcaggggcgccgtcggagacggcagataactattgcctgcctagcccgcgcccattcctcttcctgttgcagtgcaggacaaggcggcggcggtgcagatctttctcccttttcttgcgggcggcaaaggagagagactgcgagccaaggaacaggccaacaaatatctgaggcccgatattttctcctgccccagccacgtggaaaagcgccgtcacgtaggcgtaaagctcccgtccagtccagggcccggtcggctcggctgccgatccttcttcaatccctcgcctgcaactggctctctgtccccttctgctccccccacggttccccagagcccgagccaaatctaggggcttccttcatccgagcgtggtttcaattctaggggtagtcacctcacctgaattccgcccaaataaattcgtcgctgccttgtgatccttggggtttccttggttcttgagttgcgatcttctgctggttcgtgtcccccaatccgtaatcaatccggcgtctaggaaaccaattgctgctcagttctcttatttgctcctcgccttccttcctccagcctggttaaaatatcgaaaggggatttttttttaaaaatctgctcatcgaggaagcagggaagacaagaattgttgcatcggataaaggtcgggtgaaaatacaagcaaatcctgggaactcgcgtccctttgctaggtggttctttcctgatacaaagaacacaatgggcgatgtgtccttgaacggacccattaaggctgctgagccaggtgccggtggcattgccaagggcaatcaagttctggacacgatgtccgccgggtggacagacgagagacacaggctgtatataagctctatggaggcctctttcgtcgatcaactgtacaaccacgggagccgtccgcgcaacgcaaacggcaccgccttcaaggctctccgcagggagtacgtcgagtatgagaagaccgatgctcctgtgcgaaggggggctaagtgctgcggcgttcctgcaaatccttggatgcagcatttcaggccacgtagtgatggcggtaataacgcgcgaggcgatgggctcggggattctgtgggcgatcttgaatctggcactgaggcaaaccggaagagcctctcagcgtctcatggaagggaacgggacgcttgtgagggagaaccccagcttctccatgaaagtagagaggtctctgatcaaaattttgctgacgacgaggctgaagctgaaacagaatcaatgaaagcatacaagaaaaggagattaagcaggacaatgatcaactaaatttgcagggtcaattagcttagcctgttgcaggaattgagatgactgtcctaaaaggaggcagtaagatgatgggacatgtcttacgaaattttcagctgttgcctcttggtagccaaggcactttgaatccgaaggaaggtgttgaagggtagttgttagtgatcttgtgatgatataacgagctctggagcagttagcatcggcattttagtggattatgttcttgttatgtgtatctgtctatttttcagtcctcatcggtagtgctgcatagtacctcgctctctcgtcagaaggatattaggctaggtcactgttattaaatttttcaataacagtgaagtgtacatgtgtttgccaaatggtgagaatcattattgatttccaattcacaaactattctttatgcctcactccgtggatgtcgcggacatgtaacatggtcccggaaggaaggtacagcatacgacgtgcttgctgttgaacgatgatctttttaaaaaagaaaaaaaaaa

SEQ ID NO: 84716 - DNA, 4645 bp, Zea Mays
tcagtcggatttggaggagtcgaataaacaaggaaactcctcccggcccaaaaagcacttcacttgcaacagtccccgtcagggagggagcattgctgtgcgggatggcgataaggaagagcggaggcggtggcggggtgggggatgtggcgcggcggctgctgcttctggcctgctgctgcatttggcctggtggacggatcttcactgctgcggacactgaccccaacgatcttaatgtcctcaatacgctcttcaccagtctgaattctcctgggcagctcagagcttggcaggcgaatggcggtgatccttgtggccagtcatggcagggcattacttgctcaggatcaggggtcactaaaatcctattaccaaacttgtcactcaccggaaatctggcctacaacatgaataacttgggttcattagttgagcttgacttgagccaaaataaccttggtggtggaggccaaatacagtacaatcttcccaatgtgaagcttgagaaactcaatcttgcaggaaatcaatttggtggaaatttaccctactcaatttcgacgatgcctaatcttaagtatttaaaccttaatcataaccaactacaaggaaacatcactgatgtattttccaacctttatagtttgtcagagctggatctctcctttaattctcttactggtgatctaccacaaagtttcactggattgtcaagcctgaaaagaatgtatttgcagaacaaccaatttactggttatatcaatgtcttagccaaccttccccttgaaaccctgaatgttggaaacaaccatttcactggttggattcccagtcagcttaagaagataaacaatctacagaccgacggaaattcttggagcacaggaccagcgccacctccacctccatatacagcgcctcctcctccaaaccattggaatggcgcgggtcagaatgatgatggttcatcaagttctggtggaagacctgggataggtggtggaggtgtagcaggaatcattatatcattgctgattgttggatcagttgttgcattttttctaatcaaaagaagaaaacacaaagctattatggaagaacaatttgaacagcatcagccgttcacttccttcccttcaaatgaagttaacgacatgaagcctatctatgagtccaccacagtagacatagagtctttggcttcacctgcttcgattaatctgaaaccacccccgaagatagaacagaacaaatcatttgatgatgatgatgatttttcaaacaagactgctgcaaatagaagtaatataacacctatgaaggcaactgtttattcagttgcagatctacagatggcaacagatagcttcagcttcgataaccttgttggagagggtacttttggacgtgtttacagggcacagttcaatggtggaaagatgagtacagcaaggcacttagctggaactctcgcatcaagatcgcactcggctctgcccgtgcactggagtaccttcatgaaatatgttctccatccatcatccataagaatttcaaggcatcaaatattttgctggactcagaattcaatccacacctttcagatactggacttgcaagcttcattcctgatgctgaattccaggcagcagaacaaagtgccggatacactgccccagaagtggacatgaccggtcagtacaccctcaagagtgatgtttacagctttggagttgtcatgcttgagctactgacaggacgtagaccatttgacagctctagacccaggtcagagcagtcacttgtgcggtgggcagcacctcagctgcatgacatcgatgcattggacagaatggtcgatcctgcactcaagggtctatacccagccaaatctctatcccgatttgctgatgtcctcgccctgtgtgtccagcctgaaccagaattcaggccaccaatgtcagaggtggtgcaagcattggttcgacttgtgcagagggccaacatgacgaagaggatgcttgatggaggagatacttctcgtggaccagatgatcaggaccaatatttcatatgacaagctgaactcgagcttttcagctacctctcagattgtatttatctcgtctcgttccactagcgcccggcagagacataatcacacaagtggaagaaacagaactttgtcagcttcgccagtacttggtttgacagaaaactgaaaaacacatatggccaccttcttttcagcagttgattggtggtgtgcatatggtggacaggcatttgaactacaaagatttgtgatgcgtgtggttagcctttgtgcttcatcatcgggttgtgaatggatttggagtacatttgaatttatgcatacaaagaagagaaatcggttgttgcgcaagaggttgaatgacttggtcttatctgcctatttcatgggaactcaacccaccaaatggtcatgttggagacacccgctgtgcctgtgcggctgtggtcctttggcaaatccttagagttgaattgtgacggcagttgatatccttagaccttcgggaaagcaaaaagcgataaagagatcgcagatggatattgtgctgtagcactttcagatggtggttcgtgtcagtcgattaatccactcccacatgagaagaattgtatattgtgctccctgaactctatcaggagagctgctgtagcagtcactggacatcgataatctcgaagatactgttgctagtctgtactggtactgcacaggagtgtttgttatctggccatccagtccagcaagctggatgtgtgcgtatgttacatctgtctgcctgaaccaggtggtgtaaaaataggccaagaaagcatcggaatgtgcaggacaaggcggcggcggtgcagatctttctcccttttcttgcgggcggcaaaggagagagactgcgagccaaggaacaggccaacaaatatctgaggcccgatattttctcctgccccagccacgtggaaaagcgccgtcacgtaggcgtaaagctcccgtccagtccagggcccggtcggctcggctgccgatccttcttcaatccctcgcctgcaactggctctctgtccccttctgctccccccacggttccccagagcccgagccaaatctaggggcttccttcatccgagcgtggtttcaattctaggggtagtcacctcacctgaattccgcccaaataaattcgtcgctgccttgtgatccttggggtttccttggttcttgagttgcgatcttctgctggttcgtgtcccccaatccgtaatcaatccggcgtctaggaaaccaattgctgctcagttctcttatttgctcctcgccttccttcctccagcctggttaaaatatcgaaaggggatttttttttaaaaatctgctcatcgaggaagcagggaagacaagaattgttgcatcggataaaggtcgggtgaaaatacaagcaaatcctgggaactcgcgtccctttgctaggtggttctttcctgatacaaagaacacaatgggcgatgtgtccttgaacggacccattaaggctgctgagccaggtgccggtggcattgccaagggcaatcaagttctggacacgatgtccgccgggtggacagacgagagacacaggctgtatataagctctatggaggcctctttcgtcgatcaactgtacaaccacgggagccgtccgcgcaacgcaaacggcaccgccttcaaggctctccgcagggagtacgtcgagtatgagaagaccgatgctcctgtgcgaaggggggctaagtgctgcggcgttcctgcaaatccttggatgcagcatttcaggccacgtagtgatggcggtaataacgcgcgaggcgatgggctcggggattctgtgggcgatcttgaatctggcactgaggcaaaccggaagagcctctcagcgtctcatggaagggaacgggacgcttgtgagggagaaccccagcttctccatgaaagtagagaggtctctgatcaaaattttgctgacgacgaggctgaagctgaaacagaatcaatgaaagcatacaagaaaaggagattaagcaggacaatgatcaactaaatttgcagggtcaattagcttagcctgttgcaggaattgagatgactgtcctaaaaggaggcagtaagatgatgggacatgtcttacgaaattttcagctgttgcctcttggtagccaaggcactttgaatccgaaggaaggtgttgaagggtagttgttagtgatcttgtgatgatataacgagctctggagcagttagcatcggcattttagtggattatgttcttgttatgtgtatctgtctatttttcagtcctcatcggtagtgctgcatagtacctcgctctctcgtcagaaggatattaggctaggtcactgttattaaatttttcaataacagtgaagtgtacatgtgtttgccaaatggtgagaatcattattgatttccaattcacaaactattctttatgcctcactccgtggatgtcgcggacatgtaacatggtcccggaaggaaggtacagcatacgacgtgcttgctgttgaacgatgatctttttaaaaaagaaaaaaaaaa

SEQ ID NO: 84717 - DNA, 3524 bp, Zea Mays
tcagtcggatttggaggagtcgaataaacaaggaaactcctcccggcccaaaaagcacttcacttgcaacagtccccgtcagggagggagcattgctgtgcgggatggcgataaggaagagcggaggcggtggcggggtgggggatgtggcgcggcggctgctgcttctggcctgctgctgcatttggcctggtggacggatcttcactgctgcggacactgaccccaacgatcttaatgtcctcaatacgctcttcaccagtctgaattctcctgggcagctcagagcttggcaggcgaatggcggtgatccttgtggccagtcatggcagggcattacttgctcaggatcaggggtcactaaaatcctattaccaaacttgtcactcaccggaaatctggcctacaacatgaataacttgggttcattagttgagcttgacttgagccaaaataaccttggtggtggaggccaaatacagtacaatcttcccaatgtgaagcttgagaaactgaaatcaatttggtggaaatttaccctactcaatttcgacgatgcctaatcttaagtatttaaaccttaatcataaccaactacaaggaaacatcactgatgtattttccaacctttatagtttgtcagagctggatctctcctttaattctcttactggtgatctaccacaaagtttcactggattgtcaagcctgaaaagaatgtatttgcagaacaaccaatttactggttatatcaatgtcttagccaaccttccccttgaaaccctgaatgttggaaacaaccatttcactggttggattcccagtcagcttaagaagataaacaatctacagaccgacggaaattcttggagcacaggaccagcgccacctccacctccatatacagcgcctcctcctccaaaccattggaatggcgcgggtcagaatgatgatggttcatcaagttctggtggaagacctgggataggtggtggaggtgtagcaggaatcattatatcattgctgattgttggatcagttgttgcattttttctaatcaaaagaagaaaacacaaagctattatggaagaacaatttgaacagcatcagccgttcacttccttcccttcaaatgaagttaacgacatgaagcctatctatgagtccaccacagtagacatagagtctttggcttcacctgcttcgattaatctgaaaccacccccgaagatagaacagaacaaatcatttgatgatgatgatgatttttcaaacaagactgctgcaaatagaagtaatataacacctatgaaggcaactgtttattcagttgcagatctacagatggcaacagatagcttcagcttcgataaccttgttggagagggtacttttggacgtgtttacagggcacagttcaatggtggaaaggttctggccatcaagaaattagacattactgtgatgccatttcaatcgtctgatgactttgctgaactggtctcgaacatttcaaaattgcaccatccgaatctgaatgagcttgtaggctattgcatggaacatggccagcacttgcttgtgtatgatttccataggaatggatcgcttcatgatctactccacctttcagatgagtacagcaaggcacttagctggaactctcgcatcaagatcgcactcggctctgcccgtgcactggagtaccttcatgaaatatgttctccatccatcatccataagaatttcaaggcatcaaatattttgctggactcagaattcaatccacacctttcagatactggacttgcaagcttcattcctgatgctgaattccaggcagcagaacaaagtgccggatacactgccccagaagtggacatgaccggtcagtacaccctcaagagtgatgtttacagctttggagttgtcatgcttgagctactgacaggacgtagaccatttgacagctctagacccaggtcagagcagtcacttgtgcggtgggcagcacctcagctgcatgacatcgatgcattggacagaatggtcgatcctgcactcaagggtctatacccagccaaatctctatcccgatttgctgatgtcctcgccctgtgtgtccagcctgaaccagaattcaggccaccaatgtcagaggtggtgcaagcattggttcgacttgtgcagagggccaacatgacgaagaggatgcttgatggaggagatacttctcgtggaccagatgatcaggaccaatatttcatatgacaagctgaactcgagcttttcagctacctctcagattgtatttatctcgtctcgttccactagcgcccggcagagacataatcacacaagtggaagaaacagaactttgtcagcttcgccagtacttggtttgacagaaaactgaaaaacacatatggccaccttcttttcagcaggagttcacttttaagtgtctatgcagacatgtcagtaacctgtaagggcaatcaagttctggacacgatgtccgccgggtggacagacgagagacacaggctgtatataagctctatggaggcctctttcgtcgatcaactgtacaaccacgggagccgtccgcgcaacgcaaacggcaccgccttcaaggctctccgcagggagtacgtcgagtatgagaagaccgatgctcctgtgcgaaggggggctaagtgctgcggcgttcctgcaaatccttggatgcagcatttcaggccacgtagtgatggcggtaataacgcgcgaggcgatgggctcggggattctgtgggcgatcttgaatctggcactgaggcaaaccggaagagcctctcagcgtctcatggaagggaacgggacgcttgtgagggagaaccccagcttctccatgaaagtagagaggtctctgatcaaaattttgctgacgacgaggctgaagctgaaacagaatcaatgaaagcatacaagaaaaggagattaagcaggacaatgatcaactaaatttgcagggtcaattagcttagcctgttgcaggaattgagatgactgtcctaaaaggaggcagtaagatgatgggacatgtcttacgaaattttcagctgttgcctcttggtagccaaggcactttgaatccgaaggaaggtgttgaagggtagttgttagtgatcttgtgatgatataacgagctctggagcagttagcatcggcattttagtggattatgttcttgttatgtgtatctgtctatttttcagtcctcatcggtagtgctgcatagtacctcgctctctcgtcagaaggatattaggctaggtcactgttattaaatttttcaataacagtgaagtgtacatgtgtttgccaaatggtgagaatcattattgatttccaattcacaaactattctttatgcctcactccgtggatgtcgcggacatgtaacatggtcccggaaggaaggtacagcatacgacgtgcttgctgttgaacgatgatctttttaaaaaagaaaaaaaaaa

SEQ ID NO: 84718 - DNA, 8100 bp, Zea Mays
tcagtcggatttggaggagtcgaataaacaaggaaactcctcccggcccaaaaagcacttcacttgcaacagtccccgtcagggagggagcattgctgtgcgggatggcgataaggaagagcggaggcggtggcggggtgggggatgtggcgcggcggctgctgcttctggcctgctgctgcatttggcctggtggacggatcttcactgctgcggacactgaccccaacgatcttaatgtcctcaatacgctcttcaccagtctgaattctcctgggcagctcagagcttggcaggcgaatggcggtgatccttgtggccagtcatggcagggcattacttgctcaggatcaggggtcactaaaatcctattaccaaacttgtcactcaccggaaatctggcctacaacatgaataacttgggttcattagttgagcttgacttgagccaaaataaccttggtggtggaggccaaatacagtacaatcttcccaatgtgaagcttgagaaactcaatcttgcaggaaatcaatttggtggaaatttaccctactcaatttcgacgatgcctaatcttaagtatttaaaccttaatcataaccaactacaaggaaacatcactgatgtattttccaacctttatagtttgtcagagctggatctctcctttaattctcttactggtgatctaccacaaagtttcactggattgtcaagcctgaaaagaatgtatttgcagaacaaccaatttactggttatatcaatgtcttagccaaccttccccttgaaaccctgaatgttggaaacaaccatttcactggttggattcccagtcagcttaagaagataaacaatctacagaccgacggaaattcttggagcacaggaccagcgccacctccacctccatatacagcgcctcctcctccaaaccattggaatggcgcgggtcagaatgatgatggttcatcaagttctggtggaagacctgggataggtggtggaggtgtagcaggaatcattatatcattgctgattgttggatcagttgttgcattttttctaatcaaaagaagaaaacacaaagctattatggaagaacaatttgaacagcatcagccgttcacttccttcccttcaaatgaagttaacgacatgaagcctatctatgagtccaccacagtagacatagagtctttggcttcacctgcttcgattaatctgaaaccacccccgaagatagaacagaacaaatcatttgatgatgatgatgatttttcaaacaagactgctgcaaatagaagtaatataacacctatgaaggcaactgtttattcagttgcagatctacagatggcaacagatagcttcagcttcgataaccttgttggagagggtacttttggacgtgtttacagggcacagttcaatggtggaaaggttctggccatcaagaaattagacattactgtgatgccatttcaatcgtctgatgactttgctgaactggtctcgaacatttcaaaattgcaccatccgaatctgaatgagcttgtaggctattgcatggaacatggccagcacttgcttgtgtatgatttccataggaatggatcgcttcatgatctactccacctttcagatgagtacagcaaggcacttagctggaactctcgcatcaagatcgcactcggctctgcccgtgcactggagtaccttcatgaaatatgttctccatccatcatccataagaatttcaaggcatcaaatattttgctggactcagaattcaatccacacctttcagatactggacttgcaagcttcattcctgatgctgaattccaggcagcagaacaaagtgccggatacactgccccagaagtggacatgaccggtcagtacaccctcaagagtgatgtttacagctttggagttgtcatgcttgagctactgacaggacgtagaccatttgacagctctagacccaggtcagagcagtcacttgtgcggtgggcagcacctcagctgcatgacatcgatgcattggacagaatggtcgatcctgcactcaagggtctatacccagccaaatctctatcccgatttgctgatgtcctcgccctgtgtgtccagcctgaaccagaattcaggccaccaatgtcagaggtggtgcaagcattggttcgacttgtgcagagggccaacatgacgaagaggatgcttgatggaggagatacttctcgtggaccagatgatcaggaccaatatttcatatgacaagctgaactcgagcttttcagctacctctcagattgtatttatctcgtctcgttccactagcgcccggcagagacataatcacacaagtggaagaaacagaactttgtcagcttcgccagtacttggtagcaaatgagttgtgctctatggttgatggttgtattgtgtctaggaaacagtatcttgatcttgcactaatgacattctgttatattctttgggtagattatatgcaaatgccccggataaataaaactatggtgtcaagtttgcggaatgttaaaagaatcaattactccagtcctgctgcataaactgaaacatgttgcatggtggaatagtcatttgtcctatcatctgacgcttgttttcgtccttgaactttcaaaacgactattttaaatggaagtcttttaaaaccaccattcagattccctaagcatgctgctggctgtcagtccgaagaccgaaccaaacggataaatttaactgactagtctttgtatttagttgatatcttcaagcttcttgtacctcaagagtggagtgaaattacttatttcaagaagcttgagaagttggtgggagttcctgttatcaatgtccatatatggtttgttgattaaaatatttggttctgaattgggaacgacttgattcccttgtctggttatgcttgttccttgagacatttctgaagctttgctgagagtttctgttgttttgaatacctcaggtttgacagaaaactgaaaaacacatatggccaccttcttttcagcaggagttcacttttaagtgtctatgcagacatgtcagtaacctgtaaggtactaaggcatcttggttttggataagtttggagggacatcatttgtgggcttctatcttcgtctagcactcagggctgaacatgcaggactgctcacaggtctctcctagaatccatctccatcgggtatctatttatgcagacgatgtggcgctcttcttgcatccatctgctgcggatattactattactctagatatcttacttcttacatatttttggtgaagcttcaggtctccgcaacaacgaacaaaagtctaatgtttatcccattcaatgtgggcatgaggagttggaagtggttcagggcctcctcccatgtgacatctcagctcttccttgtagatacctgagactgtcgttgtccttgaaaaatctcaccaaggatcagttgcagcctattgtggatagaattgttgatcgactcctaggatggaaagcagatttgatgacaagggctggtagaaaagtgcaagtacaatatgtgcttactggaatgcttatatatctcgttatggcgataaatatcccctcttggactatcaaggctattgaaaaaattagaaaatgtttcttagggagggggcgcaaggaggtcaaaggagggaattgcctggttgcttggggcagagtttgtagacctctccagctgggcggtcttggcatttgtagtcttaagaagctcagttgggccctgcgcatgcggtggctatggctccaaaagaccgagcctagcagaccctagtgcagcctaccaatctaggtgccggacaaagcaagggctttcttctcggtggtgttgatttcaaaagttggtaatggggcaaatactttgttttggattgataaatgggttcatggatagaaaattgcaaatctagtacctagattatttgtagtcattccgaaaagaatcactaacagaagaacggtttaggagggcgttgacaaatagaagatggatttcagatatcataggaactctttctgtggtggtcttagtggatcatcttcatctctggaatcagattttagattttgagctattactagatgtggaagataagcatatattcagtattgctgctaatggggcttattcggctaaggctgcatatgaagtgttgttccctaggtctgttcatttcagtcactataaaagagtttgaaaaacttaggcccactccaaatgccacttcttcctttggctgacggcatgcttatcaaggcgtcgccttagcgtcgctttagcgctaaggctcgcgcagaaagcagagtgtctagcttgccttgccacgatgcgtaaggcgtccgccccgtcctaaggcgtcggcgaggtgttggcgaggcgacgccttaggggtagatagggttttgagtgggggtttcagttaggtggacgcacgtgtacacatcggttcgggtcagagcttgaggcggcggcggctgggaacgtctttgctagtagtggcgtccttcctcaactccggcggcgcgtgggtgtgctcctcccttagctccggcggcgtgtgggcgtggagcagctgcgctcacggcggcacgccagcgagctccctcagccctctctttatgatcctatggctgatccgaagtggagagcaaagtccaatgatcccggatggaagtatgggtattggacagaaattgggaaccgagataaggtcacatgcaacctttgcaagaccgtgacaaccggaggaatcaaaaggttgaaagaacaccttgcgggtggttttgcggatacattaatgtgttctaagacaacaacagagattagaaaagaaatgtaagcatatttggacaagaataagagatgcagacctatttttcttgatgaggatgatggtcatgagcagcaggagcagcaggatactacttatgtacatcaacctagcttggggacagccgctaaaaggaagagagctgcatttcaatttagaacagcagctccacaaccatccaacatggaaaaagaaaaaagaaaggttgcaaccatgcttcggagaactcccaaacaagttgtggatgacaggcgttcctcagggtcacaccaaaccaccatagaggctgcactgaagccaaaggctgacagggaatatgtgaatgagcaatgggcactgtggttctatgagtgtggcattatgccatcagttcttgacaatttcaggttgcttgtgaagctactgcacaatatggttccggttatgtgcctcctagtttccatgatttgagggagcctttgcttaattcatgtgtgaagaggacaaacaacatgagagctgagcatgagatagcatggaacaactatggctgcactctaatgtctgatggatggaatgatagaaggggtcgtcagctaatcaacttccttgatcgcagcccagaagcggacaggattctaatggactggattccaacattattttggacaccttgtgctgcacattgtttggatctcatgttggaagatattggcaaattgaaagacttcaagaaacctattgcatatgccaaaagggtgaccacttttatttatagacatggaagaattttaagtgcaatgagggagaagacaagtgggatggatctggtaagaccagcagcaactcgatttgccacatacttccttacattgaagagcttacacaaacattgatatgccttgagagctctcttttcaagtgatgaatggaagaacaacaaattagcgaagacagaggcaggcaagagtgtgtacaacattgttctatctaaggcgttttggactacagttgaagattgccttagagcttcggcgccacttcttattgtgcttagggctgttgatggtgatgaaaaaccagccatgccagaagttgctgcactcatgaatgttgtaatagagaagataaggcttagctttcctacccaaaacaagcagacattgttgaaaaaaatcatggacatcattgagcgccggtgggtgacacaaatggaccatccattatatggagctgcactctatttgaacccgagaaagttttttccatccgaaagaagggggattctagatatgttgcagagctaaggagttgtttcaatgatgtactagcaagaatggagcccgatgaagagattaggtccaagattgatgagtatgacatgcatcatgaagaccaaagaggacctatcttttctaacaagctggcactcgaaaatattcaatcaaaaagccctcttgattggtggtgtgcatatggtggacaggcatttgaactacaaagatttgtgatgcgtgtggttagcctttgtgcttcatcatcgggttgtgaatggatttggagtacatttgaatttatgcatacaaagaagagaaatcggttgttgcgcaagaggttgaatgacttggtcttatctgcctatttcatgggaactcaacccaccaaatggtcatgttggagacacccgctgtgcctgtgcggctgtggtcctttggcaaatccttagagttgaattgtgacggcagttgatatccttagaccttcgggaaagcaaaaagcgataaagagatcgcagatggatattgtgctgtagcactttcagatggtggttcgtgtcagtcgattaatccactcccacatgagaagaattgtatattgtgctccctgaactctatcaggagagctgctgtagcagtcactggacatcgataatctcgaagcctggttaaaatatcgaaaggggatttttttttaaaaatctgctcatcgaggaagcagggaagacaagaattgttgcatcggataaaggtcgggtgaaaatacaagcaaatcctgggaactcgcgtccctttgctaggtggttctttcctgatacaaagaacacaatgggcgatgtgtccttgaacggacccattaaggctgctgagccaggtgccggtggcattgccaagggcaatcaagttctggacacgatgtccgccgggtggacagacgagagacacaggctgtatataagctctatggaggcctctttcgtcgatcaactgtacaaccacgggagccgtccgcgcaacgcaaacggcaccgccttcaaggctctccgcagggagtacgtcgagtatgagaagaccgatgctcctgtgcgaaggggggctaagtgctgcggcgttcctgcaaatccttggatgcagcatttcaggccacgtagtgatggcggtaataacgcgcgaggcgatgggctcggggattctgtgggcgatcttgaatctggcactgaggcaaaccggaagagcctctcagcgtctcatggaagggaacgggacgcttgtgagggagaaccccagcttctccatgaaagtagagaggtctctgatcaaaattttgctgacgacgaggctgaagctgaaacagaatcaatgaaagcatacaagaaaaggagattaagcaggacaatgatcaactaaatttgcagggtcaattagcttagcctgttgcaggaattgagatgactgtcctaaaaggaggcagtaagatgatgggacatgtcttacgaaattttcagctgttgcctcttggtagccaaggcactttgaatccgaaggaaggtgttgaagggtagttgttagtgatcttgtgatgatataacgagctctggagcagttagcatcggcattttagtggattatgttcttgttatgtgtatctgtctatttttcagtcctcatcggtagtgctgcatagtacctcgctctctcgtcagaaggatattaggctaggtcactgttattaaatttttcaataacagtgaagtgtacatgtgtttgccaaatggtgagaatcattattgatttccaattcacaaactattctttatgcctcactccgtggatgtcgcggacatgtaacatggtcccggaaggaaggtacagcatacgacgtgcttgctgttgaacgatgatctttttaaaaaagaaaaaaaaaa

SEQ ID NO: 84719 - DNA, 8111 bp, Zea Mays
tcagtcggatttggaggagtcgaataaacaaggaaactcctcccggcccaaaaagcacttcacttgcaacagtccccgtcagggagggagcattgctgtgcgggatggcgataaggaagagcggaggcggtggcggggtgggggatgtggcgcggcggctgctgcttctggcctgctgctgcatttggcctggtggacggatcttcactgctgcggacactgaccccaacgatcttaatgtcctcaatacgctcttcaccagtctgaattctcctgggcagctcagagcttggcaggcgaatggcggtgatccttgtggccagtcatggcagggcattacttgctcaggatcaggggtcactaaaatcctattaccaaacttgtcactcaccggaaatctggcctacaacatgaataacttgggttcattagttgagcttgacttgagccaaaataaccttggtggtggaggccaaatacagtacaatcttcccaatgtgaagcttgagaaactcaatcttgcaggaaatcaatttggtggaaatttaccctactcaatttcgacgatgcctaatcttaagtatttaaaccttaatcataaccaactacaaggaaacatcactgatgtattttccaacctttatagtttgtcagagctggatctctcctttaattctcttactggtgatctaccacaaagtttcactggattgtcaagcctgaaaagaatgtatttgcagaacaaccaatttactggttatatcaatgtcttagccaaccttccccttgaaaccctgaatgttggaaacaaccatttcactggttggattcccagtcagcttaagaagataaacaatctacagaccgacggaaattcttggagcacaggaccagcgccacctccacctccatatacagcgcctcctcctccaaaccattggaatggcgcgggtcagaatgatgatggttcatcaagttctggtggaagacctgggataggtggtggaggtgtagcaggaatcattatatcattgctgattgttggatcagttgttgcattttttctaatcaaaagaagaaaacacaaagctattatggaagaacaatttgaacagcatcagccgttcacttccttcccttcaaatgaagttaacgacatgaagcctatctatgagtccaccacagtagacatagagtctttggcttcacctgcttcgattaatctgaaaccacccccgaagatagaacagaacaaatcatttgatgatgatgatgatttttcaaacaagactgctgcaaatagaagtaatataacacctatgaaggcaactgtttattcagttgcagatctacagatggcaacagatagcttcagcttcgataaccttgttggagagggtacttttggacgtgtttacagggcacagttcaatggtggaaagatgagtacagcaaggcacttagctggaactctcgcatcaagatcgcactcggctctgcccgtgcactggagtaccttcatgaaatatgttctccatccatcatccataagaatttcaaggcatcaaatattttgctggactcagaattcaatccacacctttcagatactggacttgcaagcttcattcctgatgctgaattccaggcagcagaacaaagtgccggatacactgccccagaagtggacatgaccggtcagtacaccctcaagagtgatgtttacagctttggagttgtcatgcttgagctactgacaggacgtagaccatttgacagctctagacccaggtcagagcagtcacttgtgcggtgggcagcacctcagctgcatgacatcgatgcattggacagaatggtcgatcctgcactcaagggtctatacccagccaaatctctatcccgatttgctgatgtcctcgccctgtgtgtccagcctgaaccagaattcaggccaccaatgtcagaggtggtgcaagcattggttcgacttgtgcagagggccaacatgacgaagaggatgcttgatggaggagatacttctcgtggaccagatgatcaggaccaatatttcatatgacaagctgaactcgagcttttcagctacctctcagattgtatttatctcgtctcgttccactagcgcccggcagagacataatcacacaagtggaagaaacagaactttgtcagcttcgccagtacttggtttgacagaaaactgaaaaacacatatggccaccttcttttcagcaggagttcacttttaagtgtctatgcagacatgtcagtaacctgtaaggtactaaggcatcttggttttggataagtttggagggacatcatttgtgggcttctatcttcgtctagcactcaggtgcttctgaatggcattccgggagtacctattgagcataggagaggactcggacaacgggatcctctctcccccatgcctgttattgtagtaatagatgttcttggcctgctgttttctagggctgaacatgcaggactgctcacaggtctctcctagaatccatctccatcgggtatctatttatgcagacgatgtggcgctcttcttgcatccatctgctgcggatattactattactctagatatcttacttcttacatatttttggtgaagcttcaggtctccgcaacaacgaacaaaagtctaatgtttatcccattcaatgtgggcatgaggagttggaagtggttcagggcctcctcccatgtgacatctcagctcttccttgtagatacctgagactgtcgttgtccttgaaaaatctcaccaaggatcagttgcagcctattgtggatagaattgttgatcgactcctaggatggaaagcagatttgatgacaagggctggtagaaaagtgcaagtacaatatgtgcttactggaatgcttatatatctcgttatggcgataaatatcccctcttggactatcaaggctattgaaaaaattagaaaatgtttcttagggagggggcgcaaggaggtcaaaggagggaattgcctggttgcttggggcagagtttgtagacctctccagctgggcggtcttggcatttgtagtcttaagaagctcagttgggccctgcgcatgcggtggctatggctccaaaagaccgagcctagcagaccctagtgcagcctaccaatctaggtgccggacaaagcaagggctttcttctcggtggtgttgatttcaaaagttggtaatggggcaaatactttgttttggattgataaatgggttcatggatagaaaattgcaaatctagtacctagattatttgtagtcattccgaaaagaatcactaacagaagaacggtttaggagggcgttgacaaatagaagatggatttcagatatcataggaactctttctgtggtggtcttagtggatcatcttcatctctggaatcagattttagattttgagctattactagatgtggaagataagcatatattcagtattgctgctaatggggcttattcggctaaggctgcatatgaagtgttgttccctaggtctgttcatttcagtcactataaaagagtttgaaaaacttaggcccactccaaatgccacttcttcctttggctgacggcatgcttatcaaggcgtcgccttagcgtcgctttagcgctaaggctcgcgcagaaagcagagtgtctagcttgccttgccacgatgcgtaaggcgtccgccccgtcctaaggcgtcggcgaggtgttggcgaggcgacgccttaggggtagatagggttttgagtgggggtttcagttaggtggacgcacgtgtacacatcggttcgggtcagagcttgaggcggcggcggctgggaacgtctttgctagtagtggcgtccttcctcaactccggcggcgcgtgggtgtgctcctcccttagctccggcggcgtgtgggcgtggagcagctgcgctcacggcggcacgccagcgagctccctcagccctctctttatgatcctatggctgatccgaagtggagagcaaagtccaatgatcccggatggaagtatgggtattggacagaaattgggaaccgagataaggtcacatgcaacctttgcaagaccgtgacaaccggaggaatcaaaaggttgaaagaacaccttgcgggtggttttgcggatacattaatgtgttctaagacaacaacagagattagaaaagaaatgtaagcatatttggacaagaataagagatgcagacctatttttcttgatgaggatgatggtcatgagcagcaggagcagcaggatactacttatgtacatcaacctagcttggggacagccgctaaaaggaagagagctgcatttcaatttagaacagcagctccacaaccatccaacatggaaaaagaaaaaagaaaggttgcaaccatgcttcggagaactcccaaacaagttgtggatgacaggcgttcctcagggtcacaccaaaccaccatagaggctgcactgaagccaaaggctgacagggaatatgtgaatgagcaatgggcactgtggttctatgagtgtggcattatgccatcagttcttgacaatttcaggttgcttgtgaagctactgcacaatatggttccggttatgtgcctcctagtttccatgatttgagggagcctttgcttaattcatgtgtgaagaggacaaacaacatgagagctgagcatgagatagcatggaacaactatggctgcactctaatgtctgatggatggaatgatagaaggggtcgtcagctaatcaacttccttgatcgcagcccagaagcggacaggattctaatggactggattccaacattattttggacaccttgtgctgcacattgtttggatctcatgttggaagatattggcaaattgaaagacttcaagaaacctattgcatatgccaaaagggtgaccacttttatttatagacatggaagaattttaagtgcaatgagggagaagacaagtgggatggatctggtaagaccagcagcaactcgatttgccacatacttccttacattgaagagcttacacaaacattgatatgccttgagagctctcttttcaagtgatgaatggaagaacaacaaattagcgaagacagaggcaggcaagagtgtgtacaacattgttctatctaaggcgttttggactacagttgaagattgccttagagcttcggcgccacttcttattgtgcttagggctgttgatggtgatgaaaaaccagccatgccagaagttgctgcactcatgaatgttgtaatagagaagataaggcttagctttcctacccaaaacaagcagacattgttgaaaaaaatcatggacatcattgagcgccggtgggtgacacaaatggaccatccattatatggagctgcactctatttgaacccgagaaagttttttccatccgaaagaagggggattctagatatgttgcagagctaaggagttgtttcaatgatgtactagcaagaatggagcccgatgaagagattaggtccaagattgatgagtatgacatgcatcatgaagaccaaagaggacctatcttttctaacaagctggcactcgaaaatattcaatcaaaaagccctcttgattggtggtgtgcatatggtggacaggcatttgaactacaaagatttgtgatgcgtgtggttagcctttgtgcttcatcatcgggttgtgaatggatttggagtacatttgaatttatgcatacaaagaagagaaatcggttgttgcgcaagaggttgaatgacttggtcttatctgcctatttcatgggaactcaacccaccaaatggtcatgttggagacacccgctgtgcctgtgcggctgtggtcctttggcaaatccttagagttgaattgtgacggcagttgatatccttagaccttcgggaaagcaaaaagcgataaagagatcgcagatggatattgtgctgtagcactttcagatggtggttcgtgtcagtcgattaatccactcccacatgagaagaattgtatattgtgctccctgaactctatcaggagagctgctgtagcagtcactggacatcgataatctcgaagatactgttgctagtctgtactggtactgcacaggagtgtttgttatctggccatccagtccagcaagctggatgtgtgcgtatgttacatctgtctgcctgaaccagaataaaagcattgcggattattcaggggcgccgtcggagacggcagataactattgcctgcctagcccgcgcccattcctcttcctgttgcagtgcaggacaaggcggcggcggtgcagatctttctcccttttcttgcgggcggcaaaggagagagactgcgagccaaggaacaggccaacaaatatctgaggcccgatattttctcctgccccagccacgtggaaaagcgccgtcacgtaggcgtaaagctcccgtccagtccagggcccggtcggctcggctgccgatccttcttcaatccctcgcctgcaactggctctctgtccccttctgctccccccacggttccccagagcccgagccaaatctaggggcttccttcatccgagcgtggtttcaattctaggggtagtcacctcacctgaattccgcccaaataaattcgtcgctgccttgtgatccttggggtttccttggttcttgagttgcgatcttctgctggttcgtgtcccccaatccgtaatcaatccggcgtctaggaaaccaattgctgctcagttctcttatttgctcctcgccttccttcctccagcctggttaaaatatcgaaaggggatttttttttaaaaatctgctcatcgaggaagcagggaagacaagaattgttgcatcggataaaggtcgggtgaaaatacaagcaaatcctgggaactcgcgtccctttgctaggtggttctttcctgatacaaagaacacaatgggcgatgtgtccttgaacggacccattaaggctgctgagccaggtgccggtggcattgccaagggcaatcaagttctggacacgatgtccgccgggtggacagacgagagacacaggctgtatataagctctatggaggcctctttcgtcgatcaactgtacaaccacgggagccgtccgcgcaacgcaaacggcaccgccttcaaggctctccgcagggagtacgtcgagtatgagaagaccgatgctcctgtgcgaaggggggctaagtgctgcggcgttcctgcaaatccttggatgcagcatttcaggccacgtagtgatggcggtaataacgcgcgaggcgatgggctcggggattctgtgggcgatcttgaatctggcactgaggcaaaccggaagagcctctcagcgtctcatggaagggaacgggacgcttgtgagggagaaccccagcttctccatgaaagtagagaggtctctgatcaaaattttgctgacgacgaggctgaagctgaaacagaatcaatgaaagcatacaagaaaaggagattaagcaggacaatgatcaactaaatttgcagggtcaattagcttagcctgttgcaggaattgagatgactgtcctaaaaggaggcagtaagatgatgggacatgtcttacgaaattttcagctgttgcctcttggtagccaaggcactttgaatccgaaggaaggtgttgaagggtagttgttagtgatcttgtgatgatataacgagctctggagcagttagcatcggcattttagtggattatgttcttgttatgtgtatctgtctatttttcagtcctcatcggtagtgctgcatagtacctcgctctctcgtcagaaggatattaggctaggtcactgttattaaatttttcaataacagtgaagtgtacatgtgtttgccaaatggtgagaatcattattgatttccaattcacaaactattctttatgcctcactccgtggatgtcgcggacatgtaacatggtcccggaaggaaggtacagcatacgacgtgcttgctgttgaacgatgatctttttaaaaaagaaaaaaaaaa

SEQ ID NO: 84720 - DNA, 8255 bp, Zea Mays
tcagtcggatttggaggagtcgaataaacaaggaaactcctcccggcccaaaaagcacttcacttgcaacagtccccgtcagggagggagcattgctgtgcgggatggcgataaggaagagcggaggcggtggcggggtgggggatgtggcgcggcggctgctgcttctggcctgctgctgcatttggcctggtggacggatcttcactgctgcggacactgaccccaacgatcttaatgtcctcaatacgctcttcaccagtctgaattctcctgggcagctcagagcttggcaggcgaatggcggtgatccttgtggccagtcatggcagggcattacttgctcaggatcaggggtcactaaaatcctattaccaaacttgtcactcaccggaaatctggcctacaacatgaataacttgggttcattagttgagcttgacttgagccaaaataaccttggtggtggaggccaaatacagtacaatcttcccaatgtgaagcttgagaaactcaatcttgcaggaaatcaatttggtggaaatttaccctactcaatttcgacgatgcctaatcttaagtatttaaaccttaatcataaccaactacaaggaaacatcactgatgtattttccaacctttatagtttgtcagagctggatctctcctttaattctcttactggtgatctaccacaaagtttcactggattgtcaagcctgaaaagaatgtatttgcagaacaaccaatttactggttatatcaatgtcttagccaaccttccccttgaaaccctgaatgttggaaacaaccatttcactggttggattcccagtcagcttaagaagataaacaatctacagaccgacggaaattcttggagcacaggaccagcgccacctccacctccatatacagcgcctcctcctccaaaccattggaatggcgcgggtcagaatgatgatggttcatcaagttctggtggaagacctgggataggtggtggaggtgtagcaggaatcattatatcattgctgattgttggatcagttgttgcattttttctaatcaaaagaagaaaacacaaagctattatggaagaacaatttgaacagcatcagccgttcacttccttcccttcaaatgaagttaacgacatgaagcctatctatgagtccaccacagtagacatagagtctttggcttcacctgcttcgattaatctgaaaccacccccgaagatagaacagaacaaatcatttgatgatgatgatgatttttcaaacaagactgctgcaaatagaagtaatataacacctatgaaggcaactgtttattcagttgcagatctacagatggcaacagatagcttcagcttcgataaccttgttggagagggtacttttggacgtgtttacagggcacagttcaatggtggaaaggttctggccatcaagaaattagacattactgtgatgccatttcaatcgtctgatgactttgctgaactggtctcgaacatttcaaaattgcaccatccgaatctgaatgagcttgtaggctattgcatggaacatggccagcacttgcttgtgtatgatttccataggaatggatcgcttcatgatctactccacctttcagatgagtacagcaaggcacttagctggaactctcgcatcaagatcgcactcggctctgcccgtgcactggagtaccttcatgaaatatgttctccatccatcatccataagaatttcaaggcatcaaatattttgctggactcagaattcaatccacacctttcagatactggacttgcaagcttcattcctgatgctgaattccaggcagcagaacaaagtgccggatacactgccccagaagtggacatgaccggtcagtacaccctcaagagtgatgtttacagctttggagttgtcatgcttgagctactgacaggacgtagaccatttgacagctctagacccaggtcagagcagtcacttgtgcggtgggcagcacctcagctgcatgacatcgatgcattggacagaatggtcgatcctgcactcaagggtctatacccagccaaatctctatcccgatttgctgatgtcctcgccctgtgtgtccagcctgaaccagaattcaggccaccaatgtcagaggtggtgcaagcattggttcgacttgtgcagagggccaacatgacgaagaggatgcttgatggaggagatacttctcgtggaccagatgatcaggaccaatatttcatatgacaagctgaactcgagcttttcagctacctctcagattgtatttatctcgtctcgttccactagcgcccggcagagacataatcacacaagtggaagaaacagaactttgtcagcttcgccagtacttggtttgacagaaaactgaaaaacacatatggccaccttcttttcagcaggagttcacttttaagtgtctatgcagacatgtcagtaacctgtaaggtactaaggcatcttggttttggataagtttggagggacatcatttgtgggcttctatcttcgtctagcactcaggtgcttctgaatggcattccgggagtacctattgagcataggagaggactcggacaacgggatcctctctcccccatgcctgttattgtagtaatagatgttcttggcctgctgttttctagggctgaacatgcaggactgctcacaggtctctcctagaatccatctccatcgggtatctatttatgcagacgatgtggcgctcttcttgcatccatctgctgcggatattactattactctagatatcttacttcttacatatttttggtgaagcttcaggtctccgcaacaacgaacaaaagtctaatgtttatcccattcaatgtgggcatgaggagttggaagtggttcagggcctcctcccatgtgacatctcagctcttccttgtagatacctgagactgtcgttgtccttgaaaaatctcaccaaggatcagttgcagcctattgtggatagaattgttgatcgactcctaggatggaaagcagatttgatgacaagggctggtagaaaagtgcaagtacaatatgtgcttactggaatgcttatatatctcgttatggcgataaatatcccctcttggactatcaaggctattgaaaaaattagaaaatgtttcttagggagggggcgcaaggaggtcaaaggagggaattgcctggttgcttggggcagagtttgtagacctctccagctgggcggtcttggcatttgtagtcttaagaagctcagttgggccctgcgcatgcggtggctatggctccaaaagaccgagcctagcagaccctagtgcagcctaccaatctaggtgccggacaaagcaagggctttcttctcggtggtgttgatttcaaaagttggtaatggggcaaatactttgttttggattgataaatgggttcatggatagaaaattgcaaatctagtacctagattatttgtagtcattccgaaaagaatcactaacagaagaacggtttaggagggcgttgacaaatagaagatggatttcagatatcataggaactctttctgtggtggtcttagtggatcatcttcatctctggaatcagattttagattttgagctattactagatgtggaagataagcatatattcagtattgctgctaatggggcttattcggctaaggctgcatatgaagtgttgttccctaggtctgttcatttcagtcactataaaagagtttgaaaaacttaggcccactccaaatgccacttcttcctttggctgacggcatgcttatcaaggcgtcgccttagcgtcgctttagcgctaaggctcgcgcagaaagcagagtgtctagcttgccttgccacgatgcgtaaggcgtccgccccgtcctaaggcgtcggcgaggtgttggcgaggcgacgccttaggggtagatagggttttgagtgggggtttcagttaggtggacgcacgtgtacacatcggttcgggtcagagcttgaggcggcggcggctgggaacgtctttgctagtagtggcgtccttcctcaactccggcggcgcgtgggtgtgctcctcccttagctccggcggcgtgtgggcgtggagcagctgcgctcacggcggcacgccagcgagctccctcagccctctctttatgatcctatggctgatccgaagtggagagcaaagtccaatgatcccggatggaagtatgggtattggacagaaattgggaaccgagataaggtcacatgcaacctttgcaagaccgtgacaaccggaggaatcaaaaggttgaaagaacaccttgcgggtggttttgcggatacattaatgtgttctaagacaacaacagagattagaaaagaaatgtaagcatatttggacaagaataagagatgcagacctatttttcttgatgaggatgatggtcatgagcagcaggagcagcaggatactacttatgtacatcaacctagcttggggacagccgctaaaaggaagagagctgcatttcaatttagaacagcagctccacaaccatccaacatggaaaaagaaaaaagaaaggttgcaaccatgcttcggagaactcccaaacaagttgtggatgacaggcgttcctcagggtcacaccaaaccaccatagaggctgcactgaagccaaaggctgacagggaatatgtgaatgagcaatgggcactgtggttctatgagtgtggcattatgccatcagttcttgacaatttcaggttgcttgtgaagctactgcacaatatggttccggttatgtgcctcctagtttccatgatttgagggagcctttgcttaattcatgtgtgaagaggacaaacaacatgagagctgagcatgagatagcatggaacaactatggctgcactctaatgtctgatggatggaatgatagaaggggtcgtcagctaatcaacttccttgatcgcagcccagaagcggacaggattctaatggactggattccaacattattttggacaccttgtgctgcacattgtttggatctcatgttggaagatattggcaaattgaaagacttcaagaaacctattgcatatgccaaaagggtgaccacttttatttatagacatggaagaattttaagtgcaatgagggagaagacaagtgggatggatctggtaagaccagcagcaactcgatttgccacatacttccttacattgaagagcttacacaaacattgatatgccttgagagctctcttttcaagtgatgaatggaagaacaacaaattagcgaagacagaggcaggcaagagtgtgtacaacattgttctatctaaggcgttttggactacagttgaagattgccttagagcttcggcgccacttcttattgtgcttagggctgttgatggtgatgaaaaaccagccatgccagaagttgctgcactcatgaatgttgtaatagagaagataaggcttagctttcctacccaaaacaagcagacattgttgaaaaaaatcatggacatcattgagcgccggtgggtgacacaaatggaccatccattatatggagctgcactctatttgaacccgagaaagttttttccatccgaaagaagggggattctagatatgttgcagagctaaggagttgtttcaatgatgtactagcaagaatggagcccgatgaagagattaggtccaagattgatgagtatgacatgcatcatgaagaccaaagaggacctatcttttctaacaagctggcactcgaaaatattcaatcaaaaagccctcttgattggtggtgtgcatatggtggacaggcatttgaactacaaagatttgtgatgcgtgtggttagcctttgtgcttcatcatcgggttgtgaatggatttggagtacatttgaatttatgcatacaaagaagagaaatcggttgttgcgcaagaggttgaatgacttggtcttatctgcctatttcatgggaactcaacccaccaaatggtcatgttggagacacccgctgtgcctgtgcggctgtggtcctttggcaaatccttagagttgaattgtgacggcagttgatatccttagaccttcgggaaagcaaaaagcgataaagagatcgcagatggatattgtgctgtagcactttcagatggtggttcgtgtcagtcgattaatccactcccacatgagaagaattgtatattgtgctccctgaactctatcaggagagctgctgtagcagtcactggacatcgataatctcgaagatactgttgctagtctgtactggtactgcacaggagtgtttgttatctggccatccagtccagcaagctggatgtgtgcgtatgttacatctgtctgcctgaaccaggtggtgtaaaaataggccaagaaagcatcggaatgtgcaggacaaggcggcggcggtgcagatctttctcccttttcttgcgggcggcaaaggagagagactgcgagccaaggaacaggccaacaaatatctgaggcccgatattttctcctgccccagccacgtggaaaagcgccgtcacgtaggcgtaaagctcccgtccagtccagggcccggtcggctcggctgccgatccttcttcaatccctcgcctgcaactggctctctgtccccttctgctccccccacggttccccagagcccgagccaaatctaggggcttccttcatccgagcgtggtttcaattctaggggtagtcacctcacctgaattccgcccaaataaattcgtcgctgccttgtgatccttggggtttccttggttcttgagttgcgatcttctgctggttcgtgtcccccaatccgtaatcaatccggcgtctaggaaaccaattgctgctcagttctcttatttgctcctcgccttccttcctccagcctggttaaaatatcgaaaggggatttttttttaaaaatctgctcatcgaggaagcagggaagacaagaattgttgcatcggataaaggtcgggtgaaaatacaagcaaatcctgggaactcgcgtccctttgctaggtggttctttcctgatacaaagaacacaatgggcgatgtgtccttgaacggacccattaaggctgctgagccaggtgccggtggcattgccaagggcaatcaagttctggacacgatgtccgccgggtggacagacgagagacacaggctgtatataagctctatggaggcctctttcgtcgatcaactgtacaaccacgggagccgtccgcgcaacgcaaacggcaccgccttcaaggctctccgcagggagtacgtcgagtatgagaagaccgatgctcctgtgcgaaggggggctaagtgctgcggcgttcctgcaaatccttggatgcagcatttcaggccacgtagtgatggcggtaataacgcgcgaggcgatgggctcggggattctgtgggcgatcttgaatctggcactgaggcaaaccggaagagcctctcagcgtctcatggaagggaacgggacgcttgtgagggagaaccccagcttctccatgaaagtagagaggtctctgatcaaaattttgctgacgacgaggctgaagctgaaacagaatcaatgaaagcatacaagaaaaggagattaagcaggacaatgatcaactaaatttgcagggtcaattagcttagcctgttgcaggaattgagatgactgtcctaaaaggaggcagtaagatgatgggacatgtcttacgaaattttcagctgttgcctcttggtagccaaggcactttgaatccgaaggaaggtgttgaagggtagttgttagtgatcttgtgatgatataacgagctctggagcagttagcatcggcattttagtggattatgttcttgttatgtgtatctgtctatttttcagtcctcatcggtagtgctgcatagtacctcgctctctcgtcagaaggatattaggctaggtcactgttattaaatttttcaataacagtgaagtgtacatgtgtttgccaaatggtgagaatcattattgatttccaattcacaaactattctttatgcctcactccgtggatgtcgcggacatgtaacatggtcccggaaggaaggtacagcatacgacgtgcttgctgttgaacgatgatctttttaaaaaagaaaaaaaaaa

SEQ ID NO: 84721 - DNA, 1657 bp, Zea Mays
caacggcccaataggccagaacgcatcactacgtctctgcagaagcttcctagggttttttaggcgtcgcagataagagatcccctcactgcattccctctgagcgccgccactccctgacatcgagaccggctgcccgaccccggtccggcgatccctctgcacccctttctttgcgctgccagccccaatctctcgcatccctgtcaaccatggcggcgtcagcaggcggaggcgcggtgcgcgcgctgtcccagaaggagcaggacatacagatgatgctcgcggccgacgtccacctcggcaccaagaactgcgatttccagatggagcggcatctacatcatcaacctgggcaagacatgggataagctccagctcgcggcgagggttattgttgccattgagaacccacaagacatcatcgtccagtcggcccgcccctacggccagcgtgctgtcctcaagttcgcgcagtacactggcgcccatgccatcgctgggaggcacacccctggtaccttcaccaatcagctccagacctctttcagcgagcctcgcctgctcatccttactgacccaaggactgaccatcagccaatcaaggagtctgctctggggaacatcccgaccattgccttctgcgacactgactctcccatgcggtatgtcgatatcggcatcccagccaacaacaaggggaggaacagcattggatgcctgttctggcttttggccaggatggttctgcagatgaggggcactatcctccctgggcacaagtgggaagtcatggttgatctgttcttctacagagacccagaggaagcaaaggagcaggaggaggaagctgctgcggcccctgagtttgctgcagtcactgattaccaaggagctgatcagtggggcggtgaccagtggacctctgatgtggctgcaccacctgttgctcctactggtgctgattggggtgctgcaccagctccggttcctaccggtgatggctgggatcaaactgtggcccctgttcctgtggatggcactgttcctccagtggtcgctcctactggttgggaatcagcagcccagcccactgcccaaggctgggaataggcgttgaggcatcactttgagacgtcttgtgcgggattattccaaagtatgaatgcccgaagtcagacgacatattttgtagctaatttgctatgctttgtgcacttatgtttttagggctttctagttgaaccggtgcccctgttctgtttttaaaattgatgctatgaaagagcctatgaagtataagtactagcccctttgttttctgtcgaccgcattccatggtttggttcgaaccgttcgatgtcgtagttctatatgataatacattcagttgattttgatatatggatattaatattatttgtccatgtttgatttagtggttgagaatgagagatgtcctgcaactttctcagtggaccttcattctcgagtctcgagtatgaaactatccgtttatacgcaccaccgaccagtgtacctttcacctgaccaaacggaggtaaaagttttaaaaaatgtaggctacttgtttttttatgaaaatgtaaaaaaaaataaataattaagaagttagaaaacaacaaattccaaacaa

SEQ ID NO: 84722 - DNA, 1657 bp, Zea Mays
caacggcccaataggccagaacgcatcactacgtctctgcagaagcttcctagggttttttaggcgtcgcagataagagatcccctcactgcattccctctgagcgccgccactccctgacatcgagaccggctgcccgaccccggtccggcgatccctctgcacccctttctttgcgctgccagccccaatctctcgcatccctgtcaaccatggcggcgtcagcaggcggaggcgcggtgcgcgcgctgtcccagaaggagcaggacatacagatgatgctcgcggccgacgtccacctcggcaccaagaactgcgatttccagatggagcggtatctacatcatcaacctgggcaagacatgggataagctccagctcgcggcgagggttattgttgccattgagaacccacaagacatcatcgtccagtcggcccgcccctacggccagcgtgctgtcctcaagttcgcgcagtacactggcgcccatgccatcgctgggaggcacacccctggtaccttcaccaatcagctccagacctctttcagcgagcctcgcctgctcatccttactgacccaaggactgaccatcagccaatcaaggagtctgctctggggaacatcccgaccattgccttctgcgacactgactctcccatgcggtatgtcgatatcggcatcccagccaacaacaaggggaggaacagcattggatgcctgttctggcttttggccaggatggttctgcagatgaggggcactatcctccctgggcacaagtgggaagtcatggttgatctgttcttctacagagacccagaggaagcaaaggagcaggaggaggaagctgctgcggcccctgagtttgctgcagtcactgattaccaaggagctgatcagtggggcggtgaccagtggacctctgatgtggctgcaccacctgttgctcctactggtgctgattggggtgctgcaccagctccggttcctaccggtgatggctgggatcaaactgtggcccctgttcctgtggatggcactgttcctccagtggtcgctcctactggttgggaatcagcagcccagcccactgcccaaggctgggaataggcgttgaggcatcactttgagacgtcttgtgcgggattattccaaagtatgaatgcccgaagtcagacgacatattttgtagctaatttgctatgctttgtgcacttatgtttttagggctttctagttgaaccggtgcccctgttctgtttttaaaattgatgctatgaaagagcctatgaagtataagtactagcccctttgttttctgtcgaccgcattccatggtttggttcgaaccgttcgatgtcgtagttctatatgataatacattcagttgattttgatatatggatattaatattatttgtccatgtttgatttagtggttgagaatgagagatgtcctgcaactttctcagtggaccttcattctcgagtctcgagtatgaaactatccgtttatacgcaccaccgaccagtgtacctttcacctgaccaaacggaggtaaaagttttaaaaaatgtaggctacttgtttttttatgaaaatgtaaaaaaaaataaataattaagaagttagaaaacaacaaattccaaacaa

SEQ ID NO: 84723 - DNA, 1611 bp, Zea Mays
caacggcccaataggccagaacgcatcactacgtctctgcagaagcttcctagggttttttaggcgtcgcagataagagatcccctcactgcattccctctgagcgccgccactccctgacatcgagaccggctgcccgaccccggtccggcgatccctctgcacccctttctttgcgctgccagccccaatctctcgcatccctgtcaaccatggcggcgtcagcaggcggaggcgcggtgcgcgcgctgtcccagaaggagcaggacatacagatgatgctcgcggccgacgtccacctcggcaccaagaactgcgatttccagatggagcggtatgtctttaagcgtcgcaccgacggcatctacatcatcaacctgggcaagacatgggataagctccagctcgcggcgagggttattgttgccattgagaacccacaagacatcatcgtccagtcggcccgcccctacggccagcgtgctgtcctcaagttcgcgcagtacactggcgcccatgccatcgctgggaggcacacccctggtaccttcaccaatcagctccagacctctttcagcgagcctcgcctgctcatccttactgacccaaggactgaccatcagccaatcaaggagtctgctctggggaacatcccgaccattgccttctgcgacactgactctcccatgcggtatgtcgatatcggcatcccagccaacaacaaggggaggaacagcattggatgcctgttctggcttttggccaggatggttctgcagatgaggggcactatcctccctgggcacaagtgggaagtcatggttgatctgttcttctacagagacccagaggaagcaaaggagcaggaggaggaagctgctgcggcccctgagtttgctgcagtcactgattaccaaggagctgatcagtggggcggtgaccagtggacctctgatgtggctgcaccacctgttgctcctactggtgctgattggggtgctgcaccagtggtcgctcctactggttgggaatcagcagcccagcccactgcccaaggctgggaataggcgttgaggcatcactttgagacgtcttgtgcgggattattccaaagtatgaatgcccgaagtcagacgacatattttgtagctaatttgctatgctttgtgcacttatgtttttagggctttctagttgaaccggtgcccctgttctgtttttaaaattgatgctatgaaagagcctatgaagtataagtactagcccctttgttttctgtcgaccgcattccatggtttggttcgaaccgttcgatgtcgtagttctatatgataatacattcagttgattttgatatatggatattaatattatttgtccatgtttgatttagtggttgagaatgagagatgtcctgcaactttctcagtggaccttcattctcgagtctcgagtatgaaactatccgtttatacgcaccaccgaccagtgtacctttcacctgaccaaacggaggtaaaagttttaaaaaatgtaggctacttgtttttttatgaaaatgtaaaaaaaaataaataattaagaagttagaaaacaacaaattccaaacaa

SEQ ID NO: 84724 - DNA, 462 bp, Zea Mays
cagtggggtggtgaccagtggacctctgatgtggctgcaccacctgttgctcctactggtgctgattggggtgctgcaccagtggtcgctcctactggttgggaatcagcagcccagcccactgcccaaggctgggagtaggcgttgaggcatcactctgagacgtcttgtgcgggattattccaaagtatgaatgcccgaagtcagacgacatattttgtagctaatttgctatgctttgtgcacttatgtttttagggctttctagttgaaccggtgcccctgttctgtttttaaaattgcctctatgtaagaggctgtgcagtataagtactagcccctttgttttctgtcgaccgcattgcatggtttggttcgaacctttcgatgtcgtagttctatatgataatacattcagttgattttgatatatgataatacattcagttcaatggaccttca

SEQ ID NO: 84725 - DNA, 2503 bp, Zea Mays
gttggactgttgccttagtccatggattttttaaacaggtcgaagctctccgtatctgggaaggatttttggttgacccttatagctaggcgctcacgacactttgcgggaaccagattcttgaaacgtggcgttaatgaaaagggcagggtagcgaatgatgttgagactgagcagattgtttttgaagacacatctgatggaatcccaactcagatggcttctgctgtacagcatagaggatcgatacctcttgtctggtttcaggaaacttcaagacttaatattagaccagatattatattgaaacctgatgtggactacaaggcgactcgccttcattttgagaaccttgcacttagatatgggaatccagtaatcatcttgaacttaataaagacccgtgagaagaagccccgtgaatctctgctccgtgcagaatttgcaaaggctatccattacattaacaagagcctgcctgatgacaagcgtctaaaatttttacacatggatctgagtaagctttctcgaaggaaaggcaccaatgtgcttgcactgttgaccaaggtggcatcagatgtgttggatctaactgaattcctccactgtgaaataagtacatcaacaaaacctgatgacacctcaagtggagaaagaactgctgccaaaccacatgatgacagaagtagcagtgatcaaactgaatgtgcagctaagttggcacctcttttattacagaagggtgtcctcaggacaaattgcatagactgcttagatcgcacaaatgttgcacaatttgcatatggtttagctgctttagggcgtcaacttcatgcattggggcttactgaagcacagaaaattgaattgcacgatcctctggctgatgatctgatggacttctatgaatggatgggtgatacattagctattcagtatggtggttctgctgctcacaacaagatcttctgcgagcaaaggggtcaatggaaggcagcaacccaatctcaggagttccttcggaccattcaacgctactataataacgcctacactgatcacgacaagcaggatgctataaacatgttcttaggtcatttccaacctcagcaagggaaacctgcactgtggaagctggactcagatcagcattacaacattgggaggcaagggactttaaaagaagagattggaagatcgttcataaagaggtcactatcagatggtaacatactgttggagaacaacttgcctgtaactagctgtaacaatgaaacaaacaacacagaattgcttccaatgcaacagctggatgatattagagaacctaccgactctgcgccagagatctccatatgtgaacctaacccgtgctccagtgtgaactacggcagagtgcctggaagacactctatttcagaagagcggcagagttatttgaaaagattaggttaccctgaattgcattcttcaaatttcctcgaccttgatttgttgtcgtcttctgggaattcctgtgacgaggaagtttttgagaggtcatcactgatcaattcacctatggatgtggtcagcgttgaatcatctacgtcgtacagtgaacaaggacacactgatgagggaagggatgacatggatctttcccgttcaagcagccaggtctcagacgttcgggactattctgaccggtttgcgcactgggtcgcggatggaggcatgctttggtaaaaggccatggacttttgtcttgcttgacaactcggtagaatctgtgaccgcaggaaatggatgcgagcagatgacatggctagatgcagagatggtgggcgtggaaaaagtctcgcatcggtatggttgtgaccactggaaggcttgaacgctgatattcatcggatggggatggagatttcggtggttgggttgagtacaagattcaatttgctgtggtgaaaaattttaccatagtttgtttagacaataaataggcaaaatatatatgattcttttattttagcttacagtgcgtcccccttctccatagaaaattctgaaaagcaaaaaaaaaaaggaaaatctagaaaaaggaggaaaaaaaacttagataaagaacacttttgctgtaaatagttagtatgttacggaagtataaatattgtgaaattttgctgacgacacgacttcgctcaaacgtgtaatatactgttggacagtgttaacaaaatatatcccgtatcagtacgaaaactgtgtaaatttactgtaacgcacagtatgcattatttatttatttgtttctcagattatggaagagataaaattgcaaaaatatcttaacctctgacttctcacggtgcggccagcctcggtcaagctccccggcggcgggacgaggccggtgtccgcttcctaccacagctagggatggaaacgaaagactcgagctcggtgggttcgctggctagcttcgctcggtttgtctcggctctcaaagagctgtagaagg

SEQ ID NO: 84726 - DNA, 2498 bp, Zea Mays
gttggactgttgccttagtccatggattttttaaacaggtcgaagctctccgtatctgggaaggatttttggttgacccttatagctaggcgctcacgacactttgcgggaaccagattcttgaaacgtggcgttaatgaaaagggcagggtagcgaatgatgttgagactgagcagattgtttttgaagacacatctgatggaatcccaactcagatggcttctgctgtacagcatagaggatcgatacctcttgtctggtttcaggaaacttcaagacttaatattagaccagatattatattgaaacctgatgtggactacaaggcgactcgccttcattttgagaaccttgcacttagatatgggaatccagtaatcatcttgaacttaataaagacccgtgagaagaagccccgtgaatctctgctccgtgcagaatttgcaaaggctatccattacattaacaagagcctgcctgatgacaagcgtctaaaatttttacacatggatctgagtaagctttctcgaaggcaccaatgtgcttgcactgttgaccaaggtggcatcagatgtgttggatctaactgaattcctccactgtgaaataagtacatcaacaaaacctgatgacacctcaagtggagaaagaactgctgccaaaccacatgatgacagaagtagcagtgatcaaactgaatgtgcagctaagttggcacctcttttattacagaagggtgtcctcaggacaaattgcatagactgcttagatcgcacaaatgttgcacaatttgcatatggtttagctgctttagggcgtcaacttcatgcattggggcttactgaagcacagaaaattgaattgcacgatcctctggctgatgatctgatggacttctatgaatggatgggtgatacattagctattcagtatggtggttctgctgctcacaacaagatcttctgcgagcaaaggggtcaatggaaggcagcaacccaatctcaggagttccttcggaccattcaacgctactataataacgcctacactgatcacgacaagcaggatgctataaacatgttcttaggtcatttccaacctcagcaagggaaacctgcactgtggaagctggactcagatcagcattacaacattgggaggcaagggactttaaaagaagagattggaagatcgttcataaagaggtcactatcagatggtaacatactgttggagaacaacttgcctgtaactagctgtaacaatgaaacaaacaacacagaattgcttccaatgcaacagctggatgatattagagaacctaccgactctgcgccagagatctccatatgtgaacctaacccgtgctccagtgtgaactacggcagagtgcctggaagacactctatttcagaagagcggcagagttatttgaaaagattaggttaccctgaattgcattcttcaaatttcctcgaccttgatttgttgtcgtcttctgggaattcctgtgacgaggaagtttttgagaggtcatcactgatcaattcacctatggatgtggtcagcgttgaatcatctacgtcgtacagtgaacaaggacacactgatgagggaagggatgacatggatctttcccgttcaagcagccaggtctcagacgttcgggactattctgaccggtttgcgcactgggtcgcggatggaggcatgctttggtaaaaggccatggacttttgtcttgcttgacaactcggtagaatctgtgaccgcaggaaatggatgcgagcagatgacatggctagatgcagagatggtgggcgtggaaaaagtctcgcatcggtatggttgtgaccactggaaggcttgaacgctgatattcatcggatggggatggagatttcggtggttgggttgagtacaagattcaatttgctgtggtgaaaaattttaccatagtttgtttagacaataaataggcaaaatatatatgattcttttattttagcttacagtgcgtcccccttctccatagaaaattctgaaaagcaaaaaaaaaaaggaaaatctagaaaaaggaggaaaaaaaacttagataaagaacacttttgctgtaaatagttagtatgttacggaagtataaatattgtgaaattttgctgacgacacgacttcgctcaaacgtgtaatatactgttggacagtgttaacaaaatatatcccgtatcagtacgaaaactgtgtaaatttactgtaacgcacagtatgcattatttatttatttgtttctcagattatggaagagataaaattgcaaaaatatcttaacctctgacttctcacggtgcggccagcctcggtcaagctccccggcggcgggacgaggccggtgtccgcttcctaccacagctagggatggaaacgaaagactcgagctcggtgggttcgctggctagcttcgctcggtttgtctcggctctcaaagagctgtagaagg

SEQ ID NO: 84727 - DNA, 4870 bp, Zea Mays
cttttgtggacgacgccgtcgtcgccaggcagcttgcatgtggctctgcgctgcgcccttgtcttcctcttcctccccactccgcatctccagaaaattccgttattttactcccagtatttagcctcgacgattgctcgggactctctttacaggtcctatttcgcggtttcctcatcctcctaatcctaacctccttccctgttttattcttcctcgtcgagcctgattcccctgccgccaccgcggccagcgccgccctcgccgccggtcgccaccgccgccgccaccgtccactcctcgccctcacctaatctcactcggagggagaaaaaaaaaacctcgccctcgccgccgggttgagttgaatctgtggtcgctgggttgaattgaatcgatttagatccgtttatccctagttcgggtgcccgtgttctggaaggtggaagctttggttgggttttctcttccagagcattaatgtttctgagggcctaagatgctctatttgaagcagcccacgaggagctgagtctttgtgttttttttatcgttctctctcgtcgtctgttgatctgatcggatggaggctatgacgggtggcaaattccttcaaaagtttcgactctacgaaaccagatcgaaattttatcttattggaagagacaagagcaggattcactggagggtgctaaaaattgatcggttggagtccactgagctgggtgtcgatgaggatccaactatttacacggaaagtgaatgtcaagaactgctttggcggatccatgaggggaacatgttgactggtggactgaaatttgtcacaaaatgttacggaatagttggttttgtaaagtttcttggtccttattacatggttataataaccagtagaaggaaaatcggcacaatatgcggccatgaaatttattccgtcggcaagagtgaaatgattgcaatttcaagtgttacagtctggcccaacgtggcttattctagggacgagaacaggtctttttttttcaacatgtaaatattgtgtattgcctgttgtaatttaatcagtggttcttaacattatcaataattccagcttgctatctagtgtacgttttatagctttgctattcatctacctcattgttggttgctctctttccacatatttgatctcattttggttgctatgttgtgttgagaactcttggtgttgctgtgccccctccctctcctttgtccgtattgttttgcataatgacattccagttttttttcatttgttcatgtcctagtagaacatggacaattccattttatgattttgttcgattgtacaataatacagtaacattttgtcgttgtgttcatttagctccatttctcctatgtgtataaatttgtttgttcagaaacaacgtacatccaactcatatagccaatatacataatggaacaatggaaattcttgcagttctgagccttgtgtacttgctcatatggttggagatataagcgccttctttgctcagttgacctttcgaaggatttcttcttcagctactcttacaacatcatgcgcagccttcagaagaacataacccagaagaatactgggcaggctgtttatgaaccaatgtgtgtatggaatgaatttctgacacgagcaattcggaatcatctcaagaatacatgttggactgttgccttagtccatggattttttaaacagtatcatctattcatcattgaagaccacaagtagggctgctgctaactcaatgacacccccactaacttaagtgttttactccgcgtctcatgacctgatatatagtgaaagcttgaaacaaggttggcaaaggcatgctttgtataacctgctgatttttttttcagtttgagctgcttgaagctttcttgagttgaaacctttgctcataagtctcagcagacttattatttttattcagttctaatctatcttttgaagggcaggcctggtgcagtggtgagagctgtctcacttagtcaccaggccgtgggttcaaagcagcctctccgcatttgcgggggaagacttgcatcggtttatctctttcctagaccccactcatgtgggagcctccggtacttggtctgctccttctaatctattgtttataaatgttgttgaatgttgatacagactaacatcatatagtcttaacttttattcctaatccttcattatgaaatttcattgctatattttatccattttgatttttctcacaagtgccaggcactgtctcttgatcctagtccaaggacaacaaaaacatctcaaaaaatgccagtcctgattacatatgcaaataaagtgccatatgaagacatgctaatacatttgttttggtatgacagtcgaagctctccgtatctgggaaggatttttggttgacccttatagctaggcgctcacgacactttgcgggaaccagattcttgaaacgtggcgttaatgaaaagggcagggtagcgaatgatgttgagactgagcagattgtttttgaagacacatctgatggaatcccaactcagatggcttctgctgtacagcatagaggatcgatacctcttgtctggtttcaggaaacttcaagacttaatattagaccagatattatattgaaacctgatgtggactacaaggcgactcgccttcattttgagaaccttgcacttagatatgggaatccagtaatcatcttgaacttaataaagacccgtgagaagaagccccgtgaatctctgctccgtgcagaatttgcaaaggctatccattacattaacaagagcctgcctgatgacaagcgtctaaaatttttacacatggatctgagtaagctttctcgaaggaaaggcaccaatgtgcttgcactgttgaccaaggtggcatcagatgtgttggatctaactgaattcctccactgtgaaataagtacatcaacaaaacctgatgacacctcaagtggagaaagaactgctgccaaaccacatgatgacagaagtagcagtgatcaaactgaatgtgcagctaagttggcacctcttttattacagaagggtgtcctcaggacaaattgcatagactgcttagatcgcacaaatgttgcacaatttgcatatggtttagctgctttagggcgtcaacttcatgcattggggcttactgaagcacagaaaattgaattgcacgatcctctggctgatgatctgatggacttctatgaatggatgggtgatacattagctattcagtatggtggttctgctgctcacaacaagatcttctgcgagcaaaggggtcaatggaaggcagcaacccaatctcaggagttccttcggaccattcaacgctactataataacgcctacactgatcacgacaagcaggatgctataaacatgttcttaggtcatttccaacctcagcaagggaaacctgcactgtggaagctggactcagatcagcattacaacattgggaggcaagggactttaaaagaagagattggaagatcgttcataaagaggtcactatcagatggtaacatactgttggagaacaacttgcctgtaactagctgtaacaatgaaacaaacaacacagaattgcttccaatgcaacagctggatgatattagagaacctaccgactctgcgccagagatctccatatgtgaacctaacccgtgctccagtgtgaactacggcagagtgcctggaagacactctatttcagaagagcggcagagttatttgaaaagattaggttaccctgaattgcattcttcaaatttcctcgaccttgatttgttgtcgtcttctgggaattcctgtgacgaggaagtttttgagaggtcatcactgatcaattcacctatggatgtggtcagcgttgaatcatctacgtcgtacagtgaacaaggacacactgatgagggaagggatgacatggatctttcccgttcaagcagccaggtctcagacgttcgggactattctgaccggtttgcgcactgggtcgcggatggaggcatgctttggtaaaaggccatggacttttgtcttgcttgacaactcggtagaatctgtgaccgcaggaaatggatgcgagcagatgacatggctagatgcagagatggtgggcgtggaaaaagtctcgcatcggtatggttgtgaccactggaaggcttgaacgctgatattcatcggatggggatggagatttcggtggttgggttgagtacaagattcaatttgctgtggtgaaaaattttaccatagtttgtttagacaataaataggcaaaatatatatgattcttttattttagcttacagtgcgtcccccttctccatagaaaattctgaaaagcaaaaaaaaaaaggaaaatctagaaaaaggaggaaaaaaaacttagataaagaacacttttgctgtaaatagttagtatgttacggaagtataaatattgtgaaattttgctgacgacacgacttcgctcaaacgtgtaatatactgttggacagtgttaacaaaatatatcccgtatcagtacgaaaactgtgtaaatttactgtaacgcacagtatgcattatttatttatttgtttctcagattatggaagagataaaattgcaaaaatatcttaacctctgacttctcacggtgcggccagcctcggtcaagctccccggcggcgggacgaggccggtgtccgcttcctaccacagctagggatggaaacgaaagactcgagctcggtgggttcgctggctagcttcgctcggtttgtctcggctctcaaagagctgtagaagg

SEQ ID NO: 84728 - DNA, 4347 bp, Zea Mays
cttttgtggacgacgccgtcgtcgccaggcagcttgcatgtggctctgcgctgcgcccttgtcttcctcttcctccccactccgcatctccagaaaattccgttattttactcccagtatttagcctcgacgattgctcgggactctctttacaggtcctatttcgcggtttcctcatcctcctaatcctaacctccttccctgttttattcttcctcgtcgagcctgattcccctgccgccaccgcggccagcgccgccctcgccgccggtcgccaccgccgccgccaccgtccactcctcgccctcacctaatctcactcggagggagaaaaaaaaaacctcgccctcgccgccgggttgagttgaatctgtggtcgctgggttgaattgaatcgatttagatccgtttatccctagttcgggtgcccgtgttctggaaggtggaagctttggttgggttttctcttccagagcattaatgtttctgagggcctaagatgctctatttgaagcagcccacgaggagctgagtctttgtgttttttttatcgttctctctcgtcgtctgttgatctgatcggatggaggctatgacgggtggcaaattccttcaaaagtttcgactctacgaaaccagatcgaaattttatcttattggaagagacaagagcaggattcactggagggtgctaaaaattgatcggttggagtccactgagctgggtgtcgatgaggatccaactatttacacggaaagtgaatgtcaagaactgctttggcggatccatgaggggaacatgttgactggtggactgaaatttgtcacaaaatgttacggaatagttggttttgtaaagtttcttggtccttattacatggttataataaccagtagaaggaaaatcggcacaatatgcggccatgaaatttattccgtcggcaagagtgaaatgattgcaatttcaagtgttacagtctggcccaacgtggcttattctagggacgagaacaggtctttttttttcaacatgtaaatattgtgtattgcctgttgtaatttaatcagtggttcttaacattatcaataattccagcttgctatctagtgtacgttttatagctttgctattcatctacctcattgttggttgctctctttccacatatttgatctcattttggttgctatgttgtgttgagaactcttggtgttgctgtgccccctccctctcctttgtccgtattgttttgcataatgacattccagttttttttcatttgttcatgtcctagtagaacatggacaattccattttatgattttgttcgattgtacaataatacagtaacattttgtcgttgtgttcatttagctccatttctcctatgtgtataaatttgtttgttcagaaacaacgtacatccaactcatatagccaatatacataatggaacaatggaaattcttgcagttctgagccttgtgtacttgctcatatggttggaggtatatatagaaaagtttcgaatttccttgctcctgtagtattctgcttattatcattcaccattctatacgacaagtatatttttcaacttcttttttcatttttgtcttatgaagaaatttatgctctcacctctcaatttctgtagatataagcgccttctttgctcagttgacctttcgaaggatttcttcttcagctactcttacaacatcatgcgcagccttcagaagaacataacccagaagaatactgggcaggctgtttatgaaccaatgtgtgtatggaatgaatttctgacacgagcaattcggaatcatctcaagaatacatgttggactgttgccttagtccatggattttttaaacagagtcgaagctctccgtatctgggaaggatttttggttgacccttatagctaggcgctcacgacactttgcgggaaccagattcttgaaacgtggcgttaatgaaaagggcagggtagcgaatgatgttgagactgagcagattgtttttgaagacacatctgatggaatcccaactcagatggcttctgctgtacagcatagaggatcgatacctcttgtctggtttcaggaaacttcaagacttaatattagaccagatattatattgaaacctgatgtggactacaaggcgactcgccttcattttgagaaccttgcacttagatatgggaatccagtaatcatcttgaacttaataaagacccgtgagaagaagccccgtgaatctctgctccgtgcagaatttgcaaaggctatccattacattaacaagagcctgcctgatgacaagcgtctaaaatttttacacatggatctgagtaagctttctcgaaggaaaggcaccaatgtgcttgcactgttgaccaaggtggcatcagatgtgttggatctaactgaattcctccactgtgaaataagtacatcaacaaaacctgatgacacctcaagtggagaaagaactgctgccaaaccacatgatgacagaagtagcagtgatcaaactgaatgtgcagctaagttggcacctcttttattacagaagggtgtcctcaggacaaattgcatagactgcttagatcgcacaaatgttgcacaatttgcatatggtttagctgctttagggcgtcaacttcatgcattggggcttactgaagcacagaaaattgaattgcacgatcctctggctgatgatctgatggacttctatgaatggatgggtgatacattagctattcagtatggtggttctgctgctcacaacaagatcttctgcgagcaaaggggtcaatggaaggcagcaacccaatctcaggagttccttcggaccattcaacgctactataataacgcctacactgatcacgacaagcaggatgctataaacatgttcttaggtcatttccaacctcagcaagggaaacctgcactgtggaagctggactcagatcagcattacaacattgggaggcaagggactttaaaagaagagattggaagatcgttcataaagaggtcactatcagatggtaacatactgttggagaacaacttgcctgtaactagctgtaacaatgaaacaaacaacacagaattgcttccaatgcaacagctggatgatattagagaacctaccgactctgcgccagagatctccatatgtgaacctaacccgtgctccagtgtgaactacggcagagtgcctggaagacactctatttcagaagagcggcagagttatttgaaaagattaggttaccctgaattgcattcttcaaatttcctcgaccttgatttgttgtcgtcttctgggaattcctgtgacgaggaagtttttgagaggtcatcactgatcaattcacctatggatgtggtcagcgttgaatcatctacgtcgtacagtgaacaaggacacactgatgagggaagggatgacatggatctttcccgttcaagcagccaggtctcagacgttcgggactattctgaccggtttgcgcactgggtcgcggatggaggcatgctttggtaaaaggccatggacttttgtcttgcttgacaactcggtagaatctgtgaccgcaggaaatggatgcgagcagatgacatggctagatgcagagatggtgggcgtggaaaaagtctcgcatcggtatggttgtgaccactggaaggcttgaacgctgatattcatcggatggggatggagatttcggtggttgggttgagtacaagattcaatttgctgtggtgaaaaattttaccatagtttgtttagacaataaataggcaaaatatatatgattcttttattttagcttacagtgcgtcccccttctccatagaaaattctgaaaagcaaaaaaaaaaaggaaaatctagaaaaaggaggaaaaaaaacttagataaagaacacttttgctgtaaatagttagtatgttacggaagtataaatattgtgaaattttgctgacgacacgacttcgctcaaacgtgtaatatactgttggacagtgttaacaaaatatatcccgtatcagtacgaaaactgtgtaaatttactgtaacgcacagtatgcattatttatttatttgtttctcagattatggaagagataaaattgcaaaaatatcttaacctctgacttctcacggtgcggccagcctcggtcaagctccccggcggcgggacgaggccggtgtccgcttcctaccacagctagggatggaaacgaaagactcgagctcggtgggttcgctggctagcttcgctcggtttgtctcggctctcaaagagctgtagaagg

SEQ ID NO: 84729 - DNA, 4467 bp, Zea Mays
cttttgtggacgacgccgtcgtcgccaggcagcttgcatgtggctctgcgctgcgcccttgtcttcctcttcctccccactccgcatctccagaaaattccgttattttactcccagtatttagcctcgacgattgctcgggactctctttacaggtcctatttcgcggtttcctcatcctcctaatcctaacctccttccctgttttattcttcctcgtcgagcctgattcccctgccgccaccgcggccagcgccgccctcgccgccggtcgccaccgccgccgccaccgtccactcctcgccctcacctaatctcactcggagggagaaaaaaaaaacctcgccctcgccgccgggttgagttgaatctgtggtcgctgggttgaattgaatcgatttagatccgtttatccctagttcgggtgcccgtgttctggaaggtggaagctttggttgggttttctcttccagagcattaatgtttctgagggcctaagatgctctatttgaagcagcccacgaggagctgagtctttgtgttttttttatcgttctctctcgtcgtctgttgatctgatcggatggaggctatgacgggtggcaaattccttcaaaagtttcgactctacgaaaccagatcgaaattttatcttattggaagagacaagagcaggattcactggagggtgctaaaaattgatcggttggagtccactgagctgggtgtcgatgaggatccaactatttacacggaaagtgaatgtcaagaactgctttggcggatccatgaggggaacatgttgactggtggactgaaatttgtcacaaaatgttacggaatagttggttttgtaaagtttcttggtccttattacatggttataataaccagtagaaggaaaatcggcacaatatgcggccatgaaatttattccgtcggcaagagtgaaatgattgcaatttcaagtgttacagtctggcccaacgtggcttattctagggacgagaacaggtctttttttttcaacatgtaaatattgtgtattgcctgttgtaatttaatcagtggttcttaacattatcaataattccagcttgctatctagtgtacgttttatagctttgctattcatctacctcattgttggttgctctctttccacatatttgatctcattttggttgctatgttgtgttgagaactcttggtgttgctgtgccccctccctctcctttgtccgtattgttttgcataatgacattccagttttttttcatttgttcatgtcctagtagaacatggacaattccattttatgattttgttcgattgtacaataatacagtaacattttgtcgttgtgttcatttagctccatttctcctatgtgtataaatttgtttgttcagaaacaacgtacatccaactcatatagccaatatacataatggaacaatggaaattcttgcagttctgagccttgtgtacttgctcatatggttggaggtatatatagaaaagtttcgaatttccttgctcctgtagtattctgcttattatcattcaccattctatacgacaagtatatttttcaacttcttttttcatttttgtcttatgaagaaatttatgctctcacctctcaatttctgtagatataagcgccttctttgctcagttgacctttcgaaggatttcttcttcagctactcttacaacatcatgcgcagccttcagaagaacataacccagaagaatactgggcaggctgtttatgaaccaatgtgtgtatggaatgaatttctgacacgagcaattcggaatcatctcaagaatacatgttggactgttgccttagtccatggattttttaaacagtatcatctattcatcattgaagaccacaagtagggctgctgctaactcaatgacacccccactaacttaagtgttttactccgcgtctcatgacctgatatatagtgaaagcttgaaacaagtcgaagctctccgtatctgggaaggatttttggttgacccttatagctaggcgctcacgacactttgcgggaaccagattcttgaaacgtggcgttaatgaaaagggcagggtagcgaatgatgttgagactgagcagattgtttttgaagacacatctgatggaatcccaactcagatggcttctgctgtacagcatagaggatcgatacctcttgtctggtttcaggaaacttcaagacttaatattagaccagatattatattgaaacctgatgtggactacaaggcgactcgccttcattttgagaaccttgcacttagatatgggaatccagtaatcatcttgaacttaataaagacccgtgagaagaagccccgtgaatctctgctccgtgcagaatttgcaaaggctatccattacattaacaagagcctgcctgatgacaagcgtctaaaatttttacacatggatctgagtaagctttctcgaaggaaaggcaccaatgtgcttgcactgttgaccaaggtggcatcagatgtgttggatctaactgaattcctccactgtgaaataagtacatcaacaaaacctgatgacacctcaagtggagaaagaactgctgccaaaccacatgatgacagaagtagcagtgatcaaactgaatgtgcagctaagttggcacctcttttattacagaagggtgtcctcaggacaaattgcatagactgcttagatcgcacaaatgttgcacaatttgcatatggtttagctgctttagggcgtcaacttcatgcattggggcttactgaagcacagaaaattgaattgcacgatcctctggctgatgatctgatggacttctatgaatggatgggtgatacattagctattcagtatggtggttctgctgctcacaacaagatcttctgcgagcaaaggggtcaatggaaggcagcaacccaatctcaggagttccttcggaccattcaacgctactataataacgcctacactgatcacgacaagcaggatgctataaacatgttcttaggtcatttccaacctcagcaagggaaacctgcactgtggaagctggactcagatcagcattacaacattgggaggcaagggactttaaaagaagagattggaagatcgttcataaagaggtcactatcagatggtaacatactgttggagaacaacttgcctgtaactagctgtaacaatgaaacaaacaacacagaattgcttccaatgcaacagctggatgatattagagaacctaccgactctgcgccagagatctccatatgtgaacctaacccgtgctccagtgtgaactacggcagagtgcctggaagacactctatttcagaagagcggcagagttatttgaaaagattaggttaccctgaattgcattcttcaaatttcctcgaccttgatttgttgtcgtcttctgggaattcctgtgacgaggaagtttttgagaggtcatcactgatcaattcacctatggatgtggtcagcgttgaatcatctacgtcgtacagtgaacaaggacacactgatgagggaagggatgacatggatctttcccgttcaagcagccaggtctcagacgttcgggactattctgaccggtttgcgcactgggtcgcggatggaggcatgctttggtaaaaggccatggacttttgtcttgcttgacaactcggtagaatctgtgaccgcaggaaatggatgcgagcagatgacatggctagatgcagagatggtgggcgtggaaaaagtctcgcatcggtatggttgtgaccactggaaggcttgaacgctgatattcatcggatggggatggagatttcggtggttgggttgagtacaagattcaatttgctgtggtgaaaaattttaccatagtttgtttagacaataaataggcaaaatatatatgattcttttattttagcttacagtgcgtcccccttctccatagaaaattctgaaaagcaaaaaaaaaaaggaaaatctagaaaaaggaggaaaaaaaacttagataaagaacacttttgctgtaaatagttagtatgttacggaagtataaatattgtgaaattttgctgacgacacgacttcgctcaaacgtgtaatatactgttggacagtgttaacaaaatatatcccgtatcagtacgaaaactgtgtaaatttactgtaacgcacagtatgcattatttatttatttgtttctcagattatggaagagataaaattgcaaaaatatcttaacctctgacttctcacggtgcggccagcctcggtcaagctccccggcggcgggacgaggccggtgtccgcttcctaccacagctagggatggaaacgaaagactcgagctcggtgggttcgctggctagcttcgctcggtttgtctcggctctcaaagagctgtagaagg

SEQ ID NO: 84730 - DNA, 3850 bp, Zea Mays
ccctgctcgcagcgcagttgcgtggcgcttttgtggacgacgccgtcgtcgccaggcagcttgcatgtggctctgcgctgcgcccttgtcttcctcttcctccccactccgcatctccagaaaattccgttattttactcccagtatttagcctcgacgattgctcgggactctctttacaggtcctatttcgcggtttcctcatcctcctaatcctaacctccttccctgttttattcttcctcgtcgagcctgattcccctgccgccaccgcggccagcgccgccctcgccgccggtcgccaccgccgccgccaccgtccactcctcgccctcacctaatctcactcggagggagaaaaaaaaaacctcgccctcgccgccgggttgagttgaatctgtggtcgctgggttgaattgaatcgatttagatccgtttatccctagttcgggtgcccgtgttctggaaggtggaagctttggttgggttttctcttccagagcattaatgtttctgagggcctaagatgctctatttgaagcagcccacgaggagctgagtctttgtgttttttttatcgttctctctcgtcgtctgttgatctgatcggatggaggctatgacgggtggcaaattccttcaaaagtttcgactctacgaaaccagatcgaaattttatcttattggaagagacaagagcaggattcactggagggtgctaaaaattgatcggttggagtccactgagctgggtgtcgatgaggatccaactatttacacggaaagtgaatgtcaagaactgctttggcggatccatgaggggaacatgttgactggtggactgaaatttgtcacaaaatgttacggaatagttggttttgtaaagtttcttggtccttattacatggttataataaccagtagaaggaaaatcggcacaatatgcggccatgaaatttattccgtcggcaagagtgaaatgattgcaatttcaagtgttacagtctggcccaacgtggcttattctagggacgagaacagatataagcgccttctttgctcagttgacctttcgaaggatttcttcttcagctactcttacaacatcatgcgcagccttcagaagaacataacccagaagaatactgggcaggctgtttatgaaccaatgtgtgtatggaatgaatttctgacacgagcaattcggaatcatctcaagaatacatgttggactgttgccttagtccatggattttttaaacagtatcatctattcatcattgaagaccacaagtagggctgctgctaactcaatgacacccccactaacttaagtgttttactccgcgtctcatgacctgatatatagtgaaagcttgaaacaagtcgaagctctccgtatctgggaaggatttttggttgacccttatagctaggcgctcacgacactttgcgggaaccagattcttgaaacgtggcgttaatgaaaagggcagggtagcgaatgatgttgagactgagcagattgtttttgaagacacatctgatggaatcccaactcagatggcttctgctgtacagcatagaggatcgatacctcttgtctggtttcaggaaacttcaagacttaatattagaccagatattatattgaaacctgatgtggactacaaggcgactcgccttcattttgagaaccttgcacttagatatgggaatccagtaatcatcttgaacttaataaagacccgtgagaagaagccccgtgaatctctgctccgtgcagaatttgcaaaggctatccattacattaacaagagcctgcctgatgacaagcgtctaaaatttttacacatggatctgagtaagctttctcgaaggaaaggcaccaatgtgcttgcactgttgaccaaggtggcatcagatgtgttggatctaactgaattcctccactgtgaaataagtacatcaacaaaacctgatgacacctcaagtggagaaagaactgctgccaaaccacatgatgacagaagtagcagtgatcaaactgaatgtgcagctaagttggcacctcttttattacagaagggtgtcctcaggacaaattgcatagactgcttagatcgcacaaatgttgcacaatttgcatatggtttagctgctttagggcgtcaacttcatgcattggggcttactgaagcacagaaaattgaattgcacgatcctctggctgatgatctgatggacttctatgaatggatgggtgatacattagctattcagtatggtggttctgctgctcacaacaagatcttctgcgagcaaaggggtcaatggaaggcagcaacccaatctcaggagttccttcggaccattcaacgctactataataacgcctacactgatcacgacaagcaggatgctataaacatgttcttaggtcatttccaacctcagcaagggaaacctgcactgtggaagctggactcagatcagcattacaacattgggaggcaagggactttaaaagaagagattggaagatcgttcataaagaggtcactatcagatggtaacatactgttggagaacaacttgcctgtaactagctgtaacaatgaaacaaacaacacagaattgcttccaatgcaacagctggatgatattagagaacctaccgactctgcgccagagatctccatatgtgaacctaacccgtgctccagtgtgaactacggcagagtgcctggaagacactctatttcagaagagcggcagagttatttgaaaagattaggttaccctgaattgcattcttcaaatttcctcgaccttgatttgttgtcgtcttctgggaattcctgtgacgaggaagtttttgagaggtcatcactgatcaattcacctatggatgtggtcagcgttgaatcatctacgtcgtacagtgaacaaggacacactgatgagggaagggatgacatggatctttcccgttcaagcagccaggtctcagacgttcgggactattctgaccggtttgcgcactgggtcgcggatggaggcatgctttggtaaaaggccatggacttttgtcttgcttgacaactcggtagaatctgtgaccgcaggaaatggatgcgagcagatgacatggctagatgcagagatggtgggcgtggaaaaagtctcgcatcggtatggttgtgaccactggaaggcttgaacgctgatattcatcggatggggatggagatttcggtggttgggttgagtacaagattcaatttgctgtggtgaaaaattttaccatagtttgtttagacaataaataggcaaaatatatatgattcttttattttagcttacagtgcgtcccccttctccatagaaaattctgaaaagcaaaaaaaaaaaggaaaatctagaaaaaggaggaaaaaaaacttagataaagaacacttttgctgtaaatagttagtatgttacggaagtataaatattgtgaaattttgctgacgacacgacttcgctcaaacgtgtaatatactgttggacagtgttaacaaaatatatcccgtatcagtacgaaaactgtgtaaatttactgtaacgcacagtatgcattatttatttatttgtttctcagattatggaagagataaaattgcaaaaatatcttaacctctgacttctcacggtgcggccagcctcggtcaagctccccggcggcgggacgaggccggtgtccgcttcctaccacagctagggatggaaacgaaagactcgagctcggtgggttcgctggctagcttcgctcggtttgtctcggctctcaaagagctgtagaagg

SEQ ID NO: 84731 - DNA, 4339 bp, Zea Mays
ccctgctcgcagcgcagttgcgtggcgcttttgtggacgacgccgtcgtcgccaggcagcttgcatgtggctctgcgctgcgcccttgtcttcctcttcctccccactccgcatctccagaaaattccgttattttactcccagtatttagcctcgacgattgctcgggactctctttacaggtcctatttcgcggtttcctcatcctcctaatcctaacctccttccctgttttattcttcctcgtcgagcctgattcccctgccgccaccgcggccagcgccgccctcgccgccggtcgccaccgccgccgccaccgtccactcctcgccctcacctaatctcactcggagggagaaaaaaaaaacctcgccctcgccgccgggttgagttgaatctgtggtcgctgggttgaattgaatcgatttagatccgtttatccctagttcgggtgcccgtgttctggaaggtggaagctttggttgggttttctcttccagagcattaatgtttctgagggcctaagatgctctatttgaagcagcccacgaggagctgagtctttgtgttttttttatcgttctctctcgtcgtctgttgatctgatcggatggaggctatgacgggtggcaaattccttcaaaagtttcgactctacgaaaccagatcgaaattttatcttattggaagagacaagagcaggattcactggagggtgctaaaaattgatcggttggagtccactgagctgggtgtcgatgaggatccaactatttacacggaaagtgaatgtcaagaactgctttggcggatccatgaggggaacatgttgactggtggactgaaatttgtcacaaaatgttacggaatagttggttttgtaaagtttcttggtccttattacatggttataataaccagtagaaggaaaatcggcacaatatgcggccatgaaatttattccgtcggcaagagtgaaatgattgcaatttcaagtgttacagtctggcccaacgtggcttattctagggacgagaacaggtctttttttttcaacatgtaaatattgtgtattgcctgttgtaatttaatcagtggttcttaacattatcaataattccagcttgctatctagtgtacgttttatagctttgctattcatctacctcattgttggttgctctctttccacatatttgatctcattttggttgctatgttgtgttgagaactcttggtgttgctgtgccccctccctctcctttgtccgtattgttttgcataatgacattccagttttttttcatttgttcatgtcctagtagaacatggacaattccattttatgattttgttcgattgtacaataatacagtaacattttgtcgttgtgttcatttagctccatttctcctatgtgtataaatttgtttgttcagaaacaacgtacatccaactcatatagccaatatacataatggaacaatggaaattcttgcagttctgagccttgtgtacttgctcatatggttggaggtatatatagaaaagtttcgaatttccttgctcctgtagtattctgcttattatcattcaccattctatacgacaagtatatttttcaacttcttttttcatttttgtcttatgaagaaatttatgctctcacctctcaatttctgtagatataagcgccttctttgctcagttgacctttcgaaggatttcttcttcagctactcttacaacatcatgcgcagccttcagaagaacataacccagaagaatactgggcaggctgtttatgaaccaatgtgtgtatggaatgaatttctgacacgagcaattcggaatcatctcaagaatacatgttggactgttgccttagtccatggattttttaaacagtcgaagctctccgtatctgggaaggatttttggttgacccttatagctaggcgctcacgacactttgcgggaaccagggtagcgaatgatgttgagactgagcagattgtttttgaagacacatctgatggaatcccaactcagatggcttctgctgtacagcatagaggatcgatacctcttgtctggtttcaggaaacttcaagacttaatattagaccagatattatattgaaacctgatgtggactacaaggcgactcgccttcattttgagaaccttgcacttagatatgggaatccagtaatcatcttgaacttaataaagacccgtgagaagaagccccgtgaatctctgctccgtgcagaatttgcaaaggctatccattacattaacaagagcctgcctgatgacaagcgtctaaaatttttacacatggatctgagtaagctttctcgaaggaaaggcaccaatgtgcttgcactgttgaccaaggtggcatcagatgtgttggatctaactgaattcctccactgtgaaataagtacatcaacaaaacctgatgacacctcaagtggagaaagaactgctgccaaaccacatgatgacagaagtagcagtgatcaaactgaatgtgcagctaagttggcacctcttttattacagaagggtgtcctcaggacaaattgcatagactgcttagatcgcacaaatgttgcacaatttgcatatggtttagctgctttagggcgtcaacttcatgcattggggcttactgaagcacagaaaattgaattgcacgatcctctggctgatgatctgatggacttctatgaatggatgggtgatacattagctattcagtatggtggttctgctgctcacaacaagatcttctgcgagcaaaggggtcaatggaaggcagcaacccaatctcaggagttccttcggaccattcaacgctactataataacgcctacactgatcacgacaagcaggatgctataaacatgttcttaggtcatttccaacctcagcaagggaaacctgcactgtggaagctggactcagatcagcattacaacattgggaggcaagggactttaaaagaagagattggaagatcgttcataaagaggtcactatcagatggtaacatactgttggagaacaacttgcctgtaactagctgtaacaatgaaacaaacaacacagaattgcttccaatgcaacagctggatgatattagagaacctaccgactctgcgccagagatctccatatgtgaacctaacccgtgctccagtgtgaactacggcagagtgcctggaagacactctatttcagaagagcggcagagttatttgaaaagattaggttaccctgaattgcattcttcaaatttcctcgaccttgatttgttgtcgtcttctgggaattcctgtgacgaggaagtttttgagaggtcatcactgatcaattcacctatggatgtggtcagcgttgaatcatctacgtcgtacagtgaacaaggacacactgatgagggaagggatgacatggatctttcccgttcaagcagccaggtctcagacgttcgggactattctgaccggtttgcgcactgggtcgcggatggaggcatgctttggtaaaaggccatggacttttgtcttgcttgacaactcggtagaatctgtgaccgcaggaaatggatgcgagcagatgacatggctagatgcagagatggtgggcgtggaaaaagtctcgcatcggtatggttgtgaccactggaaggcttgaacgctgatattcatcggatggggatggagatttcggtggttgggttgagtacaagattcaatttgctgtggtgaaaaattttaccatagtttgtttagacaataaataggcaaaatatatatgattcttttattttagcttacagtgcgtcccccttctccatagaaaattctgaaaagcaaaaaaaaaaaggaaaatctagaaaaaggaggaaaaaaaacttagataaagaacacttttgctgtaaatagttagtatgttacggaagtataaatattgtgaaattttgctgacgacacgacttcgctcaaacgtgtaatatactgttggacagtgttaacaaaatatatcccgtatcagtacgaaaactgtgtaaatttactgtaacgcacagtatgcattatttatttatttgtttctcagattatggaagagataaaattgcaaaaatatcttaacctctgacttctcacggtgcggccagcctcggtcaagctccccggcggcgggacgaggccggtgtccgcttcctaccacagctagggatggaaacgaaagactcgagctcggtgggttcgctggctagcttcgctcggtttgtctcggctctcaaagagctgtagaagg

SEQ ID NO: 84732 - DNA, 4398 bp, Zea Mays
catggttttgccccccttgccaccccccctgctcgcagcgcagttgcgtggcgcttttgtggacgacgccgtcgtcgccaggcagcttgcatgtggctctgcgctgcgcccttgtcttcctcttcctccccactccgcatctccagaaaattccgttattttactcccagtatttagcctcgacgattgctcgggactctctttacaggtcctatttcgcggtttcctcatcctcctaatcctaacctccttccctgttttattcttcctcgtcgagcctgattcccctgccgccaccgcggccagcgccgccctcgccgccggtcgccaccgccgccgccaccgtccactcctcgccctcacctaatctcactcggagggagaaaaaaaaaacctcgccctcgccgccgggttgagttgaatctgtggtcgctgggttgaattgaatcgatttagatccgtttatccctagttcgggtgcccgtgttctggaaggtggaagctttggttgggttttctcttccagagcattaatgtttctgagggcctaagatgctctatttgaagcagcccacgaggagctgagtctttgtgttttttttatcgttctctctcgtcgtctgttgatctgatcggatggaggctatgacgggtggcaaattccttcaaaagtttcgactctacgaaaccagatcgaaattttatcttattggaagagacaagagcaggattcactggagggtgctaaaaattgatcggttggagtccactgagctgggtgtcgatgaggatccaactatttacacggaaagtgaatgtcaagaactgctttggcggatccatgaggggaacatgttgactggtggactgaaatttgtcacaaaatgttacggaatagttggttttgtaaagtttcttggtccttattacatggttataataaccagtagaaggaaaatcggcacaatatgcggccatgaaatttattccgtcggcaagagtgaaatgattgcaatttcaagtgttacagtctggcccaacgtggcttattctagggacgagaacaggtctttttttttcaacatgtaaatattgtgtattgcctgttgtaatttaatcagtggttcttaacattatcaataattccagcttgctatctagtgtacgttttatagctttgctattcatctacctcattgttggttgctctctttccacatatttgatctcattttggttgctatgttgtgttgagaactcttggtgttgctgtgccccctccctctcctttgtccgtattgttttgcataatgacattccagttttttttcatttgttcatgtcctagtagaacatggacaattccattttatgattttgttcgattgtacaataatacagtaacattttgtcgttgtgttcatttagctccatttctcctatgtgtataaatttgtttgttcagaaacaacgtacatccaactcatatagccaatatacataatggaacaatggaaattcttgcagttctgagccttgtgtacttgctcatatggttggaggtatatatagaaaagtttcgaatttccttgctcctgtagtattctgcttattatcattcaccattctatacgacaagtatatttttcaacttcttttttcatttttgtcttatgaagaaatttatgctctcacctctcaatttctgtagatataagcgccttctttgctcagttgacctttcgaaggatttcttcttcagctactcttacaacatcatgcgcagccttcagaagaacataacccagaagaatactgggcaggctgtttatgaaccaatgtgtgtatggaatgaatttctgacacgagcaattcggaatcatctcaagaatacatgttggactgttgccttagtccatggattttttaaacagtcgaagctctccgtatctgggaaggatttttggttgacccttatagctaggcgctcacgacactttgcgggaaccagattcttgaaacgtggcgttaatgaaaagggcagggtagcgaatgatgttgagactgagcagattgtttttgaagacacatctgatggaatcccaactcagatggcttctgctgtacagcatagaggatcgatacctcttgtctggtttcaggaaacttcaagacttaatattagaccagatattatattgaaacctgatgtggactacaaggcgactcgccttcattttgagaaccttgcacttagatatgggaatccagtaatcatcttgaacttaataaagacccgtgagaagaagccccgtgaatctctgctccgtgcagaatttgcaaaggctatccattacattaacaagagcctgcctgatgacaagcgtctaaaatttttacacatggatctgagtaagctttctcgaaggaaaggcaccaatgtgcttgcactgttgaccaaggtggcatcagatgtgttggatctaactgaattcctccactgtgaaataagtacatcaacaaaacctgatgacacctcaagtggagaaagaactgctgccaaaccacatgatgacagaagtagcagtgatcaaactgaatgtgcagctaagttggcacctcttttattacagaagggtgtcctcaggacaaattgcatagactgcttagatcgcacaaatgttgcacaatttgcatatggtttagctgctttagggcgtcaacttcatgcattggggcttactgaagcacagaaaattgaattgcacgatcctctggctgatgatctgatggacttctatgaatggatgggtgatacattagctattcagtatggtggttctgctgctcacaacaagatcttctgcgagcaaaggggtcaatggaaggcagcaacccaatctcaggagttccttcggaccattcaacgctactataataacgcctacactgatcacgacaagcaggatgctataaacatgttcttaggtcatttccaacctcagcaagggaaacctgcactgtggaagctggactcagatcagcattacaacattgggaggcaagggactttaaaagaagagattggaagatcgttcataaagaggtcactatcagatggtaacatactgttggagaacaacttgcctgtaactagctgtaacaatgaaacaaacaacacagaattgcttccaatgcaacagctggatgatattagagaacctaccgactctgcgccagagatctccatatgtgaacctaacccgtgctccagtgtgaactacggcagagtgcctggaagacactctatttcagaagagcggcagagttatttgaaaagattaggttaccctgaattgcattcttcaaatttcctcgaccttgatttgttgtcgtcttctgggaattcctgtgacgaggaagtttttgagaggtcatcactgatcaattcacctatggatgtggtcagcgttgaatcatctacgtcgtacagtgaacaaggacacactgatgagggaagggatgacatggatctttcccgttcaagcagccaggtctcagacgttcgggactattctgaccggtttgcgcactgggtcgcggatggaggcatgctttggtaaaaggccatggacttttgtcttgcttgacaactcggtagaatctgtgaccgcaggaaatggatgcgagcagatgacatggctagatgcagagatggtgggcgtggaaaaagtctcgcatcggtatggttgtgaccactggaaggcttgaacgctgatattcatcggatggggatggagatttcggtggttgggttgagtacaagattcaatttgctgtggtgaaaaattttaccatagtttgtttagacaataaataggcaaaatatatatgattcttttattttagcttacagtgcgtcccccttctccatagaaaattctgaaaagcaaaaaaaaaaaggaaaatctagaaaaaggaggaaaaaaaacttagataaagaacacttttgctgtaaatagttagtatgttacggaagtataaatattgtgaaattttgctgacgacacgacttcgctcaaacgtgtaatatactgttggacagtgttaacaaaatatatcccgtatcagtacgaaaactgtgtaaatttactgtaacgcacagtatgcattatttatttatttgtttctcagattatggaagagataaaattgcaaaaatatcttaacctctgacttctcacggtgcggccagcctcggtcaagctccccggcggcgggacgaggccggtgtccgcttcctaccacagctagggatggaaacgaaagactcgagctcggtgggttcgctggctagcttcgctcggtttgtctcggctctcaaagagctgtagaagg

SEQ ID NO: 84733 - DNA, 3770 bp, Zea Mays
gttccttcaatgattacatggttttgccccccttgccaccccccctgctcgcagcgcagttgcgtggcgcttttgtggacgacgccgtcgtcgccaggcagcttgcatgtggctctgcgctgcgcccttgtcttcctcttcctccccactccgcatctccagaaaattccgttattttactcccagtatttagcctcgacgattgctcgggactctctttacaggtcctatttcgcggtttcctcatcctcctaatcctaacctccttccctgttttattcttcctcgtcgagcctgattcccctgccgccaccgcggccagcgccgccctcgccgccggtcgccaccgccgccgccaccgtccactcctcgccctcacctaatctcactcggagggagaaaaaaaaaacctcgccctcgccgccgggttgagttgaatctgtggtcgctgggttgaattgaatcgatttagatccgtttatccctagttcgggtgcccgtgttctggaaggtggaagctttggttgggttttctcttccagagcattaatgtttctgagggcctaagatgctctatttgaagcagcccacgaggagctgagtctttgtgttttttttatcgttctctctcgtcgtctgttgatctgatcggatggaggctatgacgggtggcaaattccttcaaaagtttcgactctacgaaaccagatcgaaattttatcttattggaagagacaagagcaggattcactggagggtgctaaaaattgatcggttggagtccactgagctgggtgtcgatgaggatccaactatttacacggaaagtgaatgtcaagaactgctttggcggatccatgaggggaacatgttgactggtggactgaaatttgtcacaaaatgttacggaatagttggttttgtaaagtttcttggtccttattacatggttataataaccagtagaaggaaaatcggcacaatatgcggccatgaaatttattccgtcggcaagagtgaaatgattgcaatttcaagtgttacagtctggcccaacgtggcttattctagggacgagaacagatataagcgccttctttgctcagttgacctttcgaaggatttcttcttcagctactcttacaacatcatgcgcagccttcagaagaacataacccagaagaatactgggcaggctgtttatgaaccaatgtgtgtatggaatgaatttctgacacgagcaattcggaatcatctcaagaatacatgttggactgttgccttagtccatggattttttaaacagtcgaagctctccgtatctgggaaggatttttggttgacccttatagctaggcgctcacgacactttgcgggaaccagattcttgaaacgtggcgttaatgaaaagggcagggtagcgaatgatgttgagactgagcagattgtttttgaagacacatctgatggaatcccaactcagatggcttctgctgtacagcatagaggatcgatacctcttgtctggtttcaggaaacttcaagacttaatattagaccagatattatattgaaacctgatgtggactacaaggcgactcgccttcattttgagaaccttgcacttagatatgggaatccagtaatcatcttgaacttaataaagacccgtgagaagaagccccgtgaatctctgctccgtgcagaatttgcaaaggctatccattacattaacaagagcctgcctgatgacaagcgtctaaaatttttacacatggatctgagtaagctttctcgaaggaaaggcaccaatgtgcttgcactgttgaccaaggtggcatcagatgtgttggatctaactgaattcctccactgtgaaataagtacatcaacaaaacctgatgacacctcaagtggagaaagaactgctgccaaaccacatgatgacagaagtagcagtgatcaaactgaatgtgcagctaagttggcacctcttttattacagaagggtgtcctcaggacaaattgcatagactgcttagatcgcacaaatgttgcacaatttgcatatggtttagctgctttagggcgtcaacttcatgcattggggcttactgaagcacagaaaattgaattgcacgatcctctggctgatgatctgatggacttctatgaatggatgggtgatacattagctattcagtatggtggttctgctgctcacaacaagatcttctgcgagcaaaggggtcaatggaaggcagcaacccaatctcaggagttccttcggaccattcaacgctactataataacgcctacactgatcacgacaagcaggatgctataaacatgttcttaggtcatttccaacctcagcaagggaaacctgcactgtggaagctggactcagatcagcattacaacattgggaggcaagggactttaaaagaagagattggaagatcgttcataaagaggtcactatcagatggtaacatactgttggagaacaacttgcctgtaactagctgtaacaatgaaacaaacaacacagaattgcttccaatgcaacagctggatgatattagagaacctaccgactctgcgccagagatctccatatgtgaacctaacccgtgctccagtgtgaactacggcagagtgcctggaagacactctatttcagaagagcggcagagttatttgaaaagattaggttaccctgaattgcattcttcaaatttcctcgaccttgatttgttgtcgtcttctgggaattcctgtgacgaggaagtttttgagaggtcatcactgatcaattcacctatggatgtggtcagcgttgaatcatctacgtcgtacagtgaacaaggacacactgatgagggaagggatgacatggatctttcccgttcaagcagccaggtctcagacgttcgggactattctgaccggtttgcgcactgggtcgcggatggaggcatgctttggtaaaaggccatggacttttgtcttgcttgacaactcggtagaatctgtgaccgcaggaaatggatgcgagcagatgacatggctagatgcagagatggtgggcgtggaaaaagtctcgcatcggtatggttgtgaccactggaaggcttgaacgctgatattcatcggatggggatggagatttcggtggttgggttgagtacaagattcaatttgctgtggtgaaaaattttaccatagtttgtttagacaataaataggcaaaatatatatgattcttttattttagcttacagtgcgtcccccttctccatagaaaattctgaaaagcaaaaaaaaaaaggaaaatctagaaaaaggaggaaaaaaaacttagataaagaacacttttgctgtaaatagttagtatgttacggaagtataaatattgtgaaattttgctgacgacacgacttcgctcaaacgtgtaatatactgttggacagtgttaacaaaatatatcccgtatcagtacgaaaactgtgtaaatttactgtaacgcacagtatgcattatttatttatttgtttctcagattatggaagagataaaattgcaaaaatatcttaacctctgacttctcacggtgcggccagcctcggtcaagctccccggcggcgggacgaggccggtgtccgcttcctaccacagctagggatggaaacgaaagactcgagctcggtgggttcgctggctagcttcgctcggtttgtctcggctctcaaagagctgtagaagg

SEQ ID NO: 84734 - DNA, 4382 bp, Zea Mays
gttccttcaatgattacatggttttgccccccttgccaccccccctgctcgcagcgcagttgcgtggcgcttttgtggacgacgccgtcgtcgccaggcagcttgcatgtggctctgcgctgcgcccttgtcttcctcttcctccccactccgcatctccagaaaattccgttattttactcccagtatttagcctcgacgattgctcgggactctctttacaggtcctatttcgcggtttcctcatcctcctaatcctaacctccttccctgttttattcttcctcgtcgagcctgattcccctgccgccaccgcggccagcgccgccctcgccgccggtcgccaccgccgccgccaccgtccactcctcgccctcacctaatctcactcggagggagaaaaaaaaaacctcgccctcgccgccgggttgagttgaatctgtggtcgctgggttgaattgaatcgatttagatccgtttatccctagttcgggtgcccgtgttctggaaggtggaagctttggttgggttttctcttccagagcattaatgtttctgagggcctaagatgctctatttgaagcagcccacgaggagctgagtctttgtgttttttttatcgttctctctcgtcgtctgttgatctgatcggatggaggctatgacgggtggcaaattccttcaaaagtttcgactctacgaaaccagatcggattcactggagggtgctaaaaattgatcggttggagtccactgagctgggtgtcgatgaggatccaactatttacacggaaagtgaatgtcaagaactgctttggcggatccatgaggggaacatgttgactggtggactgaaatttgtcacaaaatgttacggaatagttggttttgtaaagtttcttggtccttattacatggttataataaccagtagaaggaaaatcggcacaatatgcggccatgaaatttattccgtcggcaagagtgaaatgattgcaatttcaagtgttacagtctggcccaacgtggcttattctagggacgagaacaggtctttttttttcaacatgtaaatattgtgtattgcctgttgtaatttaatcagtggttcttaacattatcaataattccagcttgctatctagtgtacgttttatagctttgctattcatctacctcattgttggttgctctctttccacatatttgatctcattttggttgctatgttgtgttgagaactcttggtgttgctgtgccccctccctctcctttgtccgtattgttttgcataatgacattccagttttttttcatttgttcatgtcctagtagaacatggacaattccattttatgattttgttcgattgtacaataatacagtaacattttgtcgttgtgttcatttagctccatttctcctatgtgtataaatttgtttgttcagaaacaacgtacatccaactcatatagccaatatacataatggaacaatggaaattcttgcagttctgagccttgtgtacttgctcatatggttggaggtatatatagaaaagtttcgaatttccttgctcctgtagtattctgcttattatcattcaccattctatacgacaagtatatttttcaacttcttttttcatttttgtcttatgaagaaatttatgctctcacctctcaatttctgtagatataagcgccttctttgctcagttgacctttcgaaggatttcttcttcagctactcttacaacatcatgcgcagccttcagaagaacataacccagaagaatactgggcaggctgtttatgaaccaatgtgtgtatggaatgaatttctgacacgagcaattcggaatcatctcaagaatacatgttggactgttgccttagtccatggattttttaaacagtcgaagctctccgtatctgggaaggatttttggttgacccttatagctaggcgctcacgacactttgcgggaaccagattcttgaaacgtggcgttaatgaaaagggcagggtagcgaatgatgttgagactgagcagattgtttttgaagacacatctgatggaatcccaactcagatggcttctgctgtacagcatagaggatcgatacctcttgtctggtttcaggaaacttcaagacttaatattagaccagatattatattgaaacctgatgtggactacaaggcgactcgccttcattttgagaaccttgcacttagatatgggaatccagtaatcatcttgaacttaataaagacccgtgagaagaagccccgtgaatctctgctccgtgcagaatttgcaaaggctatccattacattaacaagagcctgcctgatgacaagcgtctaaaatttttacacatggatctgagtaagctttctcgaaggaaaggcaccaatgtgcttgcactgttgaccaaggtggcatcagatgtgttggatctaactgaattcctccactgtgaaataagtacatcaacaaaacctgatgacacctcaagtggagaaagaactgctgccaaaccacatgatgacagaagtagcagtgatcaaactgaatgtgcagctaagttggcacctcttttattacagaagggtgtcctcaggacaaattgcatagactgcttagatcgcacaaatgttgcacaatttgcatatggtttagctgctttagggcgtcaacttcatgcattggggcttactgaagcacagaaaattgaattgcacgatcctctggctgatgatctgatggacttctatgaatggatgggtgatacattagctattcagtatggtggttctgctgctcacaacaagatcttctgcgagcaaaggggtcaatggaaggcagcaacccaatctcaggagttccttcggaccattcaacgctactataataacgcctacactgatcacgacaagcaggatgctataaacatgttcttaggtcatttccaacctcagcaagggaaacctgcactgtggaagctggactcagatcagcattacaacattgggaggcaagggactttaaaagaagagattggaagatcgttcataaagaggtcactatcagatggtaacatactgttggagaacaacttgcctgtaactagctgtaacaatgaaacaaacaacacagaattgcttccaatgcaacagctggatgatattagagaacctaccgactctgcgccagagatctccatatgtgaacctaacccgtgctccagtgtgaactacggcagagtgcctggaagacactctatttcagaagagcggcagagttatttgaaaagattaggttaccctgaattgcattcttcaaatttcctcgaccttgatttgttgtcgtcttctgggaattcctgtgacgaggaagtttttgagaggtcatcactgatcaattcacctatggatgtggtcagcgttgaatcatctacgtcgtacagtgaacaaggacacactgatgagggaagggatgacatggatctttcccgttcaagcagccaggtctcagacgttcgggactattctgaccggtttgcgcactgggtcgcggatggaggcatgctttggtaaaaggccatggacttttgtcttgcttgacaactcggtagaatctgtgaccgcaggaaatggatgcgagcagatgacatggctagatgcagagatggtgggcgtggaaaaagtctcgcatcggtatggttgtgaccactggaaggcttgaacgctgatattcatcggatggggatggagatttcggtggttgggttgagtacaagattcaatttgctgtggtgaaaaattttaccatagtttgtttagacaataaataggcaaaatatatatgattcttttattttagcttacagtgcgtcccccttctccatagaaaattctgaaaagcaaaaaaaaaaaggaaaatctagaaaaaggaggaaaaaaaacttagataaagaacacttttgctgtaaatagttagtatgttacggaagtataaatattgtgaaattttgctgacgacacgacttcgctcaaacgtgtaatatactgttggacagtgttaacaaaatatatcccgtatcagtacgaaaactgtgtaaatttactgtaacgcacagtatgcattatttatttatttgtttctcagattatggaagagataaaattgcaaaaatatcttaacctctgacttctcacggtgcggccagcctcggtcaagctccccggcggcgggacgaggccggtgtccgcttcctaccacagctagggatggaaacgaaagactcgagctcggtgggttcgctggctagcttcgctcggtttgtctcggctctcaaagagctgtagaagg

SEQ ID NO: 84735 - DNA, 2565 bp, Zea Mays
ctggcgaaggcaacaggggccgaagtgtcaacgtgtggctgcaatccacctccgcattcactccacgcgcacgccgctatacgcgacgctgccgagcgcatcgccgccggtccctccctcacttcctgtgcctgttctcagcccgccgcttctcagtccacttctgccgcagcccctcttctctcggtctagagatccgtccgggcgcggcagcctcgctttcgtttcgaggtacatctgtccgtcagcaatgtccatagaagagaggaagataagtgtgataagcaagagcattgcgctaaatccaaatgcagaggaatttgttccttcatcccttagatctgtcaatgattcctccaagagatcatatgcaactacggttgtctcagggatatctaaagaatccagcactgacaagccagagtcaattttacgaagtaactctgatgaagaagcacatcagtactggcagcaacagctccctgacgacattacccctgatttcaaagtcatgggacaagatgaaagtcctggacctgacagtctatcactcacagacctgtccataaatgatggcattggcacatcaatattttctccgaaccagacactgagcatgcagcaccgtgcttcgccttttatcagggacaaactaaatacacacccaaagattaacttgtctatcccaacttatatggatgaacggtcccaagccacaattttgagtccaactgcaggttccatgagtccaaatgctgctccatgggtgaagactctaaggaatgggggacattataacacaagcataagggatgccagtcagtacaatggagattctagcattggagcttcattgcacaaccttactgatgcatatcatggaagcaggcgcagcttaagctcgactatggatatcatgaatcagctggaggatcgatcgtacatacactcgtattgctggatctatgttcaggcatagtgtactagtagctcaaatataggaaaatgcttatcctctagaaggcgctgaactaccccccctcctccttgtgtccaggtcaatctattcgctgtgactccgtgtactccggttttattctacttttgaacaagaacgagcgataatgaaacgattaattattcctttgatcttccttctactaacaaaattacatgtgccgtgtttgcacacgattttattctagttcgagcatgcttcacagaaatggctattgtacttgtttactgcatggatcttctacatacatttatgcctaataacagagtaaagtcgatggacgacgcagtcagaacctcaggtcactatcatttggaaattcaagtcctacatcaccagcatcatatgcccaaaatggtcttggaaactatgctggacgtgaacacgtatccctcgatgttcctagaggaaggtacaagacgactagtttgcctgttcctggtcttggttcaagcagaggttatcagttgttgggtggctcatataatggaaaccatgatatgatctcaaccaataccccacaaaacatggctggaattcagacaggaccagcttggcttgaaagtgacgctgaggcaagcacatatttggaatcaaaggatgaagttcatgattttgcaagcctgcgacatgcagttcttgaacaggagctatacagtatacaaagcctgttggctcaggagaaggctagagaaacaacatatcgacaaagattacaaacaccacaattgcaaggcctcatccaggagcaaaatcccccaatcgatctctgtggtcttcacatcagcgaggcaatacacgtcctgaactacgagctcaacaaccgaagaaagatcgtgagatcaaccggtcgccgactccaggttatgataatatcaagcgcccgcaccccagcaaggctgactgccgccgtcgagcagtatctcatggaacacggccttctgtacacgcaggtgcaaccaggcctgctccgcatcctgctctagtaatggaactggtcgtcctagctgttgttcacaactggatcagatgaaaaagaagggaaaaagaaaagaaaagaaaagataagttgacctgtacttttgtatatggcagagattgctagcaggatagtagcgttaagaacttaagatagctcatgtaacattcatgtcaggctttttgtcagcaaatgtatacgtcttaaaatttgggagttagggaatattctcgttgtctttggtgccggtggatgcacacggcatagcgtcttcacagaatcacaatcatattctcgatcacaatcttcggtgctggtggatgcttaagttctgttcctgctggtgaattcaaattgtgagtaatgcctggtcgatgcattagttcttcacaatagtcgattcaaattgtgcgttgttagattattgttttgtattttgtctaagtgtaatgggcattggttagtctatatctctttactgatatatacaacattcagtctctataggatagggttttcaacattgtatccagtctagttctctcttccttagccgttgccaccacct

SEQ ID NO: 84736 - DNA, 1704 bp, Zea Mays
ctggcgaaggcaacaggggccgaagtgtcaacgtgtggctgcaatccacctccgcattcactccacgcgcacgccgctatacgcgacgctgccgagcgcatcgccgccggtccctccctcacttcctgtgcctgttctcagcccgccgcttctcagtccacttctgccgcagcccctcttctctcggtctagagatccgtccgggcgcggcagcctcgctttcgtttcggttccatgagtccaaatgctgctccatgggtgaagactctaaggaatgggggacattataacacaagcataagggatgccagtcagtacaatggagattctagcattggagcttcattgcacaaccttactgatgcatatcatggaagcaggcgcagcttaagctcgactatggatatcatgaatcagctggagagtaaagtcgatggacgacgcagtcagaacctcaggtcactatcatttggaaattcaagtcctacatcaccagcatcatatgcccaaaatggtcttggaaactatgctggacgtgaacacgtatccctcgatgttcctagaggaaggtacaagacgactagtttgcctgttcctggtcttggttcaagcagaggttatcagttgttgggtggctcatataatggaaaccatgatatgatctcaaccaataccccacaaaacatggctggaattcagacaggaccagcttggcttgaaagtgacgctgaggcaagcacatatttggaatcaaaggatgaagttcatgattttgcaagcctgcgacatgcagttcttgaacaggagctatacagtatacaaagcctgttggctcaggagaaggctagagaaacaacatatcgacaaagattacaaacaccacaattgcaaggcctcatccaggagcaaaatcccccaatcgatctctgtggtcttcacatcagcgaggcaatacacgtcctgaactacgagctcaacaaccgaagaaagatcgtgagatcaaccggtcgccgactccaggttatgataatatcaagcgcccgcaccccagcaaggctgactgccgccgtcgagcagtatctcatggaacacggccttctgtacacgcaggtgcaaccaggcctgctccgcatcctgctctagtaatggaactggtcgtcctagctgttgttcacaactggatcagatgaaaaagaagggaaaaagaaaagaaaagaaaagataagttgacctgtacttttgtatatggcagagattgctagcaggatagtagcgttaagaacttaagatagctcatgtaacattcatgtcaggctttttgtcagcaaatgtatacgtcttaaaatttgggagttagggaatattctcgttgtctttggtgccggtggatgcacacggcatagcgtcttcacagaatcacaatcatattctcgatcacaatcttcggtgctggtggatgcttaagttctgttcctgctggtgaattcaaattgtgagtaatgcctggtcgatgcattagttcttcacaatagtcgattcaaattgtgcgttgttagattattgttttgtattttgtctaagtgtaatgggcattggttagtctatatctctttactgatatatacaacattcagtctctataggatagggttttcaacattgtatccagtctagttctctcttccttagccgttgccaccacct

SEQ ID NO: 84737 - DNA, 3089 bp, Zea Mays
ctggcgaaggcaacaggggccgaagtgtcaacgtgtggctgcaatccacctccgcattcactccacgcgcacgccgctatacgcgacgctgccgagcgcatcgccgccggtccctccctcacttcctgtgcctgttctcagcccgccgcttctcagtccacttctgccgcagcccctcttctctcggtctagagatccgtccgggcgcggcagcctcgctttcgtttcgttagttgtagatttgtgtgctgacggatgccctgctaatccaatacatcgatccgtggcctgtctagatttttgttcttgaaaacgggcaaggtcgacatgagttgacagtgtacgagttcttgctttcttgttatctaatcaaggtgttggtgcagcttgtttaccaaaatttagggggtcacgtgaagcctgtccctgcttcaggaggggcgaatgttccttcttccaaattcccagttcgcgatgttttttccccttatggatggtcaatggtgcagtagctggcgtcaaatacttttagaatagagccttttctatctgatgtaccaatgctagaataaaactcatttgttcataactggatccctcaagcaatagtagttcttaatcttctacctttgttgaattgtgaaatatgacactgtgcttgcgctagtttgaagtccaacccaggagtgattagtggtgttcagctcagtaccgtagttctgctttgagcatgtttggtgtccggtgtccattttcgtctgcctcaatctgaatctttatgtttaccttttttccccactttcagcataatccaaattctatttgacatgttacctttttcatccatacctgtgatttggatttatgacttatcttgctgtaatttcctttgacctgattgtttagtcgtgttgaagaatgtagtatctgtggtagcatggccatgagaagccagtgattttgagttttctttgtcgttatttttctaagttagttccgcttaatatatcatgatcaaggccagttatttaattcttagaagcggtctgtgcttctgttaagtttctatttgcagaaatctagcttttactaccatgcccaattatgtctaataggcacggagaacaatcactttagaagacttgtactccttggcgtgtcatactctttgtaacaatcttaccattcttgagaagaggtacatctgtccgtcagcaatgtccatagaagagaggaagataagtgtgataagcaagagcattgcgctaaatccaaatgcagaggaatttgttccttcatcccttagatctgtcaatgattcctccaagagatcatatgcaactacggttgtctcagggatatctaaagaatccagcactgacaagccagagtcaattttacgaagtaactctgatgaagaagcacatcagtactggcagcaacagctccctgacgacattacccctgatttcaaagtcatgggacaagatgaaagtcctggacctgacagtctatcactcacagacctgtccataaatgatggcattggcacatcaatattttctccgaaccagacactgagcatgcagcaccgtgcttcgccttttatcagggacaaactaaatacacacccaaagattaacttgtctatcccaacttatatggatgaacggtcccaagccacaattttgagtccaactgcaggttccatgagtccaaatgctgctccatgggtgaagactctaaggaatgggggacattataacacaagcataagggatgccagtcagtacaatggagattctagcattggagcttcattgcacaaccttactgatgcatatcatggaagcaggcgcagcttaagctcgactatggatatcatgaatcagctggagagtaaagtcgatggacgacgcagtcagaacctcaggtcactatcatttggaaattcaagtcctacatcaccagcatcatatgcccaaaatggtcttggaaactatgctggacgtgaacacgtatccctcgatgttcctagaggaaggtacaagacgactagtttgcctgttcctggtcttggttcaagcagaggttatcagttgttgggtggctcatataatggaaaccatgatatgatctcaaccaataccccacaaaacatggctggaattcagacaggaccagcttggcttgaaagtgacgctgaggcaagcacatatttggaatcaaaggatgaagttcatgattttgcaagcctgcgacatgcagttcttgaacaggagctatacagtatacaaagcctgttggctcaggagaaggctagagaaacaacatatcgacaaagattacaaacaccacaattgcaaggcctcatccaggagcaaaatcccccaatcgatctctgtggtcttcacatcagcgaggcaatacacgtcctgaactacgagctcaacaaccgaagaaagatcgtgagatcaaccggtcgccgactccaggtgcaaccaggcctgctccgcatcctgctctagtaatggaactggtcgtcctagctgttgttcacaactggatcagatgaaaaagaagggaaaaagaaaagaaaagaaaagataagttgacctgtacttttgtatatggcagagattgctagcaggatagtagcgttaagaacttaagatagctcatgtaacattcatgtcaggctttttgtcagcaaatgtatacgtcttaaaatttgggagttagggaatattctcgttgtctttggtgccggtggatgcacacggcatagcgtcttcacagaatcacaatcatattctcgatcacaatcttcggtgctggtggatgcttaagttctgttcctgctggtgaattcaaattgtgagtaatgcctggtcgatgcattagttcttcacaatagtcgattcaaattgtgcgttgttagattattgttttgtattttgtctaagtgtaatgggcattggttagtctatatctctttactgatatatacaacattcagtctctataggatagggttttcaacattgtatccagtctagttctctcttccttagccgttgccaccacct

SEQ ID NO: 84738 - DNA, 2807 bp, Zea Mays
ctggcgaaggcaacaggggccgaagtgtcaacgtgtggctgcaatccacctccgcattcactccacgcgcacgccgctatacgcgacgctgccgagcgcatcgccgccggtccctccctcacttcctgtgcctgttctcagcccgccgcttctcagtccacttctgccgcagcccctcttctctcggtctagagatccgtccgggcgcggcagcctcgctttcgtttcgaggtacatctgtccgtcagcaatgtccatagaagagaggaagataagtgtgataagcaagagcattgcgctaaatccaaatgcagaggaatttgttccttcatcccttagatctgtcaatgattcctccaagagatcatatgcaactacggttgtctcagggatatctaaagaatccagcactgacaagccagagtcaattttacgaagtaactctgatgaagaagcacatcagtactggcagcaacagctccctgacgacattacccctgatttcaaagtcatgggacaagatgaaagtcctggacctgacagtctatcactcacagacctgtccataaatgatggcattggcacatcaatattttctccgaaccagacactgagcatgcagcaccgtgcttcgccttttatcagggacaaactaaatacacacccaaagattaacttgtctatcccaacttatatggatgaacggtcccaagccacaattttgagtccaactgcaggttccatgagtccaaatgctgctccatgggtgaagactctaaggaatgggggacattataacacaagcataagggatgccagtcagtacaatggagattctagcattggagcttcattgcacaaccttactgatgcatatcatggaagcaggcgcagcttaagctcgactatggatatcatgaatcagctggaggtctgtcctcagtgtcctcatttgtcaactatgctacatgtctaaagttgttttgtcccatgtggccatgtttctcgtttctccactatgctgtttgtatcaaattgttcttaccaaaagctgcaccaactgaaactgtcatgctgctgacgactcaactatctatgtgaaagatcagcttaaagagatgctactgtgcacctaatgtatctgtatcactaaccagttctatcttggatgattggttctgaaattcataacatttcttaaattatgtttgttttttgttttaaatttccaagaatactgtaaaatgtcttattttagtgcaggatcgatcgtacatacactcgtattgctggatctatgttcaggcatagtgtactagtagctcaaatataggaaaatgcttatcctctagaaggcgctgaactaccccccctcctccttgtgtccaggtcaatctattcgctgtgactccgtgtactccggttttattctacttttgaacaagaacgagcgataatgaaacgattaattattcctttgatcttccttctactaacaaaattacatgtgccgtgtttgcacacgattttattctagttcgagcatgcttcacagaaatggctattgtacttgtttactgcatggatcttctacatacatttatgcctaataacagagtaaagtcgatggacgacgcagtcagaacctcaggtcactatcatttggaaattcaagtcctacatcaccagcatcatatgcccaaaatggtcttggaaactatgctggacgtgaacacgtatccctcgatgttcctagaggaaggtacaagacgactagtttgcctgttcctggtcttggttcaagcagaggttatcagttgttgggtggctcatataatggaaaccatgatatgatctcaaccaataccccacaaaacatggctggaattcagacaggaccagcttggcttgaaagtgacgctgaggcaagcacatatttggaatcaaaggatgaagttcatgattttgcaagcctgcgacatgcagttcttgaacaggagctatacagtatacaaagcctgttggctcaggagaaggctagagaaacaacatatcgacaaagattacaaacaccacaattgcaaggcctcatccaggagcaaaatcccccaatcgatctctgtggtcttcacatcagcgaggcaatacacgtcctgaactacgagctcaacaaccgaagaaagatcgtgagatcaaccggtcgccgactccaggtgcaaccaggcctgctccgcatcctgctctagtaatggaactggtcgtcctagctgttgttcacaactggatcagatgaaaaagaagggaaaaagaaaagaaaagaaaagataagttgacctgtacttttgtatatggcagagattgctagcaggatagtagcgttaagaacttaagatagctcatgtaacattcatgtcaggctttttgtcagcaaatgtatacgtcttaaaatttgggagttagggaatattctcgttgtctttggtgccggtggatgcacacggcatagcgtcttcacagaatcacaatcatattctcgatcacaatcttcggtgctggtggatgcttaagttctgttcctgctggtgaattcaaattgtgagtaatgcctggtcgatgcattagttcttcacaatagtcgattcaaattgtgcgttgttagattattgttttgtattttgtctaagtgtaatgggcattggttagtctatatctctttactgatatatacaacattcagtctctataggatagggttttcaacattgtatccagtctagttctctcttccttagccgttgccaccacct

SEQ ID NO: 84739 - DNA, 3408 bp, Zea Mays
ctggcgaaggcaacaggggccgaagtgtcaacgtgtggctgcaatccacctccgcattcactccacgcgcacgccgctatacgcgacgctgccgagcgcatcgccgccggtccctccctcacttcctgtgcctgttctcagcccgccgcttctcagtccacttctgccgcagcccctcttctctcggtctagagatccgtccgggcgcggcagcctcgctttcgtttcggtaagcaatcatactcgagcttgcttggattccctagtccgaagggctttgttggcaatcgaaccctaaaatccttcttctgattcgttcagttagttgtagatttgtgtgctgacggatgccctgctaatccaatacatcgatccgtggcctgtctagatttttgttcttgaaaacgggcaaggtcgacatgagttgacagtgtacgagttcttgctttcttgttatctaatcaaggtgttggtgcagcttgtttaccaaaatttagggggtcacgtgaagcctgtccctgcttcaggaggggcgaatgttccttcttccaaattcccagttcgcgatgttttttccccttatggatggtcaatggtgcagtagctggcgtcaaatacttttagaatagagccttttctatctgatgtaccaatgctagaataaaactcatttgttcataactggatccctcaagcaatagtagttcttaatcttctacctttgttgaattgtgaaatatgacactgtgcttgcgctagtttgaagtccaacccaggagtgattagtggtgttcagctcagtaccgtagttctgctttgagcatgtttggtgtccggtgtccattttcgtctgcctcaatctgaatctttatgtttaccttttttccccactttcagcataatccaaattctatttgacatgttacctttttcatccatacctgtgatttggatttatgacttatcttgctgtaatttcctttgacctgattgtttagtcgtgttgaagaatgtagtatctgtggtagcatggccatgagaagccagtgattttgagttttctttgtcgttatttttctaagttagttccgcttaatatatcatgatcaaggccagttatttaattcttagaagcggtctgtgcttctgttaagtttctatttgcagaaatctagcttttactaccatgcccaattatgtctaataggcacggagaacaatcactttagaagacttgtactccttggcgtgtcatactctttgtaacaatcttaccattcttgagaagaggtacatctgtccgtcagcaatgtccatagaagagaggaagataagtgtgataagcaagagcattgcgctaaatccaaatgcagaggaatttgttccttcatcccttagatctgtcaatgattcctccaagagatcatatgcaactacggttgtctcagggatatctaaagaatccagcactgacaagccagagtcaattttacgaagtaactctgatgaagaagcacatcagtactggcagcaacagctccctgacgacattacccctgatttcaaagtcatgggacaagatgaaagtcctggacctgacagtctatcactcacagacctgtccataaatgatggcattggcacatcaatattttctccgaaccagacactgagcatgcagcaccgtgcttcgccttttatcagggacaaactaaatacacacccaaagattaacttgtctatcccaacttatatggatgaacggtcccaagccacaattttgagtccaactgcaggttccatgagtccaaatgctgctccatgggtgaagactctaaggaatgggggacattataacacaagcataagggatgccagtcagtacaatggagattctagcattggagcttcattgcacaaccttactgatgcatatcatggaagcaggcgcagcttaagctcgactatggatatcatgaatcagctggaggtcaatctattcgctgtgactccgtgtactccggttttattctacttttgaacaagaacgagcgataatgaaacgattaattattcctttgatcttccttctactaacaaaattacatgtgccgtgtttgcacacgattttattctagttcgagcatgcttcacagaaatggctattgtacttgtttactgcatggatcttctacatacatttatgcctaataacagagtaaagtcgatggacgacgcagtcagaacctcaggtcactatcatttggaaattcaagtcctacatcaccagcatcatatgcccaaaatggtcttggaaactatgctggacgtgaacacgtatccctcgatgttcctagaggaaggtacaagacgactagtttgcctgttcctggtcttggttcaagcagaggttatcagttgttgggtggctcatataatggaaaccatgatatgatctcaaccaataccccacaaaacatggctggaattcagacaggaccagcttggcttgaaagtgacgctgaggcaagcacatatttggaatcaaaggatgaagttcatgattttgcaagcctgcgacatgcagttcttgaacaggagctatacagtatacaaagcctgttggctcaggagaaggctagagaaacaacatatcgacaaagattacaaacaccacaattgcaaggcctcatccaggagcaaaatcccccaatcgatctctgtggtcttcacatcagcgaggcaatacacgtcctgaactacgagctcaacaaccgaagaaagatcgtgagatcaaccggtcgccgactccaggtgcaaccaggcctgctccgcatcctgctctagtaatggaactggtcgtcctagctgttgttcacaactggatcagatgaaaaagaagggaaaaagaaaagaaaagaaaagataagttgacctgtacttttgtatatggcagagattgctagcaggatagtagcgttaagaacttaagatagctcatgtaacattcatgtcaggctttttgtcagcaaatgtatacgtcttaaaatttgggagttagggaatattctcgttgtctttggtgccggtggatgcacacggcatagcgtcttcacagaatcacaatcatattctcgatcacaatcttcggtgctggtggatgcttaagttctgttcctgctggtgaattcaaattgtgagtaatgcctggtcgatgcattagttcttcacaatagtcgattcaaattgtgcgttgttagattattgttttgtattttgtctaagtgtaatgggcattggttagtctatatctctttactgatatatacaacattcagtctctataggatagggttttcaacattgtatccagtctagttctctcttccttagccgttgccaccacct

SEQ ID NO: 84740 - DNA, 3110 bp, Zea Mays
ctggcgaaggcaacaggggccgaagtgtcaacgtgtggctgcaatccacctccgcattcactccacgcgcacgccgctatacgcgacgctgccgagcgcatcgccgccggtccctccctcacttcctgtgcctgttctcagcccgccgcttctcagtccacttctgccgcagcccctcttctctcggtctagagatccgtccgggcgcggcagcctcgctttcgtttcggtaagcaatcatactcgagcttgcttggattccctagtccgaagggctttgttggcaatcgaaccctaaaatccttcttctgattcgttcagttagttgtagatttgtgtgctgacggatgccctgctaatccaatacatcgatccgtggcctgtctagatttttgttcttgaaaacgggcaaggtcgacatgagttgacagtgtacgagttcttgctttcttgttatctaatcaaggtgttggtgcagcttgtttaccaaaatttagggggtcacgtgaagcctgtccctgcttcaggaggggcgaatgttccttcttccaaattcccagttcgcgatgttttttccccttatggatggtcaatggtgcagtagctggcgtcaaatacttttagaatagagccttttctatctgatgtaccaatgctagaataaaactcatttgttcataactggatccctcaagcaatagtagttcttaatcttctacctttgttgaattgtgaaatatgacactgtgcttgcgctagtttgaagtccaacccaggagtgattagtggtgttcagctcagtaccgtagttctgctttgagcatgtttggtgtccggtgtccattttcgtctgcctcaatctgaatctttatgtttaccttttttccccactttcagcataatccaaattctatttgacatgttacctttttcatccatacctgtgatttggatttatgacttatcttgctgtaatttcctttgacctgattgtttagtcgtgttgaagaatgtagtatctgtggtagcatggccatgagaagccagtgattttgagttttctttgtcgttatttttctaagttagttccgcttaatatatcatgatcaaggccagttatttaattcttagaagcggtctgtgcttctgttaagtttctatttgcagaaatctagcttttactaccatgcccaattatgtctaataggcacggagaacaatcactttagaagacttgtactccttggcgtgtcatactctttgtaacaatcttaccattcttgagaagaggtacatctgtccgtcagcaatgtccatagaagagaggaagataagtgtgataagcaagagcattgcgctaaatccaaatgcagaggaatttgttccttcatcccttagatctgtcaatgattcctccaagagatcatatgcaactacggttgtctcagggatatctaaagaatccagcactgacaagccagagtcaattttacgaagtaactctgatgaagaagcacatcagtactggcagcaacagctccctgacgacattacccctgatttcaaagtcatgggacaagatgaaagtcctggacctgacagtctatcactcacagacctgtccataaatgatggcattggcacatcaatattttctccgaaccagacactgagcatgcagcaccgtgcttcgccttttatcagggacaaactaaatacacacccaaagattaacttgtctatcccaacttatatggatgaacggtcccaagccacaattttgagtccaactgcaggttccatgagtccaaatgctgctccatgggtgaagactctaaggaatgggggacattataacacaagcataagggatgccagtcagtacaatggagattctagcattggagcttcattgcacaaccttactgatgcatatcatggaagcaggcgcagcttaagctcgactatggatatcatgaatcagctggagagtaaagtcgatggacgacgcagtcagaacctcaggtcactatcatttggaaattcaagtcctacatcaccagcatcatatgcccaaaatggtcttggaaactatgctggacgtgaacacgtatccctcgatgttcctagaggaaggtacaagacgactagtttgcctgttcctggtcttggttcaagcagaggttatcagttgttgggtggctcatataatggaaaccatgatatgatctcaaccaataccccacaaaacatggctggaattcagacaggaccagcttggcttgaaagtgacgctgagggagctatacagtatacaaagcctgttggctcaggagaaggctagagaaacaacatatcgacaaagattacaaacaccacaattgcaaggcctcatccaggagcaaaatcccccaatcgatctctgtggtcttcacatcagcgaggcaatacacgtcctgaactacgagctcaacaaccgaagaaagatcgtgagatcaaccggtcgccgactccaggtgcaaccaggcctgctccgcatcctgctctagtaatggaactggtcgtcctagctgttgttcacaactggatcagatgaaaaagaagggaaaaagaaaagaaaagaaaagataagttgacctgtacttttgtatatggcagagattgctagcaggatagtagcgttaagaacttaagatagctcatgtaacattcatgtcaggctttttgtcagcaaatgtatacgtcttaaaatttgggagttagggaatattctcgttgtctttggtgccggtggatgcacacggcatagcgtcttcacagaatcacaatcatattctcgatcacaatcttcggtgctggtggatgcttaagttctgttcctgctggtgaattcaaattgtgagtaatgcctggtcgatgcattagttcttcacaatagtcgattcaaattgtgcgttgttagattattgttttgtattttgtctaagtgtaatgggcattggttagtctatatctctttactgatatatacaacattcagtctctataggatagggttttcaacattgtatccagtctagttctctcttccttagccgttgccaccacct

SEQ ID NO: 84741 - DNA, 2661 bp, Zea Mays
ctggcgaaggcaacaggggccgaagtgtcaacgtgtggctgcaatccacctccgcattcactccacgcgcacgccgctatacgcgacgctgccgagcgcatcgccgccggtccctccctcacttcctgtgcctgttctcagcccgccgcttctcagtccacttctgccgcagcccctcttctctcggtctagagatccgtccgggcgcggcagcctcgctttcgtttcggcacggagaacaatcactttagaagacttgtactccttggcgtgtcatactctttgtaacaatcttaccattcttgagaagaggtacatctgtccgtcagcaatgtccatagaagagaggaagataagtgtgataagcaagagcattgcgctaaatccaaatgcagaggaatttgttccttcatcccttagatctgtcaatgattcctccaagagatcatatgcaactacggttgtctcagggatatctaaagaatccagcactgacaagccagagtcaattttacgaagtaactctgatgaagaagcacatcagtactggcagcaacagctccctgacgacattacccctgatttcaaagtcatgggacaagatgaaagtcctggacctgacagtctatcactcacagacctgtccataaatgatggcattggcacatcaatattttctccgaaccagacactgagcatgcagcaccgtgcttcgccttttatcagggacaaactaaatacacacccaaagattaacttgtctatcccaacttatatggatgaacggtcccaagccacaattttgagtccaactgcaggttccatgagtccaaatgctgctccatgggtgaagactctaaggaatgggggacattataacacaagcataagggatgccagtcagtacaatggagattctagcattggagcttcattgcacaaccttactgatgcatatcatggaagcaggcgcagcttaagctcgactatggatatcatgaatcagctggaggtctgtcctcagtgtcctcatttgtcaactatgctacatgtctaaagttgttttgtcccatgtggccatgtttctcgtttctccactatgctgtttgtatcaaattgttcttaccaaaagctgcaccaactgaaactgtcatgctgctgacgactcaactatctatgtgaaagatcagcttaaagagatgctactgtgcacctaatgtatctgtatcactaaccagttctatcttggatgattggttctgaaattcataacatttcttaaattatgtttgttttttgttttaaatttccaagaatactgtaaaatgtcttattttagtgcaggatcgatcgtacatacactcgtattgctggatctatgttcaggcatagtgtactagtagctcaaatataggaaaatgcttatcctctagaaggcgctgaactaccccccctcctccttgtgtccagagtaaagtcgatggacgacgcagtcagaacctcaggtcactatcatttggaaattcaagtcctacatcaccagcatcatatgcccaaaatggtcttggaaactatgctggacgtgaacacgtatccctcgatgttcctagaggaaggtacaagacgactagtttgcctgttcctggtcttggttcaagcagaggttatcagttgttgggtggctcatataatggaaaccatgatatgatctcaaccaataccccacaaaacatggctggaattcagacaggaccagcttggcttgaaagtgacgctgaggcaagcacatatttggaatcaaaggatgaagttcatgattttgcaagcctgcgacatgcagttcttgaacaggagctatacagtatacaaagcctgttggctcaggagaaggctagagaaacaacatatcgacaaagattacaaacaccacaattgcaaggcctcatccaggagcaaaatcccccaatcgatctctgtggtcttcacatcagcgaggcaatacacgtcctgaactacgagctcaacaaccgaagaaagatcgtgagatcaaccggtcgccgactccaggtgcaaccaggcctgctccgcatcctgctctagtaatggaactggtcgtcctagctgttgttcacaactggatcagatgaaaaagaagggaaaaagaaaagaaaagaaaagataagttgacctgtacttttgtatatggcagagattgctagcaggatagtagcgttaagaacttaagatagctcatgtaacattcatgtcaggctttttgtcagcaaatgtatacgtcttaaaatttgggagttagggaatattctcgttgtctttggtgccggtggatgcacacggcatagcgtcttcacagaatcacaatcatattctcgatcacaatcttcggtgctggtggatgcttaagttctgttcctgctggtgaattcaaattgtgagtaatgcctggtcgatgcattagttcttcacaatagtcgattcaaattgtgcgttgttagattattgttttgtattttgtctaagtgtaatgggcattggttagtctatatctctttactgatatatacaacattcagtctctataggatagggttttcaacattgtatccagtctagttctctcttccttagccgttgccaccacct

SEQ ID NO: 84742 - DNA, 2875 bp, Zea Mays
atcaatgtgtgcgtctggcgaaggcaacaggggccgaagtgtcaacgtgtggctgcaatccacctccgcattcactccacgcgcacgccgctatacgcgacgctgccgagcgcatcgccgccggtccctccctcacttcctgtgcctgttctcagcccgccgcttctcagtccacttctgccgcagcccctcttctctcggtctagagatccgtccgggcgcggcagcctcgctttcgtttcgcttgtttaccaaaatttagggggtcacgtgaagcctgtccctgcttcaggaggggcgaatgttccttcttccaaattcccagttcgcgatgttttttccccttatggatggtcaatggtgcagtagctggcgtcaaatacttttagaatagagccttttctatctgatgtaccaatgctagaataaaactcatttgttcataactggatccctcaagcaatagtagttcttaatcttctacctttgttgaattgtgaaatatgacactgtgcttgcgctagtttgaagtccaacccaggagtgattagtggtgttcagctcagtaccgtagttctgctttgagcatgtttggtgtccggtgtccattttcgtctgcctcaatctgaatctttatgtttaccttttttccccactttcagcataatccaaattctatttgacatgttacctttttcatccatacctgtgatttggatttatgacttatcttgctgtaatttcctttgacctgattgtttagtcgtgttgaagaatgtagtatctgtggtagcatggccatgagaagccagtgattttgagttttctttgtcgttatttttctaagttagttccgcttaatatatcatgatcaaggccagttatttaattcttagaagcggtctgtgcttctgttaagtttctatttgcagaaatctagcttttactaccatgcccaattatgtctaataggcacggagaacaatcactttagaagacttgtactccttggcgtgtcatactctttgtaacaatcttaccattcttgagaagaggtacatctgtccgtcagcaatgtccatagaagagaggaagataagtgtgataagcaagagcattgcgctaaatccaaatgcagaggaatttgttccttcatcccttagatctgtcaatgattcctccaagagatcatatgcaactacggttgtctcagggatatctaaagaatccagcactgacaagccagagtcaattttacgaagtaactctgatgaagaagcacatcagtactggcagcaacagctccctgacgacattacccctgatttcaaagtcatgggacaagatgaaagtcctggacctgacagtctatcactcacagacctgtccataaatgatggcattggcacatcaatattttctccgaaccagacactgagcatgcagcaccgtgcttcgccttttatcagggacaaactaaatacacacccaaagattaacttgtctatcccaacttatatggatgaacggtcccaagccacaattttgagtccaactgcaggttccatgagtccaaatgctgctccatgggtgaagactctaaggaatgggggacattataacacaagcataagggatgccagtcagtacaatggagattctagcattggagcttcattgcacaaccttactgatgcatatcatggaagcaggcgcagcttaagctcgactatggatatcatgaatcagctggagagtaaagtcgatggacgacgcagtcagaacctcaggtcactatcatttggaaattcaagtcctacatcaccagcatcatatgcccaaaatggtcttggaaactatgctggacgtgaacacgtatccctcgatgttcctagaggaaggtacaagacgactagtttgcctgttcctggtcttggttcaagcagaggttatcagttgttgggtggctcatataatggaaaccatgatatgatctcaaccaataccccacaaaacatggctggaattcagacaggaccagcttggcttgaaagtgacgctgagggagctatacagtatacaaagcctgttggctcaggagaaggctagagaaacaacatatcgacaaagattacaaacaccacaattgcaaggcctcatccaggagcaaaatcccccaatcgatctctgtggtcttcacatcagcgaggcaatacacgtcctgaactacgagctcaacaaccgaagaaagatcgtgagatcaaccggtcgccgactccaggtgcaaccaggcctgctccgcatcctgctctagtaatggaactggtcgtcctagctgttgttcacaactggatcagatgaaaaagaagggaaaaagaaaagaaaagaaaagataagttgacctgtacttttgtatatggcagagattgctagcaggatagtagcgttaagaacttaagatagctcatgtaacattcatgtcaggctttttgtcagcaaatgtatacgtcttaaaatttgggagttagggaatattctcgttgtctttggtgccggtggatgcacacggcatagcgtcttcacagaatcacaatcatattctcgatcacaatcttcggtgctggtggatgcttaagttctgttcctgctggtgaattcaaattgtgagtaatgcctggtcgatgcattagttcttcacaatagtcgattcaaattgtgcgttgttagattattgttttgtattttgtctaagtgtaatgggcattggttagtctatatctctttactgatatatacaacattcagtctctataggatagggttttcaacattgtatccagtctagttctctcttccttagccgttgccaccacct

SEQ ID NO: 84743 - DNA, 2987 bp, Zea Mays
cacaccgtcattaagtaggaaagaaagatgtgccacagaaaatcaatgtgtgcgtctggcgaaggcaacaggggccgaagtgtcaacgtgtggctgcaatccacctccgcattcactccacgcgcacgccgctatacgcgacgctgccgagcgcatcgccgccggtccctccctcacttcctgtgcctgttctcagcccgccgcttctcagtccacttctgccgcagcccctcttctctcggtctagagatccgtccgggcgcggcagcctcgctttcgtttcgcttgtttaccaaaatttagggggtcacgtgaagcctgtccctgcttcaggaggggcgaatgttccttcttccaaattcccagttcgcgatgttttttccccttatggatggtcaatggtgcagtagctggcgtcaaatacttttagaatagagccttttctatctgatgtaccaatgctagaataaaactcatttgttcataactggatccctcaagcaatagtagttcttaatcttctacctttgttgaattgtgaaatatgacactgtgcttgcgctagtttgaagtccaacccaggagtgattagtggtgttcagctcagtaccgtagttctgctttgagcatgtttggtgtccggtgtccattttcgtctgcctcaatctgaatctttatgtttaccttttttccccactttcagcataatccaaattctatttgacatgttacctttttcatccatacctgtgatttggatttatgacttatcttgctgtaatttcctttgacctgattgtttagtcgtgttgaagaatgtagtatctgtggtagcatggccatgagaagccagtgattttgagttttctttgtcgttatttttctaagttagttccgcttaatatatcatgatcaaggccagttatttaattcttagaagcggtctgtgcttctgttaagtttctatttgcagaaatctagcttttactaccatgcccaattatgtctaataggcacggagaacaatcactttagaagacttgtactccttggcgtgtcatactctttgtaacaatcttaccattcttgagaagaggtacatctgtccgtcagcaatgtccatagaagagaggaagataagtgtgataagcaagagcattgcgctaaatccaaatgcagaggaatttgttccttcatcccttagatctgtcaatgattcctccaagagatcatatgcaactacggttgtctcagggatatctaaagaatccagcactgacaagccagagtcaattttacgaagtaactctgatgaagaagcacatcagtactggcagcaacagctccctgacgacattacccctgatttcaaagtcatgggacaagatgaaagtcctggacctgacagtctatcactcacagacctgtccataaatgatggcattggcacatcaatattttctccgaaccagacactgagcatgcagcaccgtgcttcgccttttatcagggacaaactaaatacacacccaaagattaacttgtctatcccaacttatatggatgaacggtcccaagccacaattttgagtccaactgcaggttccatgagtccaaatgctgctccatgggtgaagactctaaggaatgggggacattataacacaagcataagggatgccagtcagtacaatggagattctagcattggagcttcattgcacaaccttactgatgcatatcatggaagcaggcgcagcttaagctcgactatggatatcatgaatcagctggagagtaaagtcgatggacgacgcagtcagaacctcaggtcactatcatttggaaattcaagtcctacatcaccagcatcatatgcccaaaatggtcttggaaactatgctggacgtgaacacgtatccctcgatgttcctagaggaaggtacaagacgactagtttgcctgttcctggtcttggttcaagcagaggttatcagttgttgggtggctcatataatggaaaccatgatatgatctcaaccaataccccacaaaacatggctggaattcagacaggaccagcttggcttgaaagtgacgctgaggcaagcacatatttggaatcaaaggatgaagttcatgattttgcaagcctgcgacatgcagttcttgaacaggagctatacagtatacaaagcctgttggctcaggagaaggctagagaaacaacatatcgacaaagattacaaacaccacaattgcaaggcctcatccaggagcaaaatcccccaatcgatctctgtggtcttcacatcagcgaggcaatacacgtcctgaactacgagctcaacaaccgaagaaagatcgtgagatcaaccggtcgccgactccaggtgcaaccaggcctgctccgcatcctgctctagtaatggaactggtcgtcctagctgttgttcacaactggatcagatgaaaaagaagggaaaaagaaaagaaaagaaaagataagttgacctgtacttttgtatatggcagagattgctagcaggatagtagcgttaagaacttaagatagctcatgtaacattcatgtcaggctttttgtcagcaaatgtatacgtcttaaaatttgggagttagggaatattctcgttgtctttggtgccggtggatgcacacggcatagcgtcttcacagaatcacaatcatattctcgatcacaatcttcggtgctggtggatgcttaagttctgttcctgctggtgaattcaaattgtgagtaatgcctggtcgatgcattagttcttcacaatagtcgattcaaattgtgcgttgttagattattgttttgtattttgtctaagtgtaatgggcattggttagtctatatctctttactgatatatacaacattcagtctctataggatagggttttcaacattgtatccagtctagttctctcttccttagccgttgccaccacct

SEQ ID NO: 84744 - DNA, 3126 bp, Zea Mays
acaccaactgttctgtgtcaagcctccagcaaaaatcgtctgaactctggagccttccagcgagaatcgtaaagcggcaaaacaatgttgcttctcgcctgctagtcgccctattctactccactctgttttctggaggctgctaaactaaacccttcttctccccactccgccctcggacccgccgccgccgccgcttgccgggtctatagccatgtcaccagcggttgcctctgcctcatctggcgaccgcatacgaacctacgaagacttcgtgcgggtacacgcgtacctgctggccgcggcgggcatcccgccgtcgctgcaccggaggctgtaccgcaagctcgcggacgaggtcttcgacggcggggaggtctttgccgtagagccgtgcgaggacgggaggcagcggcgcctcgtgctcaccgccgatcagtctctaggaaaagagtccgatgtcttcctcgtcgaccatgcgtggtccttccgcctccctgatgcgctcaagcagttgagggaagtaccaggattggctgaaaggatggcagcattaatgtgtgtcgatttggaccgcaagattgaagcagatgagcaggatgatgacgagagtgggagcttggagcatgtatcgcaagtagtcgagaaagaaagggctagagttcaggagagaagtgattctacagcttggctggaacttgaagaacttggaattgatgatgacatgctagtagccttggatctatctgcaaattttccgaatctggtagctctgaacctatggggaaacaagctgcgggatccagagaaagttatgcaagaaatcaggaagtgcacaaagctaaaggcactttggttgaacgagaatcctgttcttggcaaaagtattgacaaagctgttttcgatggcctctctggattggaaatatacaattcacattttacaagtaaagccggagagtgggcactaggtttttgcgcagacattgttggagcagataatccctgttcttctgtggaaagcacattgtttgggagcattgggactattgacctttctgatagatgcattcacaagctaccagaggtgttctctcctagtaaattgccatctctgtcaaaattgaacattcgtggtaatcctctggatcaaatttctggcgatgatctcttaaagctatttggtggattcactcagttacaagagttggaggttgacattcctggccctctgggaaacagtgcaatctccattcttgagtctcttcctaatttatctttgctaaatggcgtggattcctcaagcataatagagagtgggaagcatatagttgactctgcacttgaaccacggcttccagaatggtcacctgaagaaccccttgctgaaagagttattggcgcaatgtggttgtatcttatgacataccggcttgctgatgatgaaaagattgacgaaacacctgtttggtatgtcatggacgagttgggctcagccatgcgccacagtgataatgcaaacttcagaatagctccattcttgttcatgccagaagggaaactgcacactgctataagttacacaattctgtggcccactcatgatgttcatactggagaagagtgtacccgggatttcttgtttggtattggtgaggataaacagcgttcagctaggcttacagcttggttccgcacacctgagaactactttattcaggaattcaggaggtaccaggaacagcttcaatcaaatagcatttgttcttcgacaaaaatagaagagacacagacaccctcaacccaaaagtgtacgctctaagggatggtcgcgtccttcgagtatatactgacatacctcatgtagaggagtttttaacacggccagaatttgttctcacgactgatccaaaggaagctgacatcatctgggtaagcatgcaagtagattcagaagtaaagaatgctgtagggctcacagaccaacaatacacaaaccaatttccttttgaagcttgcctggtcatgaagcaccaccttgcggagaccgtccacaaggcttggggctcacctgaatggcttcaacctacatataacctggaaacccatttgtctccactcattggtgattattgtgtgaggaaacgagatggcatggacaatttatggatcatgaagccttggaacatggcgagaacaatcgataccacagttactggtgatttgtctgctatcatcagacttatggagacaggccccaagatatgccaaaaatatattgaacgccctgcacttttccaaggaaggaagtttgatcttcggtacattgttttagtccgtagtatccgccctttggaaatatttctgtctgatgttttctgggttaggttagcaaacaatcagtacactttggagaagactagcttttttgagtacgagacccatttcactgtgatgaattatatcggaaggatgaatcatatgaacacaccagagttcgtcaaggggttcgagaaggagcaccaagttaaatggctggacattcatgaaagcgtacgatctaccatacgccgtatctttgaggcggccgcagctgtccatcctgagatgcagaacccattctccagggccatctacggtgtagatattatgcttgacaacagattcaaaccaaaggtttttagaggtgacatactgtccagactgcgggagggcatgcaagtatgacacgcaagctctggtaggaagccaggataccatcagaggccgtgattttttcaactcggtgtttggctgcctctttcttgacgagcaaacgcatgtattgcccttataggcatccgccccagaggcggctgctgtaacatcaggttttatcataataacgtgacatatgtataaccttcttgtctgttggctgttgcctctttttggccagtggtgcattctcgtcgttgtttgcgcagcgctcccgcagtacctttttaaaaatgccattttttagaacaatccttctacctctccctaaacccttgtgtcttagttgtactttttgcactaattgatttaaggctttgtttggtttggtgttaaatttaccacactttgtctatctttttatctaag

SEQ ID NO: 84745 - DNA, 720 bp, Zea Mays
ctaaaccctgtaacctctcgtctgcggtctgccatccgcctcgaagcaccacacacaccaatggccgcctccagcgccgacccggctcagcaccacgcctcctcgaggccgccactcctcctcgccgtacgccacctgcccttcccgggcgtcccccgaacacgcacgttccccgtccccggccccgacgtcctcgcccctctcgcccgccgcctcgaggagctcgcgtccgcggcggccgcccacccgctcctgaagccgctcttcgccgcccactcccacctctcctccttctcccagggcaggaggcgtctggtggcggcgcggcgtgccacggtgctgtcgtccggggagctctgcttcgcggcggtgctcggggactcggtggccgggacggtggtggccagcggcatcaataacttcctcaacctttacaacacggtgctcgtcgtcaggctcgtgctcacctggttccccaacacgccgcccgccatcgtcgcgcctctcagcacgatactcgctttcctcgtcctcaacgccttcaccagcacggccgccgcgcttcccgcggagctgccaagctgctcggcaacggcgcagcatcaccagaggactgctgtctcaccctgctcggcgccgcatgaggcgacgctcagccagaggaaatggatgcggagaatgcggtcacagaagccacagggagacgatggtgatcactag

SEQ ID NO: 84746 - DNA, 2719 bp, Zea Mays
gaggatgtcgagcgagttatctccggctcgaacccgtactcctcaagcaaaaccactggaggagcaccaagagttatctccggctcgaacccgagccaggtcctgactcctgatccgcaccgcacacggcaagggggcatcgccgacgggccgtcagcggcgagacccaagccaacacagcccagcgatgtcggcgcgtgaccgcgagacggccgaggcgctggtgcgcctcgccgcctcgctggacggggcggtgctcggcctcggcacggctgccgtcgccgtcgcgtcgtgggtcaagtacctcgccgtctcggggcagctacgcctcgtcgcctccgcggcgacggcctccatcgccgacgcccgctccctcctctcaggcgacggcgccgagccgcggatcgccgcggtgcggggctacgtgcgggcccatgacaagttcttccgggccccgttctcaggcgaggcgggcgtcgtcacgaagcacacccagatgtgtttgttcacagaatggagaggcatctttggatggacctttgatctgcatgctcttcttttcagatcatggaaagagcaaattgtgacgtcttttagatcggttccatttgttctggttagtactgaattaggaaatcctacgggagtggtacatataaatgtggataaggcggatcaaccgttgcctcttaccacagtgtttcataaacttatcccacttgagacgactccttacacattgtttcaaactattattggcaacggctatccgattgcgttgttggatgaagaaaaaatactaccgattggtaagaaaattacagcaataggactatgtcaagcaaaggatgcagaaagtgttgagataacatcgtgcccagagatcccctttttcttatctgaactaaccaaggatgagatgcaagctcagctggcttcacgtgctaggatactcttctggggtagtattgttttgggaaccttgtcggtttgcctagtgggccatgccatttacaggggctggacgagaatcaaactacgaagagaggctaggcatgcacgacagatgtttgaggaggctgaagatgctattcacagggatgactctagtgatgatgatgaaataggagacgggcaactatgtgttgtgtgcttaaggaagagaaggagggcagcttttattccatgtgggcatcttgtctgctgttccgaatgcgcattaacaatagagcgtacacctcatccattgtgccctatgtgtcgtcaagacatcagatacatgatgagggtttatgactcttgagttttggaaactttggtctcaaccaaagtttttctccgtaaagagagcgctagctgggtcccactctggctgattggtctcaaccaaagtttttcccaaacaccttgatgtattggatactgttgtattcgaaaactgaagcattgtaaactgtagtaatatcatgactaaagtatactttagtatttgaaaaactacagtttggaaaaactgtgttcccaaacagggccttagtattttataaagatgactcactgttttatctcaatgcttttttctagctttacaattatgatgtaatattctgactaatacactgaataaaattgctatccttgttcggttgcttcattattggcatagttagttttggatacctcatccatacattctttatctagatttgacattcagactgaactttatttccttcaactggtagaaattgttaacacctcttccacttaggagcagtttttatcaaaagaataagaatgagcttgtaactatattcgacagtgtggttggtgcggtggttcttcaaattatgatcatgcatcttgaactattgctgctctatgcagtactactactatgaagaaccccctgagttgctgcgtgtttaatttgttcacagatgagacatctatctgtccattttgtctgaattttaccataatctaagtagcatatgaaatagagttcaggatgaattcgtttgattttatttgcaggtatgctgctgataagatctacacgcttccttgctgacccatgcaaacctgaggagcacaactgttcgtcctgctgggcgttttcctagtcaagggtttactgcaaataggttaaagatttggacattttctgccatctgatcgtcacctctagtgctgtggaagaggttgcaaaaaaaaaaatgctgctcgtcgtgatgaacgcaatgctgttcctgctctacggtaacctggcaccagataacagcggtgtcggagccttatgcttgccagcggataacatcgccgaagcgtgaagtcttgttctgatgctggctgcgtggtgtttggtttgctagaacagtggtgtccactctacgccgaatcattgagaaactctagtgttagcaaactgtaattttagaacaggcgtagagtggagtttttaaaactctaaactggctgcctggtgaatgctgttctagcaatactatggttttaaaaaatttattgcatgtataatgctccatgattttgttactgcggatgacgatgatggaaacgaagtcagtgacacttaggtctagttttgcaacacaatttttccaagagatttttaaaataatcttttttttcttatgaaaaaaaaattctttgaaaaataggtttgtcaaactagcctttaaagtgtgtttggtttgag

SEQ ID NO: 84747 - DNA, 3108 bp, Zea Mays
gaggatgtcgagcgagttatctccggctcgaacccgtactcctcaagcaaaaccactggaggagcaccaagagttatctccggctcgaacccgagccaggtcctgactcctgatccgcaccgcacacggcaagggggcatcgccgacgggccgtcagcggcgagacccaagccaacacagcccagcgatgtcggcgcgtgaccgcgagacggccgaggcgctggtgcgcctcgccgcctcgctggacggggcggtgctcggcctcggcacggctgccgtcgccgtcgcgtcgtgggtcaagtacctcgccgtctcggggcagctacgcctcgtcgcctccgcggcgacggcctccatcgccgacgcccgctccctcctctcaggcgacggcgccgagccgcggatcgccgcggtgcggggctacgtgcgggcccatgacaagttcttccgggccccgttctcaggcgaggcgggcgtcgtcacgaagcacacccagatgtgtttgttcacagaatggagaggcatctttggatggacctttgatctgcatgctcttcttttcagatcatggaaagagcaaattgtgacgtcttttagatcggttccatttgttctggttagtactgaattaggaaatcctacgggagtggtacatataaatgtggataaggcggatcaaccgttgcctcttaccacagtgtttcataaacttatcccacttgagacgactccttacacattgtttcaaactattattggcaacggctatccgattgcgttgttggatgaagaaaaaatactaccgattggtaagaaaattacagcaataggactatgtcaagcaaaggatgcagaaagtgttgagataacatcgtgcccagagatcccctttttcttggagggagggcatgcattctcttggtgcactagtttttaacggtttgccatcactcagatctgaactaaccaaggatgagatgcaagctcagctggcttcacgtgctaggatactcttctggggtagtattgttttgggaaccttgtcggtttgcctagtgggccatgccatttacaggggctggacgagaatcaaactacgaagagaggctaggcatgcacgacagatgtttgaggaggctgaagatgctattcacagggatgactctagtgatgatgatgaaataggagacgggcaactatgtgttgtgtgcttaaggaagagaaggagggcagcttttattccatgtgggcatcttgtctgctgttccgaatgcgcattaacaatagagcgtacacctcatccattgtgccctatgtgtcgtcaagacatcagatacatgatgagggtttatgactcttgaggtaattggaaaacatcctttttagggggtgtttgggaacaaagtttttctgcagtattgaagcaatactgtagtattaagcaatactgcagtattatatactttgaggtgtttggcaactcatctgaaatctctgtatactaaactgtagtattgtaaatactgcacttgttttgcagttttggaaactttggtctcaaccaaagtttttctccgtaaagagagcgctagctgggtcccactctggctgattggtctcaaccaaagtttttcccaaacaccttgatgtattggatactgttgtattcgaaaactgaagcattgtaaactgtagtaatatcatgactaaagtatactttagtatttgaaaaactacagtttggaaaaactgtgttcccaaacagggccttagtattttataaagatgactcactgttttatctcaatgcttttttctagctttacaattatgatgtaatattctgactaatacactgaataaaattgctatccttgttcggttgcttcattattggcatagttagttttggatacctcatccatacattctttatctagatttgacattcagactgaactttatttccttcaactggtagaaattgttaacacctcttccacttaggagcagtttttatcaaaagaataagaatgagcttgtaactatattcgacagtgtggttggtgcggtggttcttcaaattatgatcatgcatcttgaactattgctgctctatgcagtactactactatgaagaaccccctgagttgctgcgtgtttaatttgttcacagatgagacatctatctgtccattttgtctgaattttaccataatctaagtagcatatgaaatagagttcaggatgaattcgtttgattttatttgcaggtatgctgctgataagatctacacgcttccttgctgacccatgcaaacctgaggagcacaactgttcgtcctgctgggcgttttcctagtcaaggtggcctaccctggatttgtgaatataatgtcttgaccctccaaattatgctcttgattgcctgggacaaatagcttagctgaagtcatgaactaacgtagagttattttttgtttgctttgcgcatatgtctatccatcatgtaaagcacagggtttactgcaaataggttaaagatttggacattttctgccatctgatcgtcacctctagtgctgtggaagaggttgcaaaaaaaaaaatgctgctcgtcgtgatgaacgcaatgctgttcctgctctacggtaacctggcaccagataacagcggtgtcggagccttatgcttgccagcggataacatcgccgaagcgtgaagtcttgttctgatgctggctgcgtggtgtttggtttgctagaacagtggtgtccactctacgccgaatcattgagaaactctagtgttagcaaactgtaattttagaacaggcgtagagtggagtttttaaaactctaaactggctgcctggtgaatgctgttctagcaatactatggttttaaaaaatttattgcatgtataatgctccatgattttgttactgcggatgacgatgatggaaacgaagtcagtgacacttaggtctagttttgcaacacaatttttccaagagatttttaaaataatcttttttttcttatgaaaaaaaaattctttgaaaaataggtttgtcaaactagcctttaaagtgtgtttggtttgag

SEQ ID NO: 84748 - DNA, 2120 bp, Zea Mays
gaggatgtcgagcgagttatctccggctcgaacccgtactcctcaagcaaaaccactggaggagcaccaagagttatctccggctcgaacccgagccaggtcctgactcctgatccgcaccgcacacggcaagggggcatcgccgacgggccgtcagcggcgagacccaagccaacacagcccagcgatgtcggcgcgtgaccgcgagacggccgaggcgctggtgcgcctcgccgcctcgctggacggggcggtgctcggcctcggcacggctgccgtcgccgtcgcgtcgtgggtcaagtacctcgccgtctcggggcagctacgcctcgtcgcctccgcggcgacggcctccatcgccgacgcccgctccctcctctcaggcgacggcgccgagccgcggatcgccgcggtgcggggctacgtgcgggcccatgacaagttcttccgggccccgttctcaggcgaggcgggcgtcgtcacgaagcacacccagatgtgtttgttcacagaatggagaggcatctttggatggacctttgatctgcatgctcttcttttcagatcatggaaagagcaaattgtgacgtcttttagatcggttccatttgttctggttagtactgaattaggaaatcctacgggagtggtacatataaatgtggataaggcggatcaaccgttgcctcttaccacagtgtttcataaacttatcccacttgagacgactccttacacattgtttcaaactattattggcaacggctatccgattgcgttgttggatgaagaaaaaatactaccgattggtaagaaaattacagcaataggactatgtcaagcaaaggatgcagaaagtgttgagataacatcgtgcccagagatcccctttttcttatctgaactaaccaaggatgagatgcaagctcagctggcttcacgtgctaggatactcttctggggtagtattgttttgggaaccttgtcggtttgcctagtgggccatgccatttacaggggctggacgagaatcaaactacgaagagaggctaggcatgcacgacagatgtttgaggaggctgaagatgctattcacagggatgactctagtgatgatgatgaaataggagacgggcaactatgtgttgtgtgcttaaggaagagaaggagggcagcttttattccatgtgggcatcttgtctgctgttccgaatgcgcattaacaatagagcgtacacctcatccattgtgccctatgtgtcgtcaagacatcagatacatgatgagggtttatgactcttgagtactactactatgaagaaccccctgagttgctgcgtgtttaatttgttcacagatgagacatctatctgtccattttgtctgaattttaccataatctaagtagcatatgaaatagagttcaggatgaattcgtttgattttatttgcaggtatgctgctgataagatctacacgcttccttgctgacccatgcaaacctgaggagcacaactgttcgtcctgctgggcgttttcctagtcaaggttaaagatttggacattttctgccatctgatcgtcacctctagtgctgtggaagaggttgcaaaaaaaaaaatgctgctcgtcgtgatgaacgcaatgctgttcctgctctacggtaacctggcaccagataacagcggtgtcggagccttatgcttgccagcggataacatcgccgaagcgtgaagtcttgttctgatgctggctgcgtggtgtttggtttgctagaacagtggtgtccactctacgccgaatcattgagaaactctagtgttagcaaactgtaattttagaacaggcgtagagtggagtttttaaaactctaaactggctgcctggtgaatgctgttctagcaatactatggttttaaaaaatttattgcatgtataatgctccatgattttgttactgcggatgacgatgatggaaacgaagtcagtgacacttaggtctagttttgcaacacaatttttccaagagatttttaaaataatcttttttttcttatgaaaaaaaaattctttgaaaaataggtttgtcaaactagcctttaaagtgtgtttggtttgag

SEQ ID NO: 84749 - DNA, 1402 bp, Zea Mays
agtagtagcgggcgacgcggccgcgaggcaggcaggtagaccacgccgcacgccagccagcggccagcgcccgccccgccgcgcttcggcattttcccattttctctctctgccgccgctccctcccgcggcggactcgataccccgcctctcctctcgcgaactagggggcagcgggcaggtgccggcaggcggctcgatcccttcctcctccctcgtcgcggggactgctgctgctgctgccgtgaccgcgagcatggccaccggcgccgttacgccgccgccgctggctggcgcgcggcgattcccccgtggacgaagcttcctccaccggcgcctcgctacctcgcctatgaaagatgaatctgtgatttccacagatggtggaaatgaggagacagacactgacagcctccatgttgctagaggattgtctcatcctgggctttcgtcaagtttatccaataaggcatcagtggtcccaacccctttgcttccttctggacaatctgatctccggttcaatcgtcttcgaccctcaattgatgaaagtgattgcaaatacaaaagattatttggctgctatgttgctcgtgaggctgtgatcgatgaggaatactggatcgctgcatggttgagagcagaagatcagtatgaaaatgagtcaggcaatcgctatgttgaaagctttaaaagaaagtttgcatcaaaggaattccatgcattaaagaagagatgcaacacacaacatagagagaagtatatctgtcttgtcgcggtaaagaacgatgacatcaggcgaactgtcctgaatagtgttgttggtaccttagatgtatgtgtaaggcatcctctatatggggagaaatttcctgaggtagggtgtaattgcaccttctctatgtgtcttttttgctgttgtatttagaagttatatctagaagttattcacaggagcctggaaaaccgtctcttcactgtcgaatttatcagcctgatcagccaaaatttgggtgctgaaaatatttacattcatgtgcataaagataacttaccagcatggaggctctatgatcagattggattcaagatcgttgatcaggatgacgattgtcgttcatcagacctgtgcttactctccttcagttcataaggcttgctgactagataggaatagaagggacatggcccctagttccatctccctgtccagggaaatgccatcagtcctcgcgatttggaaaggcgggatggtatgtgccaagtaataccttcaccaccttgtatatgatgaaagtgtttccaaatgtttgcggctttcgagattgtcactagatcggtggcagttcagatccaccagaatgtttgaggtatttgtatacatcaaaagcttctgtcgtgt

SEQ ID NO: 84750 - DNA, 1383 bp, Zea Mays
agtagtagcgggcgacgcggccgcgaggcaggcaggtagaccacgccgcacgccagccagcggccagcgcccgccccgccgcgcttcggcattttcccattttctctctctgccgccgctccctcccgcggcggactcgataccccgcctctcctctcgcgaactagggggcagcgggcaggtgccggcaggcggctcgatcccttcctcctccctcgtcgcggggactgctgctgctgctgccgtgaccgcgagcatggccaccggcgccgttacgccgccgccgctggctggcgcgcggcgattcccccgtggacgaagcttcctccaccggcgcctcgctacctcgcctatgaaagatgaatctgtgatttccacagatggtggaaatgaggagacagacactgacagcctccatgttgctagaggattgtctcatcctgggctttcgtcaagtttatccaataaggcatcagtggtcccaacccctttgcttccttctggacaatctgatctccggttcaatcgtcttcgaccctcaattgatgaaagtgattgcaaatacaaaagattatttggctgctatgttgctcgtgaggctgtgatcgatgaggaatactggatcgctgcatggttgagagcagaagatcagtatgaaaatgagtcaggcaatcggaattccatgcattaaagaagagatgcaacacacaacatagagagaagtatatctgtcttgtcgcggtaaagaacgatgacatcaggcgaactgtcctgaatagtgttgttggtaccttagatgtatgtgtaaggcatcctctatatggggagaaatttcctgaggagcctggaaaaccgtctcttcactgtcgaatttatcagcctgatcagccaaaatttgggtatgtaacaaatgtatgtgttgctaaatatgcaaggcgtcaagggattgctagcaacatgctgttattggccatagatgctgcaaaacttaacggtgctgaaaatatttacattcatgtgcataaagataacttaccagcatggaggctctatgatcagattggattcaagatcgttgatcaggatgacgattgtcgttcatcagacctgtgcttactctccttcagttcataaggcttgctgactagataggaatagaagggacatggcccctagttccatctccctgtccagggaaatgccatcagtcctcgcgatttggaaaggcgggatggtatgtgccaagtaataccttcaccaccttgtatatgatgaaagtgtttccaaatgtttgcggctttcgagattgtcactagatcggtggcagttcagatccaccagaatgtttgaggtatttgtatacatcaaaagcttctgtcgtgt

SEQ ID NO: 84751 - DNA, 1378 bp, Zea Mays
agtagtagcgggcgacgcggccgcgaggcaggcaggtagaccacgccgcacgccagccagcggccagcgcccgccccgccgcgcttcggcattttcccattttctctctctgccgccgctccctcccgcggcggactcgataccccgcctctcctctcgcgaactagggggcagcgggcaggtgccggcaggcggctcgatcccttcctcctccctcgtcgcggggactgctgctgctgctgccgtgaccgcgagcatggccaccggcgccgttacgccgccgccgctggctggcgcgcggcgattcccccgtggacgaagcttcctccaccggcgcctcgctacctcgcctatgaaagatgaatctgtgatttccacagatggtggaaatgaggagacagacactgacagcctccatgttgctagaggattgtctcatcctgggctttcgtcaagtttatccaataaggcatcagtggtcccaacccctttgcttccttctggacaatctgatctccggttcaatcgtcttcgaccctcaattgatgaaagtgattgcaaatacaaaagattatttggctgctatgttgctcgtgaggctgtgatcgatgaggaatactggatcgctgcatggttgagagcagaagatcagtatgaaaatgagtcaggcaatcgctatgttgaaagctttaaaagaaagtttgcatcaaaggaattccatgcattaaagaagagatgcaacacacaacatagagagaagtatatctgtcttgtcgcggtaaagaacgatgacatcaggcgaactgtcctgaatagtgttgttggtaccttagatgagcctggaaaaccgtctcttcactgtcgaatttatcagcctgatcagccaaaatttgggtatgtaacaaatgtatgtgttgctaaatatgcaaggcgtcaagggattgctagcaacatgctgttattggccatagatgctgcaaaacttaacggtgctgaaaatatttacattcatgtgcataaagataacttaccagcatggaggctctatgatcagattggattcaagatcgttgatcaggatgacgattgtcgttcatcagacctgtgcttactctccttcagttcataaggcttgctgactagataggaatagaagggacatggcccctagttccatctccctgtccagggaaatgccatcagtcctcgcgatttggaaaggcgggatggtatgtgccaagtaataccttcaccaccttgtatatgatgaaagtgtttccaaatgtttgcggctttcgagattgtcactagatcggtggcagttcagatccaccagaatgtttgaggtatttgtatacatcaaaagcttctgtcgtgt

SEQ ID NO: 84752 - DNA, 1700 bp, Zea Mays
ccacacccgtctggcccacagaacaagcgaaacggatagaccaaaaaaaggaggaagaatactagtagtagcgggcgacgcggccgcgaggcaggcaggtagaccacgccgcacgccagccagcggccagcgcccgccccgccgcgcttcggcattttcccattttctctctctgccgccgctccctcccgcggcggactcgataccccgcctctcctctcgcgaactagggggcagcgggcaggtgccggcaggcggctcgatcccttcctcctccctcgtcgcggggactgctgctgctgctgccgtgaccgcgagcatggccaccggcgccgttacgccgccgccgctggctggcgcgcggcgattcccccgtggacgaagcttcctccaccggcgcctcgctacctcgcctatgaaagatgaatctgtgatttccacagatggtggaaatgaggagacagacactgacagcctccatgttgctagaggattgtctcatcctgggctttcgtcaagtttatccaataaggcatcagtggtcccaacccctttgcttccttctggacaatctgatctccggttcaatcgtcttcgaccctcaattgatgaaagtgattgcaaatacaaaagattatttggctgctatgttgctcgtgaggctgtgatcgatgaggaatactggatcgctgcatggttgagagcagaagatcagtatgaaaatgagtcaggcaatcgctatgttgaaagctttaaaagaaagtttgcatcaaaggtacttgtgtaaacaacttagtagtgttttctatgtgcttaaacataattgagatatgatgtacatcttatttgtagcaagtaatgttaagaaattacaataacctctgttcaaaaagatttgttgacgcacgttataaaatattcacattaatttgtcacatcctaatagtttctattctggctcacatgtatgagagtctgtcatctcattgcaggaattccatgcattaaagaagagatgcaacacacaacatagagagaagtatatctgtcttgtcgcggtaaagaacgatgacatcaggcgaactgtcctgaatagtgttgttggtaccttagatgtatgtgtaaggcatcctctatatggggagaaatttcctgaggagcctggaaaaccgtctcttcactgtcgaatttatcagcctgatcagccaaaatttgggtatgtaacaaatgtatgtgttgctaaatatgcaaggcgtcaagggattgctagcaacatgctgttattggccatagatgctgcaaaacttaacggtgctgaaaatatttacattcatgtgcataaagataacttaccagcatggaggctctatgatcagattggattcaagatcgttgatcaggatgacgattgtcgttcatcagacctgtgcttactctccttcagttcataaggcttgctgactagataggaatagaagggacatggcccctagttccatctccctgtccagggaaatgccatcagtcctcgcgatttggaaaggcgggatggtatgtgccaagtaataccttcaccaccttgtatatgatgaaagtgtttccaaatgtttgcggctttcgagattgtcactagatcggtggcagttcagatccaccagaatgtttgaggtatttgtatacatcaaaagcttctgtcgtgt

SEQ ID NO: 84753 - DNA, 1286 bp, Zea Mays
agtagtagcgggcgacgcggccgcgaggcaggcaggtagaccacgccgcacgccagccagcggccagcgcccgccccgccgcgcttcggcattttcccattttctctctctgccgccgctccctcccgcggcggactcgataccccgcctctcctctcgcgaactagggggcagcgggcaggtgccggcaggcggctcgatcccttcctcctccctcgtcgcggggactgctgctgctgctgccgtgaccgcgagcatggccaccggcgccgttacgccgccgccgctggctggcgcgcggcgattcccccgtggacgaagcttcctccaccggcgcctcgctacctcgcctatgaaagatgaatctgtgatttccacagatggtggaaatgaggagacagacactgacagcctccatgttgctagaggattgtctcatcctgggctttcgtcaagtttatccaataaggcatcagtggtcccaacccctttgcttccttctggacaatctgatctccggttcaatcgtcttcgaccctcaattgatgaaagtgattgcaaatacaaaagattatttggctgctatgttgctcgtgaggctgtgatcgatgaggaatactggatcgctgcatggttgagagcagaagatcagtatgaaaatgagtcaggcaatcgctatgttgaaagctttaaaagaaagtttgcatcaaaggaattccatgcattaaagaagagatgcaacacacaacatagagagaagtatatctgtcttgtcgcggtaaagaacgatgacatcaggcgaactgtcctgaatagtgttgttggtaccttagatgtatgtgtaaggcatcctctatatggggagaaatttcctgaggtagggtgtaattgcaccttctctatgtgtcttttttgctgttgtatttagaagttatatctagaagttattcacaggagcctggaaaaccgtctcttcactgtcgaatttatcagcctgatcagccaaaatttgggtatgtaacaaatgtatgtgttgctaaatatgcaaggcgtcaagggattgctagcaacatgctgttattggccatagatgctgcaaaacttaacggtacaaaaaaaatagagctattctagaatagcatgtcccaaatgacaatgcacgatccactgatatctgcaacccatgacaggtgctgaaaatatttacattcatgtgcataaagataacttaccagcatggaggctctatgatcagattggattcaaggatgacgaaggtgaagatg

SEQ ID NO: 84754 - DNA, 506 bp, Zea Mays
ggctgcctcctcggtagggaggtggtgggttgccaccttgataaccagtgttaccaccttggtaggcagggcctgggttcccttggtaaccaccttgataccccggaggtccaccttggtagccaggagcagcaccttgctggtagtgaggagcaccgccagggttgtagcccgtctgtgggttttgcatttggggctgatagtttggttggccaccaccagcatgtggtggttgcggagacatgttgccctgactatggtgggatggcatctggttctggccaggtggaggtggggggccattgaaaccttgggcaggaggcccatctctgttctggtagttttgcatgttctcccttctcctgtcaaagttccttgacctgtcaaagttgcgaggcctatcattgcgccggtttctgtcattggcacgggcattgtttctcacccactcttcatgatatttaggatcataaggaacagcttgcccatttatgaagggttcgcct

SEQ ID NO: 84755 - DNA, 844 bp, Zea Mays
ctgctgggtatctggttcagcaagtgcacacaagagctgatccatagtttcagaattccacgtacatcactcagacaccaagcatagttttgagtactatatatagaacattaagtgcaaacagcgacaatccatgaaaatccgatagcaacaagggttcgatttatgctaggctacggcgcaccatctcttgcagaaggctactctgaaacaggggtgccaacttagtactcgtggtcatgttcactggaagttggagttgcctccttgaccctggtagccagggctgccaccagggtagccaggattgccaccacccgaatatggcggtacgttggggttgcctcctcggtagggaggtggtgggttgccaccttgataaccagtgttaccaccttggtaggcagggcctgggttcccttggtaaccaccttgataccccggaggtccaccttggtagccaggagcagcaccttgctggtagtgaggagcaccgccagggttgtagcccgtctgtgggttttgcatttggggctgatagtttggttggccaccaccagcatgtggtggttgcggagacatgttgccctgactatggtgggatggcatctggttctggccaggtggaggtggggggccattgaaaccttgggcaggaggcccatctctgttctggtagttttgcatgttctcccttctcctgtcaaagttccttgacctgtcaaagttgcgaggcctatcattgcgccggtttctgtcattggcacgggcattgtttctcacccactcttcatgatatttaggatcataaggaacagcttgcccatttatgaagggttcgcct

SEQ ID NO: 84756 - DNA, 1249 bp, Zea Mays
gtcaagtttggataccacgaagtgttttattcaacagccaggagatatggaatggcccttactcaaatgacagctttccagagtacgccgaggacattgaagctggcggagatgcagccccttcattttcaatgctgtcagagatggccagctgaagggtaaacatagaaagatccatcttttcgacattgacattccaggaaagatcactttcaaggaatcaaagactcttactgctgggcagagccctactgttgtagacacagatgttgggcgcattggtattggtatatgctatgacatccgtttccaggaactagcaatgttatatgctgcaagaggtgctcatttgttgtgctatcctggtgcattcaacatgactactggaccactgcattgggagttgctgcaaagggcgagggctgcagacaatcagctgtttgttgcaacatgcgctccagctcgagataccagtgcaggctatgttgcttggggacactccactcttgttggacctttcggagaggtgattgctacaacggagcatgaggaggcgaccataatagcagatattgactactcactgattgagcagaggaggcaatttcttcctgtgcaacaccagcggcgtggcgatctctatcagctggtagatgtccagagactgggttctcagtagcgagcctggatgcggctgtgtgcccgctctgcaggcttgctcgtactacttcggctctgcaggcttgctcgtactacttcgttcatgagatgcatgtctatgggttctagagatcgaccaacatgatgagtgaaggcggagaggacgcaataaggcgactgtagttgtaccttcagtggtgtctccagttgccaaataaattggttactttaacgtctgaagaaaacctccctccatgggacgaagataaaacggaggactgcgacttccctttgggcccgactagtttgaagtttgtactagcttcgggggtgtctgggagtcaagttttttttcacagttttggtagaatactgtagtattctcgaatactacggtattatatacaaaatgttgtttggcaatctagataaaatctatgtttttaaaactgaagtattgcaaataccttagggcatgtttggaaatgcggttttgaaatactgtagttttgagataccatagtttataattgtacatgacataaatactacggtattgctttaccacagtaaaactacagtattgctc

SEQ ID NO: 84757 - DNA, 2248 bp, Zea Mays
ttcttccctctctaattatctagaccactcagcaaacattcaatcaagcttgtggagacggaaactcacgacacacatcacaatgagccgagccgcaggacggcgccgccgatcggccggcgaccagattggcatggaaatggacatccgttggtggcgccggccgggagggcctttcccgtcaaaacggcaccaaaagtgctgtgccaccagcccaccactgacaaaccggacccacgacgtgctgatacccatccatccaccaacaactccccgctccggtgtccggtcgccgtcgcgactcacgcaacctcctcggctcgctagccgctacgctactatctacgtcgccacgacatctcccataagatggtagccgcagccgcagccgcagctgcagccacagccacagccacagccacagccacagccgccgcgctcctcgcccccggtctaaagctctgcgcgggccgcgcgcgcgtctcctctccctccggcctcccaccccgccgcgtcactgccatggcctccgcccccaactcctccttccgcccagaggaggcgcgctaccctcccgccctcgagctcccgatcccgcggctctccaagttcaaggtggcgctgtgccagctctcggtgacggcggacaagagtcgcaacatcgcgcacgcgcgagcggccatcgagaaggcagcctccgacggcgccaagctcgtggttctccccgagatatggaatggcccttactcaaatgacagctttccagagtacgccgaggacattgaagctggcggagatgcagccccttcattttcaatgctgtcagaggttgctcgcagtttacaaatcactcttgttggtgggtccatagctgaacgttctggcaacaacttatacaatacatgctgtgtctttggttcagatggccagctgaagggtaaacatagaaagatccatcttttcgacattgacattccaggaaagatcactttcaaggaatcaaagactcttactgctgggcagagccctactgttgtagacacagatgttgggcgcattggtattggtatatgctatgacatccgtttccaggaactagcaatgttatatgctgcaagaggtgctcatttgttgtgctatcctggtgcattcaacatgactactggaccactgcattgggagttgctgcaaagggcgaggtaataaatgagtttgaacctcaagttatgatgattatgcaagggaaatatagcgagttgaaatggtcacactttatttttgttaattagcatatctaaaagtagttcaaaacaagtcagaaccttgatcagaactcataattcttggaggtaatttcatatctgaaatgtttcactgctactttgccctgtgctgatgacatcatttatccaatgccagggctgcagacaatcagctgtttgttgcaacatgcgctccagctcgagataccagtgcaggctatgttgcttggggacactccactcttgttggacctttcggagaggtgattgctacaacggagcatgaggaggcgaccataatagcagatattgactactcactgattgagcagaggaggcaatttcttcctgtgcaacaccagcggcgtggcgatctctatcagctggtagatgtccagagactgggttctcagtagcgagcctggatgcggctgtgtgcccgctctgcaggcttgctcgtactacttcggctctgcaggcttgctcgtactacttcgttcatgagatgcatgtctatgggttctagagatcgaccaacatgatgagtgaaggcggagaggacgcaataaggcgactgtagttgtaccttcagtggtgtctccagttgccaaataaattggttactttaacgtctgaagaaaacctccctccatgggacgaagataaaacggaggactgcgacttccctttgggcccgactagtttgaagtttgtactagcttcgggggtgtctgggagtcaagttttttttcacagttttggtagaatactgtagtattctcgaatactacggtattatatacaaaatgttgtttggcaatctagataaaatctatgtttttaaaactgaagtattgcaaataccttagggcatgtttggaaatgcggttttgaaatactgtagttttgagataccatagtttataattgtacatgacataaatactacggtattgctttaccacagtaaaactacagtattgctc

SEQ ID NO: 84758 - DNA, 2297 bp, Zea Mays
gaaatgggaactgaactactgtgttaaacttatgtgatcataaccttgtctgtggagtgtggacatatatttctgcagggaaaggatgtgaggaggttctgaacttggaatgcaaccttccaagctccccagaatggcctgtaggtcaatggatagtttccatctgtgcagctcactgtgataaaacaagggcaatgtgcttttgtgggcctgggacaaaatacccagatcgtcctgtggcagaagcttgtggttttaaaacaattttacctgcaaaacctgatggtccaaagcttactgattggaaaacacctgacctggaaaacatacttacaacaaacagcagtaagttaggatggtgtaatgtggtccctgaggacgcatattcatccaaagtgaagtttaaagaagaatgtgattgcaaatatgatggtctctgggggcagttctgtgagacacgtgctgaatgcagctgcatcaaccagtgctctggacatgggcattgccgtggtggtttctgtaaatgtgacagtggatattttgggattgattgcagtatcccatcagcatattcgcttgcatatgactggccctcgtggctccagacaccagtgaatttaccagatctgaaaactttgaacagtaccaccattggtgttaaggccgttgttcagaaaaaaaggccactgatatatgtatatgatttgccagctgagtttgacagtcatcttcttgaaggacgacattacagattccagtgtgtaaacagaatatatgatgacatgaatagaactatatggacccagcaattgtatggtgctcagatagcacttcatgagagcattcttgctagccctcaccgcactcttaatggggacgaagctgattatttctatgtgccagtgcttgactcatgtctaataactagatccgatgatgctccacatcttctattgccgagggacctgcgccgaaggagctaccatgcacttgagtactatagaatggcacatggtcacatagctcagcagtatccttactggaaccgcacttcgggaagagaccatatctgggcagttcttttcatgggatgaaggtgcctgctatgcaccaaaagagatttggaagagcatgatgcttgtccactgggggaacactaacacaaaacataagaattcaacgacagcttattgggcagataactgggatgatattcctttggataagagaggcaaccatccatgttttgatccaagaaaggatctagtgcttccggcatggaaggaacctaacccaggggccatatggttaaaactgtgggcaaggccaaggaacaaccgtacaacacttttttatttcaacggtaatctaggttcagcatacgaaggaggccgtccagaagacacgtatagcatggggattcggcaaaagctagcagctgaatttggttccacaccaaacaagcagggaaggcttggacggcagcatgcggccgatgtgacagttacctatctacgaactgaaaaatattatgaagaattagcaagctctgttttttgtggtgtcctgccaggggatggctggagtggccgtatggaagatagcatgcttcaaggatgcattcctgtaataattcaggatggaatttttctgccatatgagaacgtgctcaactacaatagttttgcagtccgcatacaggaagatgacatcccaggcctcataagcacactccgaggaataaacgatacgcaagtagagtttatgctgggaaatgtccgccagatgtggcagaggtttttctatcgagactctatattgttagaggcgcaaagacagaaaaaactcttctctgaagaggcaccctggtctgttgaggtatcgaaacttcctgatgacgacgatgtctttgcaacgtttatacaggtattgcattataaactgtacaatgacccttggcgtcaagatttcctgcaaacaaaggatactcggctgccgaacatctgttcaagaacttcctgaagcatttagtcaggcagcattgcaactgtaaagaataagcatatattcttaggaacaaaagtacaaaactgtagatatttcttgcattctggacaattgttcttttgactgatagcccaatttaattagaccatttcctgaaaaaaaagaaaagaaaaatgcactgttttcatctatcaaaacatggatagcatacatcgcatttacagctctggtgtttgcaatcccaagctacatcgatttttaccgagaaagaattggattttgtcgtccag

SEQ ID NO: 84759 - DNA, 2307 bp, Zea Mays
gttggatttgagctctgtgagtgacctaggtgaaatgggaactgaactactgtgttaaacttatgtgatcataaccttgtctgtggagtgtggacatatatttctgcagggaaaggatgtgaggaggttctgaacttggaatgcaaccttccaagctccccagaatggcctgtaggtcaatggatagtttccatctgtgcagctcactgtgataaaacaagggcaatgtgcttttgtgggcctgggacaaaatacccagatcgtcctgtggcagaagcttgtggttttaaaacaattttacctgcaaaacctgatggtccaaagcttactgattggaaaacacctgacctggaaaacatacttacaacaaacagcagtaagttaggatggtgtaatgtggtccctgaggacgcatattcatccaaagtgaagtttaaagaagaatgtgattgcaaatatgatggtctctgggggcagttctgtgagacacgtgctgaatgcagctgcatcaaccagtgctctggacatgggcattgccgtggtggtttctgtaaatgtgacagtggatattttgggattgattgcagtatcccatcagcatattcgcttgcatatgactggccctcgtggctccagacaccagtgaatttaccagatctgaaaactttgaacagtaccaccattggtgttaaggccgttgttcagaaaaaaaggccactgatatatgtatatgatttgccagctgagtttgacagtcatcttcttgaaggacgacattacagattccagtgtgtaaacagaatatatgatgacatgaatagaactatatggacccagcaattgtatggtgctcagatagcacttcatgagagcattcttgctagccctcaccgcactcttaatggggacgaagctgattatttctatgtgccagtgcttgactcatgtctaataactagatccgatgatgctccacatcttctattgccggagctaccatgcacttgagtactatagaatggcacatggtcacatagctcagcagtatccttactggaaccgcacttcgggaagagaccatatctggttcttttcatgggatgaaggtgcctgctatgcaccaaaagagatttggaagagcatgatgcttgtccactgggggaacactaacacaaaacataagaattcaacgacagcttattgggcagataactgggatgatattcctttggataagagaggcaaccatccatgttttgatccaagaaaggatctagtgcttccggcatggaaggaacctaacccaggggccatatggttaaaactgtgggcaaggccaaggaacaaccgtacaacacttttttatttcaacggtaatctaggttcagcatacgaaggaggccgtccagaagacacgtatagcatggggattcggcaaaagctagcagctgaatttggttccacaccaaacaagcagggaaggcttggacggcagcatgcggccgatgtgacagttacctatctacgaactgaaaaatattatgaagaattagcaagctctgttttttgtggtgtcctgccaggggatggctggagtggccgtatggaagatagcatgcttcaaggatgcattcctgtaataattcaggatggaatttttctgccatatgagaacgtgctcaactacaatagttttgcagtccgcatacaggaagatgacatcccaggcctcataagcacactccgaggaataaacgatacgcaagtagagtttatgctgggaaatgtccgccagatgtggcagaggtttttctatcgagactctatattgttagaggcgcaaagacagaaaaaactcttctctgaagaggcaccctggtctgttgaggtatcgaaacttcctgatgacgacgatgtctttgcaacgtttatacaggtattgcattataaactgtacaatgacccttggcgtcaagatttcctgcaaacaaaggatactcggctgccgaacatctgttcaagaacttcctgaagcatttagtcaggcagcattgcaactgtaaagaataagcatatattcttaggaacaaaagtacaaaactgtagatatttcttgcattctggacaattgttcttttgactgatagcccaatttaattagaccatttcctgaaaaaaaagaaaagaaaaatgcactgttttcatctatcaaaacatggatagcatacatcgcatttacagctctggtgtttgcaatcccaagctacatcgatttttaccgagaaagaattggattttgtcgtccag

SEQ ID NO: 84760 - DNA, 2629 bp, Zea Mays
gcattcttatattggatacagcaatgcaacctacaaatgtcttcctaaccatgtgtacatcattttttcacagatcttataaaatttcatctctgagtacgctcagtatatctcctttcatctgtggcatactctgtttagatcacttgaaagaacacagaacatgtattttgtatgtctgaaagaatatatacctttcagtttattgtatatgaatttatggattaagaattgcagcattgaagcctcatatattgtttttttactacaaatacctgttgttggatttgagctctgtgagtgacctaggtgaaatgggaactgaactactgtgttaaacttatgtgatcataaccttgtctgtggagtgtggacatatatttctgcagggaaaggatgtgaggaggttctgaacttggaatgcaaccttccaagctccccagaatggcctgtaggtcaatggatagtttccatctgtgcagctcactgtgataaaacaagggcaatgtgcttttgtgggcctgggacaaaatacccagatcgtcctgtggcagaagcttgtggttttaaaacaattttacctgcaaaacctgatggtccaaagcttactgattggaaaacacctgacctggaaaacatacttacaacaaacagcagtaagttaggatggtgtaatgtggtccctgaggacgcatattcatccaaagtgaagtttaaagaagaatgtgattgcaaatatgatggtctctgggggcagttctgtgagacacgtgctgaatgcagctgcatcaaccagtgctctggacatgggcattgccgtggtggtttctgtaaatgtgacagtggatattttgggattgattgcagtatcccatcagcatattcgcttgcatatgactggccctcgtggctccagacaccagtgaatttaccagatctgaaaactttgaacagtaccaccattggtgttaaggccgttgttcagaaaaaaaggccactgatatatgtatatgatttgccagctgagtttgacagtcatcttcttgaaggacgacattacagattccagtgtgtaaacagaatatatgatgacatgaatagaactatatggacccagcaattgtatggtgctcagatagcacttcatgagagcattcttgctagccctcaccgcactcttaatggggacgaagctgattatttctatgtgccagtgcttgactcatgtctaataactagatccgatgatgctccacatcttctattgccggtaagaattgtgatccatatgttcttcgatggtcttgatgttctccagaatttgagttttaattttagagggacctgcgccgaaggagctaccatgcacttgagtactatagaatggcacatggtcacatagctcagcattcttttcatgggatgaaggtgcctgctatgcaccaaaagagatttggaagagcatgatgcttgtccactgggggaacactaacacaaaacataagaattcaacgacagcttattgggcagataactgggatgatattcctttggataagagaggcaaccatccatgttttgatccaagaaaggatctagtgcttccggcatggaaggaacctaacccaggggccatatggttaaaactgtgggcaaggccaaggaacaaccgtacaacacttttttatttcaacggtaatctaggttcagcatacgaaggaggccgtccagaagacacgtatagcatggggattcggcaaaagctagcagctgaatttggttccacaccaaacaagcagggaaggcttggacggcagcatgcggccgatgtgacagttacctatctacgaactgaaaaatattatgaagaattagcaagctctgttttttgtggtgtcctgccaggggatggctggagtggccgtatggaagatagcatgcttcaaggatgcattcctgtaataattcaggatggaatttttctgccatatgagaacgtgctcaactacaatagttttgcagtccgcatacaggaagatgacatcccaggcctcataagcacactccgaggaataaacgatacgcaagtagagtttatgctgggaaatgtccgccagatgtggcagaggtttttctatcgagactctatattgttagaggcgcaaagacagaaaaaactcttctctgaagaggcaccctggtctgttgaggtatcgaaacttcctgatgacgacgatgtctttgcaacgtttatacaggtattgcattataaactgtacaatgacccttggcgtcaagatttcctgcaaacaaaggatactcggctgccgaacatctgttcaagaacttcctgaagcatttagtcaggcagcattgcaactgtaaagaataagcatatattcttaggaacaaaagtacaaaactgtagatatttcttgcattctggacaattgttcttttgactgatagcccaatttaattagaccatttcctgaaaaaaaagaaaagaaaaatgcactgttttcatctatcaaaacatggatagcatacatcgcatttacagctctggtgtttgcaatcccaagctacatcgatttttaccgagaaagaattggattttgtcgtccag

SEQ ID NO: 84761 - DNA, 2451 bp, Zea Mays
caaggggtgtttcccttctgattcatatggtgctgtggcattccgaggcgcgccatggaaggctgagattggtcgatggcttgctgggtgtcatgctaactcttcgtctgttgatgttactgaggtttctcttctgcgacaggccatgggtgcaaaacgctgcgtgaaagactgcagtgctcgtggtgtttgcaactataatctgggagagtgcagatgctttcatggatattctgggaaaggatgtgaggaggttctgaacttggaatgcaaccttccaagctccccagaatggcctgtaggtcaatggatagtttccatctgtgcagctcactgtgataaaacaagggcaatgtgcttttgtgggcctgggacaaaatacccagatcgtcctgtggcagaagcttgtggttttaaaacaattttacctgcaaaacctgatggtccaaagcttactgattggaaaacacctgacctggaaaacatacttacaacaaacagcagtaagttaggatggtgtaatgtggtccctgaggacgcatattcatccaaagtgaagtttaaagaagaatgtgattgcaaatatgatggtctctgggggcagttctgtgagacacgtgctgaatgcagctgcatcaaccagtgctctggacatgggcattgccgtggtggtttctgtaaatgtgacagtggatattttgggattgattgcagtatcccatcagcatattcgcttgcatatgactggccctcgtggctccagacaccagtgaatttaccagatctgaaaactttgaacagtaccaccattggtgttaaggccgttgttcagaaaaaaaggccactgatatatgtatatgatttgccagctgagtttgacagtcatcttcttgaaggacgacattacagattccagtgtgtaaacagaatatatgatgacatgaatagaactatatggacccagcaattgtatggtgctcagatagcacttcatgagagcattcttgctagccctcaccgcactcttaatggggacgaagctgattatttctatgtgccagtgcttgactcatgtctaataactagatccgatgatgctccacatcttctattgccgagggacctgcgccgaaggagctaccatgcacttgagtactatagaatggcacatggtcacatagctcagcagtatccttactggaaccgcacttcgggaagagaccatatctggttcttttcatgggatgaaggtgcctgctatgcaccaaaagagatttggaagagcatgatgcttgtccactgggggaacactaacacaaaacataagaattcaacgacagcttattgggcagataactgggatgatattcctttggataagagaggcaaccatccatgttttgatccaagaaaggatctagtgcttccggcatggaaggaacctaacccaggggccatatggttaaaactgtgggcaaggccaaggaacaaccgtacaacacttttttatttcaacggtaatctaggttcagcatacgaaggaggccgtccagaagacacgtatagcatggggattcggcaaaagctagcagctgaatttggttccacaccaaacaagcagggaaggcttggacggcagcatgcggccgatgtgacagttacctatctacgaactgaaaaatattatgaagaattagcaagctctgttttttgtggtgtcctgccaggggatggctggagtggccgtatggaagatagcatgcttcaaggatgcattcctgtaataattcaggatggaatttttctgccatatgagaacgtgctcaactacaatagttttgcagtccgcatacaggaagatgacatcccaggcctcataagcacactccgaggaataaacgatacgcaagtagagtttatgctgggaaatgtccgccagatgtggcagaggtttttctatcgagactctatattgttagaggcgcaaagacagaaaaaactcttctctgaagaggcaccctggtctgttgaggtatcgaaacttcctgatgacgacgatgtctttgcaacgtttatacaggtattgcattataaactgtacaatgacccttggcgtcaagatttcctgcaaacaaaggatactcggctgccgaacatctgttcaagaacttcctgaagcatttagtcaggcagcattgcaactgtaaagaataagcatatattcttaggaacaaaagtacaaaactgtagatatttcttgcattctggacaattgttcttttgactgatagcccaatttaattagaccatttcctgaaaaaaaagaaaagaaaaatgcactgttttcatctatcaaaacatggatagcatacatcgcatttacagctctggtgtttgcaatcccaagctacatcgatttttaccgagaaagaattggattttgtcgtccag

SEQ ID NO: 84762 - DNA, 3003 bp, Zea Mays
ccgtctttgtcctcgcgtctgctccggtcgcaggaggcaggatcgctcggctgctccgtcctccgtccgcacggccccgctccctgctgccgccacgcgaccatcgccgcagccacctcaccgagcacccccgtgcgccggtcctgccaccgagccctccacgaccccgtggccgcgcccggccccggtcgcaccgcgctccgctggaccccagtaccatgtctccaagatccactctgaccttgtaggaacaccaattccaacgattctgacggctcgcgctttcatcgaagagttgatccttgtcaggcttgtgatccgcagccgcctctgtctgatcctgctcagctctcgccagccgccgctccgccggaggcctcacgctcctcaccgcgtccgtgcttaccctgaccccaccctcacttggctcccttgaactacggcgtcatcatcgacgccgacagcaggggaagcgcgtctccgcctgatgcccggatgatagtttgaccatgttcgcaatccgttcgacgaaatgccctgtggcatttgtgggcgtagctggcaccttggtggtgcttatcaccgctgtccatgtgttcatggtgccaatacttcctgcctccttctattacttcggttctcgcagcagtataagccacccaaagaatgtcctcccagccgtcgaggtggttgactcgcgcctcaaggggtgtttcccttctgattcatatggtgctgtggcattccgaggcgcgccatggaaggctgagattggtcgatggcttgctgggtgtcatgctaactcttcgtctgttgatgttactgaggccatgggtgcaaaacgctgcgtgaaagactgcagtgctcgtggtgtttgcaactataatctgggagagtgcagatgctttcatggatattctgggaaaggatgtgaggaggttctgaacttggaatgcaaccttccaagctccccagaatggcctgtaggtcaatggatagtttccatctgtgcagctcactgtgataaaacaagggcaatgtgcttttgtgggcctgggacaaaatacccagatcgtcctgtggcagaagcttgtggttttaaaacaattttacctgcaaaacctgatggtccaaagcttactgattggaaaacacctgacctggaaaacatacttacaacaaacagcagtaagttaggatggtgtaatgtggtccctgaggacgcatattcatccaaagtgaagtttaaagaagaatgtgattgcaaatatgatggtctctgggggcagttctgtgagacacgtgctgaatgcagctgcatcaaccagtgctctggacatgggcattgccgtggtggtttctgtaaatgtgacagtggatattttgggattgattgcagtatcccatcagcatattcgcttgcatatgactggccctcgtggctccagacaccagtgaatttaccagatctgaaaactttgaacagtaccaccattggtgttaaggccgttgttcagaaaaaaaggccactgatatatgtatatgatttgccagctgagtttgacagtcatcttcttgaaggacgacattacagattccagtgtgtaaacagaatatatgatgacatgaatagaactatatggacccagcaattgtatggtgctcagatagcacttcatgagagcattcttgctagccctcaccgcactcttaatggggacgaagctgattatttctatgtgccagtgcttgactcatgtctaataactagatccgatgatgctccacatcttctattgccggtgcctgctatgcaccaaaagagatttggaagagcatgatgcttgtccactgggggaacactaacacaaaacataagaattcaacgacagcttattgggcagataactgggatgatattcctttggataagagaggcaaccatccatgttttgatccaagaaaggatctagtgcttccggcatggaaggaacctaacccaggggccatatggttaaaactgtgggcaaggccaaggaacaaccgtacaacacttttttatttcaacggtaatctaggttcagcatacgaaggaggccgtccagaagacacgtatagcatggggattcggcaaaagctagcagctgaatttggttccacaccaaacaagcagggaaggcttggacggcagcatgcggccgatgtgacagttacctatctacgaactgaaaaatattatgaagaattagcaagctctgttttttgtggtgtcctgccaggggatggctggagtggccgtatggaagatagcatgcttcaaggatgcattcctgtaataattcaggatggaatttttctgccatatgagaacgtgctcaactacaatagttttgcagtccgcatacaggaagatgacatcccaggcctcataagcacactccgaggaataaacgatacgcaagtagagtttatgctgggaaatgtccgccagatgtggcagaggtttttctatcgagactctatattgttagaggcgcaaagacagaaaaaactcttctctgaagaggcaccctggtctgttgaggtatcgaaacttcctgatgacgacgatgtctttgcaacgtttatacaggtattgcattataaactgtacaatgacccttggcgtcaagatttcctgcaaacaaaggatactcggctgccgaacatctgttcaagaacttcctgaagcatttagtcaggcagcattgcaactgtaaagaataagcatatattcttaggaacaaaagtacaaaactgtagatatttcttgcattctggacaattgttcttttgactgatagcccaatttaattagaccatttcctgaaaaaaaagaaaagaaaaatgcactgttttcatctatcaaaacatggatagcatacatcgcatttacagctctggtgtttgcaatcccaagctacatcgatttttaccgagaaagaattggattttgtcgtccag

SEQ ID NO: 84763 - DNA, 3244 bp, Zea Mays
ccgtctttgtcctcgcgtctgctccggtcgcaggaggcaggatcgctcggctgctccgtcctccgtccgcacggccccgctccctgctgccgccacgcgaccatcgccgcagccacctcaccgagcacccccgtgcgccggtcctgccaccgagccctccacgaccccgtggccgcgcccggccccggtcgcaccgcgctccgctggaccccagtaccatgtctccaagatccactctgaccttgtaggaacaccaattccaacgattctgacggctcgcgctttcatcgaagagttgatccttgtcaggcttgtgatccgcagccgcctctgtctgatcctgctcagctctcgccagccgccgctccgccggaggcctcacgctcctcaccgcgtccgtgcttaccctgaccccaccctcacttggctcccttgaactacggcgtcatcatcgacgccgacagcaggggaagcgcgtctccgcctgatgcccggatgatagtttgaccatgttcgcaatccgttcgacgaaatgccctgtggcatttgtgggcgtagctggcaccttggtggtgcttatcaccgctgtccatgtgttcatggtgccaatacttcctgcctccttctattacttcggttctcgcagcagtataagccacccaaagaatgtcctcccagccgtcgaggtggttgactcgcgcctcaaggggtgtttcccttctgattcatatggtgctgtggcattccgaggcgcgccatggaaggctgagattggtcgatggcttgctgggtgtcatgctaactcttcgtctgttgatgttactgaggccatgggtgcaaaacgctgcgtgaaagactgcagtgctcgtggtgtttgcaactataatctgggagagtgcagatgctttcatggatattctgggaaaggatgtgaggaggttctgaacttggaatgcaaccttccaagctccccagaatggcctgtaggtcaatggatagtttccatctgtgcagctcactgtgataaaacaagggcaatgtgcttttgtgggcctgggacaaaatacccagatcgtcctgtggcagaagcttgtggttttaaaacaattttacctgcaaaacctgatggtccaaagcttactgattggaaaacacctgacctggaaaacatacttacaacaaacagcagtaagttaggatggtgtaatgtggtccctgaggacgcatattcatccaaagtgaagtttaaagaagaatgtgattgcaaatatgatggtctctgggggcagttctgtgagacacgtgctgaatgcagctgcatcaaccagtgctctggacatgggcattgccgtggtggtttctgtaaatgtgacagtggatattttgggattgattgcagtatcccatcagcatattcgcttgcatatgactggccctcgtggctccagacaccagtgaatttaccagatctgaaaactttgaacagtaccaccattggtgttaaggccgttgttcagaaaaaaaggccactgatatatgtatatgatttgccagctgagtttgacagtcatcttcttgaaggacgacattacagattccagtgtgtaaacagaatatatgatgacatgaatagaactatatggacccagcaattgtatggtgctcaggtttgctaattttagctgctagtacataggttaatgtttgttgctccatgactacatactcacagtgatattaaatttatgaatacaagcaaatctgactaatgttttattttctatgtagatagcacttcatgagagcattcttgctagccctcaccgcactcttaatggggacgaagctgattatttctatgtgccagtgcttgactcatgtctaataactagatccgatgatgctccacatcttctattgccggagctaccatgcacttgagtactatagaatggcacatggtcacatagctcagcagtatccttactggaaccgcacttcgggaagagaccatatctgggcagttcttttcatgggatgaaggtgcctgctatgcaccaaaagagatttggaagagcatgatgcttgtccactgggggaacactaacacaaaacataagaattcaacgacagcttattgggcagataactgggatgatattcctttggataagagaggcaaccatccatgttttgatccaagaaaggatctagtgcttccggcatggaaggaacctaacccaggggccatatggttaaaactgtgggcaaggccaaggaacaaccgtacaacacttttttatttcaacggtaatctaggttcagcatacgaaggaggccgtccagaagacacgtatagcatggggattcggcaaaagctagcagctgaatttggttccacaccaaacaagcagggaaggcttggacggcagcatgcggccgatgtgacagttacctatctacgaactgaaaaatattatgaagaattagcaagctctgttttttgtggtgtcctgccaggggatggctggagtggccgtatggaagatagcatgcttcaaggatgcattcctgtaataattcaggatggaatttttctgccatatgagaacgtgctcaactacaatagttttgcagtccgcatacaggaagatgacatcccaggcctcataagcacactccgaggaataaacgatacgcaagtagagtttatgctgggaaatgtccgccagatgtggcagaggtttttctatcgagactctatattgttagaggcgcaaagacagaaaaaactcttctctgaagaggcaccctggtctgttgaggtatcgaaacttcctgatgacgacgatgtctttgcaacgtttatacaggtattgcattataaactgtacaatgacccttggcgtcaagatttcctgcaaacaaaggatactcggctgccgaacatctgttcaagaacttcctgaagcatttagtcaggcagcattgcaactgtaaagaataagcatatattcttaggaacaaaagtacaaaactgtagatatttcttgcattctggacaattgttcttttgactgatagcccaatttaattagaccatttcctgaaaaaaaagaaaagaaaaatgcactgttttcatctatcaaaacatggatagcatacatcgcatttacagctctggtgtttgcaatcccaagctacatcgatttttaccgagaaagaattggattttgtcgtccag

SEQ ID NO: 84764 - DNA, 3263 bp, Zea Mays
ccgtctttgtcctcgcgtctgctccggtcgcaggaggcaggatcgctcggctgctccgtcctccgtccgcacggccccgctccctgctgccgccacgcgaccatcgccgcagccacctcaccgagcacccccgtgcgccggtcctgccaccgagccctccacgaccccgtggccgcgcccggccccggtcgcaccgcgctccgctggaccccagtaccatgtctccaagatccactctgaccttgtaggaacaccaattccaacgattctgacggctcgcgctttcatcgaagagttgatccttgtcaggcttgtgatccgcagccgcctctgtctgatcctgctcagctctcgccagccgccgctccgccggaggcctcacgctcctcaccgcgtccgtgcttaccctgaccccaccctcacttggctcccttgaactacggcgtcatcatcgacgccgacagcaggggaagcgcgtctccgcctgatgcccggatgatagtttgaccatgttcgcaatccgttcgacgaaatgccctgtggcatttgtgggcgtagctggcaccttggtggtgcttatcaccgctgtccatgtgttcatggtgccaatacttcctgcctccttctattacttcggttctcgcagcagtataagccacccaaagaatgtcctcccagccgtcgaggtggttgactcgcgcctcaaggggtgtttcccttctgattcatatggtgctgtggcattccgaggcgcgccatggaaggctgagattggtcgatggcttgctgggtgtcatgctaactcttcgtctgttgatgttactgaggccatgggtgcaaaacgctgcgtgaaagactgcagtgctcgtggtgtttgcaactataatctgggagagtgcagatgctttcatggatattctggttgatcttacttctcagtattcactttctattaataagagtccatgcactaataattcaatacttgggatcttgaagggctggcttttaagaacttaatactagaggctagagccaaataaaaaagggaaaggatgtgaggaggttctgaacttggaatgcaaccttccaagctccccagaatggcctgtaggtcaatggatagtttccatctgtgcagctcactgtgataaaacaagggcaatgtgcttttgtgggcctgggacaaaatacccagatcgtcctgtggcagaagcttgtggttttaaaacaattttacctgcaaaacctgatggtccaaagcttactgattggaaaacacctgacctggaaaacatacttacaacaaacagcagtaagttaggatggtgtaatgtggtccctgaggacgcatattcatccaaagtgaagtttaaagaagaatgtgattgcaaatatgatggtctctgggggcagttctgtgagacacgtgctgaatgcagctgcatcaaccagtgctctggacatgggcattgccgtggtggtttctgtaaatgtgacagtggatattttgggattgattgcagtatcccatcagcatattcgcttgcatatgactggccctcgtggctccagacaccagtgaatttaccagatctgaaaactttgaacagtaccaccattggtgttaaggccgttgttcagaaaaaaaggccactgatatatgtatatgatttgccagctgagtttgacagtcatcttcttgaaggacgacattacagattccagtgtgtaaacagaatatatgatgacatgaatagaactatatggacccagcaattgtatggtgctcagatagcacttcatgagagcattcttgctagccctcaccgcactcttaatggggacgaagctgattatttctatgtgccagtgcttgactcatgtctaataactagatccgatgatgctccacatcttctattgccgagggacctgcgccgaaggagctaccatgcacttgagtactatagaatggcacatggtcacatagctcagcagtatccttactggaaccgcacttcgggaagagaccatatctggttcttttcatgggatgaaggtgcctgctatgcaccaaaagagatttggaagagcatgatgcttgtccactgggggaacactaacacaaaacataagaattcaacgacagcttattgggcagataactgggatgatattcctttggataagagaggcaaccatccatgttttgatccaagaaaggatctagtgcttccggcatggaaggaacctaacccaggggccatatggttaaaactgtgggcaaggccaaggaacaaccgtacaacacttttttatttcaacggtaatctaggttcagcatacgaaggaggccgtccagaagacacgtatagcatggggattcggcaaaagctagcagctgaatttggttccacaccaaacaagcagggaaggcttggacggcagcatgcggccgatgtgacagttacctatctacgaactgaaaaatattatgaagaattagcaagctctgttttttgtggtgtcctgccaggggatggctggagtggccgtatggaagatagcatgcttcaaggatgcattcctgtaataattcaggatggaatttttctgccatatgagaacgtgctcaactacaatagttttgcagtccgcatacaggaagatgacatcccaggcctcataagcacactccgaggaataaacgatacgcaagtagagtttatgctgggaaatgtccgccagatgtggcagaggtttttctatcgagactctatattgttagaggcgcaaagacagaaaaaactcttctctgaagaggcaccctggtctgttgaggtatcgaaacttcctgatgacgacgatgtctttgcaacgtttatacaggtattgcattataaactgtacaatgacccttggcgtcaagatttcctgcaaacaaaggatactcggctgccgaacatctgttcaagaacttcctgaagcatttagtcaggcagcattgcaactgtaaagaataagcatatattcttaggaacaaaagtacaaaactgtagatatttcttgcattctggacaattgttcttttgactgatagcccaatttaattagaccatttcctgaaaaaaaagaaaagaaaaatgcactgttttcatctatcaaaacatggatagcatacatcgcatttacagctctggtgtttgcaatcccaagctacatcgatttttaccgagaaagaattggattttgtcgtccag

SEQ ID NO: 84765 - DNA, 3699 bp, Zea Mays
ccgtctttgtcctcgcgtctgctccggtcgcaggaggcaggatcgctcggctgctccgtcctccgtccgcacggccccgctccctgctgccgccacgcgaccatcgccgcagccacctcaccgagcacccccgtgcgccggtcctgccaccgagccctccacgaccccgtggccgcgcccggccccggtcgcaccgcgctccgctggaccccagtaccatgtctccaagatccactctgaccttgtaggaacaccaattccaacgattctgacggctcgcgctttcatcgaagagttgatccttgtcaggcttgtgatccgcagccgcctctgtctgatcctgctcagctctcgccagccgccgctccgccggaggcctcacgctcctcaccgcgtccgtgcttaccctgaccccaccctcacttggctcccttgaactacggcgtcatcatcgacgccgacagcaggggaagcgcgtctccgcctgatgcccggatgatagtttgaccatgttcgcaatccgttcgacgaaatgccctgtggcatttgtgggcgtagctggcaccttggtggtgcttatcaccgctgtccatgtgttcatggtgccaatacttcctgcctccttctattacttcggttctcgcagcagtataagccacccaaagaatgtcctcccagccgtcgaggtggttgactcgcgcctcaaggggtgtttcccttctgattcatatggtgctgtggcattccgaggcgcgccatggaaggctgagattggtcgatggcttgctgggtgtcatgctaactcttcgtctgttgatgttactgaggccatgggtgcaaaacgctgcgtgaaagactgcagtgctcgtggtgtttgcaactataatctgggagagtgcagatgctttcatggatattctggttgatcttacttctcagtattcactttctattaataagagtccatgcactaataattcaatacttgggatcttgaagggctggcttttaagaacttaatactagaggctagagccaaataaaaaaggtaacaatatcatttgatagagttaggtagcacaaaatattaatcatgcattcttatattggatacagcaatgcaacctacaaatgtcttcctaaccatgtgtacatcattttttcacagatcttataaaatttcatctctgagtacgctcagtatatctcctttcatctgtggcatactctgtttagatcacttgaaagaacacagaacatgtattttgtatgtctgaaagaatatatacctttcagtttattgtatatgaatttatggattaagaattgcagcattgaagcctcatatattgtttttttactacaaatacctgttgttggatttgagctctgtgagtgacctaggtgaaatgggaactgaactactgtgttaaacttatgtgatcataaccttgtctgtggagtgtggacatatatttctgcagggaaaggatgtgaggaggttctgaacttggaatgcaaccttccaagctccccagaatggcctgtaggtcaatggatagtttccatctgtgcagctcactgtgataaaacaagggcaatgtgcttttgtgggcctgggacaaaatacccagatcgtcctgtggcagaagcttgtggttttaaaacaattttacctgcaaaacctgatggtccaaagcttactgattggaaaacacctgacctggaaaacatacttacaacaaacagcagtaagttaggatggtgtaatgtggtccctgaggacgcatattcatccaaagtgaagtttaaagaagaatgtgattgcaaatatgatggtctctgggggcagttctgtgagacacgtgctgaatgcagctgcatcaaccagtgctctggacatgggcattgccgtggtggtttctgtaaatgtgacagtggatattttgggattgattgcagtatcccatcagcatattcgcttgcatatgactggccctcgtggctccagacaccagtgaatttaccagatctgaaaactttgaacagtaccaccattggtgttaaggccgttgttcagaaaaaaaggccactgatatatgtatatgatttgccagctgagtttgacagtcatcttcttgaaggacgacattacagattccagtgtgtaaacagaatatatgatgacatgaatagaactatatggacccagcaattgtatggtgctcagatagcacttcatgagagcattcttgctagccctcaccgcactcttaatggggacgaagctgattatttctatgtgccagtgcttgactcatgtctaataactagatccgatgatgctccacatcttctattgccgagggacctgcgccgaaggagctaccatgcacttgagtactatagaatggcacatggtcacatagctcagcagtatccttactggaaccgcacttcgggaagagaccatatctggttcttttcatgggatgaaggtgcctgctatgcaccaaaagagatttggaagagcatgatgcttgtccactgggggaacactaacacaaaacataagaattcaacgacagcttattgggcagataactgggatgatattcctttggataagagaggcaaccatccatgttttgatccaagaaaggatctagtgcttccggcatggaaggaacctaacccaggggccatatggttaaaactgtgggcaaggccaaggaacaaccgtacaacacttttttatttcaacggtaatctaggttcagcatacgaaggaggccgtccagaagacacgtatagcatggggattcggcaaaagctagcagctgaatttggttccacaccaaacaagcagggaaggcttggacggcagcatgcggccgatgtgacagttacctatctacgaactgaaaaatattatgaagaattagcaagctctgttttttgtggtgtcctgccaggggatggctggagtggccgtatggaagatagcatgcttcaaggatgcattcctgtaataattcaggatggaatttttctgccatatgagaacgtgctcaactacaatagttttgcagtccgcatacaggaagatgacatcccaggcctcataagcacactccgaggaataaacgatacgcaagtagagtttatgctgggaaatgtccgccagatgtggcagaggtttttctatcgagactctatattgttagaggcgcaaagacagaaaaaactcttctctgaagaggcaccctggtctgttgaggtatcgaaacttcctgatgacgacgatgtctttgcaacgtttatacaggtattgcattataaactgtacaatgacccttggcgtcaagatttcctgcaaacaaaggatactcggctgccgaacatctgttcaagaacttcctgaagcatttagtcaggcagcattgcaactgtaaagaataagcatatattcttaggaacaaaagtacaaaactgtagatatttcttgcattctggacaattgttcttttgactgatagcccaatttaattagaccatttcctgaaaaaaaagaaaagaaaaatgcactgttttcatctatcaaaacatggatagcatacatcgcatttacagctctggtgtttgcaatcccaagctacatcgatttttaccgagaaagaattggattttgtcgtccag

SEQ ID NO: 84766 - DNA, 3122 bp, Zea Mays
ccgtctttgtcctcgcgtctgctccggtcgcaggaggcaggatcgctcggctgctccgtcctccgtccgcacggccccgctccctgctgccgccacgcgaccatcgccgcagccacctcaccgagcacccccgtgcgccggtcctgccaccgagccctccacgaccccgtggccgcgcccggccccggtcgcaccgcgctccgctggaccccagtaccatgtctccaagatccactctgaccttgtaggaacaccaattccaacgattctgacggctcgcgctttcatcgaagagttgatccttgtcaggcttgtgatccgcagccgcctctgtctgatcctgctcagctctcgccagccgccgctccgccggaggcctcacgctcctcaccgcgtccgtgcttaccctgaccccaccctcacttggctcccttgaactacggcgtcatcatcgacgccgacagcaggggaagcgcgtctccgcctgatgcccggatgatagtttgaccatgttcgcaatccgttcgacgaaatgccctgtggcatttgtgggcgtagctggcaccttggtggtgcttatcaccgctgtccatgtgttcatggtgccaatacttcctgcctccttctattacttcggttctcgcagcagtataagccacccaaagaatgtcctcccagccgtcgaggtggttgactcgcgcctcaaggggtgtttcccttctgattcatatggtgctgtggcattccgaggcgcgccatggaaggctgagattggtcgatggcttgctgggtgtcatgctaactcttcgtctgttgatgttactgaggccatgggtgcaaaacgctgcgtgaaagactgcagtgctcgtggtgtttgcaactataatctgggagagtgcagatgctttcatggatattctgggaaaggatgtgaggaggttctgaacttggaatgcaaccttccaagctccccagaatggcctgtaggtcaatggatagtttccatctgtgcagctcactgtgataaaacaagggcaatgtgcttttgtgggcctgggacaaaatacccagatcgtcctgtggcagaagcttgtggttttaaaacaattttacctgcaaaacctgatggtccaaagcttactgattggaaaacacctgacctggaaaacatacttacaacaaacagcagtaagttaggatggtgtaatgtggtccctgaggacgcatattcatccaaagtgaagtttaaagaagaatgtgattgcaaatatgatggtctctgggggcagttctgtgagacacgtgctgaatgcagctgcatcaaccagtgctctggacatgggcattgccgtggtggtttctgtaaatgtgacagtggatattttgggattgattgcagtatcccatcagcatattcgcttgcatatgactggccctcgtggctccagacaccagtgaatttaccagatctgaaaactttgaacagtaccaccattggtgttaaggccgttgttcagaaaaaaaggccactgatatatgtatatgatttgccagctgagtttgacagtcatcttcttgaaattccagtgtgtaaacagaatatatgatgacatgaatagaactatatggacccagcaattgtatggtgctcagatagcacttcatgagagcattcttgctagccctcaccgcactcttaatggggacgaagctgattatttctatgtgccagtgcttgactcatgtctaataactagatccgatgatgctccacatcttctattgccgagggacctgcgccgaaggagctaccatgcacttgagtactatagaatggcacatggtcacatagctcagcagtatccttactggaaccgcacttcgggaagagaccatatctggttcttttcatgggatgaaggtgcctgctatgcaccaaaagagatttggaagagcatgatgcttgtccactgggggaacactaacacaaaacataagaattcaacgacagcttattgggcagataactgggatgatattcctttggataagagaggcaaccatccatgttttgatccaagaaaggatctagtgcttccggcatggaaggaacctaacccaggggccatatggttaaaactgtgggcaaggccaaggaacaaccgtacaacacttttttatttcaacggtaatctaggttcagcatacgaaggaggccgtccagaagacacgtatagcatggggattcggcaaaagctagcagctgaatttggttccacaccaaacaagcagggaaggcttggacggcagcatgcggccgatgtgacagttacctatctacgaactgaaaaatattatgaagaattagcaagctctgttttttgtggtgtcctgccaggggatggctggagtggccgtatggaagatagcatgcttcaaggatgcattcctgtaataattcaggatggaatttttctgccatatgagaacgtgctcaactacaatagttttgcagtccgcatacaggaagatgacatcccaggcctcataagcacactccgaggaataaacgatacgcaagtagagtttatgctgggaaatgtccgccagatgtggcagaggtttttctatcgagactctatattgttagaggcgcaaagacagaaaaaactcttctctgaagaggcaccctggtctgttgaggtatcgaaacttcctgatgacgacgatgtctttgcaacgtttatacaggtattgcattataaactgtacaatgacccttggcgtcaagatttcctgcaaacaaaggatactcggctgccgaacatctgttcaagaacttcctgaagcatttagtcaggcagcattgcaactgtaaagaataagcatatattcttaggaacaaaagtacaaaactgtagatatttcttgcattctggacaattgttcttttgactgatagcccaatttaattagaccatttcctgaaaaaaaagaaaagaaaaatgcactgttttcatctatcaaaacatggatagcatacatcgcatttacagctctggtgtttgcaatcccaagctacatcgatttttaccgagaaagaattggattttgtcgtccag

SEQ ID NO: 84767 - DNA, 3112 bp, Zea Mays
gtttcattccgtctttgtcctcgcgtctgctccggtcgcaggaggcaggatcgctcggctgctccgtcctccgtccgcacggccccgctccctgctgccgccacgcgaccatcgccgcagccacctcaccgagcacccccgtgcgccggtcctgccaccgagccctccacgaccccgtggccgcgcccggccccggtcgcaccgcgctccgctggaccccagtaccatgtctccaagatccactctgaccttgtaggaacaccaattccaacgattctgacggctcgcgctttcatcgaagagttgatccttgtcaggcttgtgatccgcagccgcctctgtctgatcctgctcagctctcgccagccgccgctccgccggaggcctcacgctcctcaccgcgtccgtgcttaccctgaccccaccctcacttggctcccttgaactacggcgtcatcatcgacgccgacagcaggggaagcgcgtctccgcctgatgcccggatgatagtttgaccatgttcgcaatccgttcgacgaaatgccctgtggcatttgtgggcgtagctggcaccttggtggtgcttatcaccgctgtccatgtgttcatggtgccaatacttcctgcctccttctattacttcggttctcgcagcagtataagccacccaaagaatgtcctcccagccgtcgaggtggttgactcgcgcctcaaggggtgtttcccttctgattcatatggtgctgtggcattccgaggcgcgccatggaaggctgagattggtcgatggcttgctgggtgtcatgctaactcttcgtctgttgatgttactgaggccatgggtgcaaaacgctgcgtgaaagactgcagtgctcgtggtgtttgcaactataatctgggagagtgcagatgctttcatggatattctgggaaaggatgtgaggaggttctgaacttggaatgcaaccttccaagctccccagaatggcctgtaggtcaatggatagtttccatctgtgcagctcactgtgataaaacaagggcaatgtgcttttgtgggcctgggacaaaatacccagatcgtcctgtggcagaagcttgtggttttaaaacaattttacctgcaaaacctgatggtccaaagcttactgattggaaaacacctgacctggaaaacatacttacaacaaacagcagtaagttaggatggtgtaatgtggtccctgaggacgcatattcatccaaagtgaagtttaaagaagaatgtgattgcaaatatgatggtctctgggggcagttctgtgagacacgtgctgaatgcagctgcatcaaccagtgctctggacatgggcattgccgtggtggtttctgtaaatatcccatcagcatattcgcttgcatatgactggccctcgtggctccagacaccagtgaatttaccagatctgaaaactttgaacagtaccaccattggtgttaaggccgttgttcagaaaaaaaggccactgatatatgtatatgatttgccagctgagtttgacagtcatcttcttgaaggacgacattacagattccagtgtgtaaacagaatatatgatgacatgaatagaactatatggacccagcaattgtatggtgctcagatagcacttcatgagagcattcttgctagccctcaccgcactcttaatggggacgaagctgattatttctatgtgccagtgcttgactcatgtctaataactagatccgatgatgctccacatcttctattgccgagggacctgcgccgaaggagctaccatgcacttgagtactatagaatggcacatggtcacatagctcagcagtatccttactggaaccgcacttcgggaagagaccatatctggttcttttcatgggatgaaggtgcctgctatgcaccaaaagagatttggaagagcatgatgcttgtccactgggggaacactaacacaaaacataagaattcaacgacagcttattgggcagataactgggatgatattcctttggataagagaggcaaccatccatgttttgatccaagaaaggatctagtgcttccggcatggaaggaacctaacccaggggccatatggttaaaactgtgggcaaggccaaggaacaaccgtacaacacttttttatttcaacggtaatctaggttcagcatacgaaggaggccgtccagaagacacgtatagcatggggattcggcaaaagctagcagctgaatttggttccacaccaaacaagcagggaaggcttggacggcagcatgcggccgatgtgacagttacctatctacgaactgaaaaatattatgaagaattagcaagctctgttttttgtggtgtcctgccaggggatggctggagtggccgtatggaagatagcatgcttcaaggatgcattcctgtaataattcaggatggaatttttctgccatatgagaacgtgctcaactacaatagttttgcagtccgcatacaggaagatgacatcccaggcctcataagcacactccgaggaataaacgatacgcaagtagagtttatgctgggaaatgtccgccagatgtggcagaggtttttctatcgagactctatattgttagaggcgcaaagacagaaaaaactcttctctgaagaggcaccctggtctgttgaggtatcgaaacttcctgatgacgacgatgtctttgcaacgtttatacaggtattgcattataaactgtacaatgacccttggcgtcaagatttcctgcaaacaaaggatactcggctgccgaacatctgttcaagaacttcctgaagcatttagtcaggcagcattgcaactgtaaagaataagcatatattcttaggaacaaaagtacaaaactgtagatatttcttgcattctggacaattgttcttttgactgatagcccaatttaattagaccatttcctgaaaaaaaagaaaagaaaaatgcactgttttcatctatcaaaacatggatagcatacatcgcatttacagctctggtgtttgcaatcccaagctacatcgatttttaccgagaaagaattggattttgtcgtccag

SEQ ID NO: 84768 - DNA, 3115 bp, Zea Mays
gttaccgtttcggcgtttcgtttcattccgtctttgtcctcgcgtctgctccggtcgcaggaggcaggatcgctcggctgctccgtcctccgtccgcacggccccgctccctgctgccgccacgcgaccatcgccgcagccacctcaccgagcacccccgtgcgccggtcctgccaccgagccctccacgaccccgtggccgcgcccggccccggtcgcaccgcgctccgctggaccccagtaccatgtctccaagatccactctgaccttgtaggaacaccaattccaacgattctgacggctcgcgctttcatcgaagagttgatccttgtcaggcttgtgatccgcagccgcctctgtctgatcctgctcagctctcgccagccgccgctccgccggaggcctcacgctcctcaccgcgtccgtgcttaccctgaccccaccctcacttggctcccttgaactacggcgtcatcatcgacgccgacagcaggggaagcgcgtctccgcctgatgcccggatgatagtttgaccatgttcgcaatccgttcgacgaaatgccctgtggcatttgtgggcgtagctggcaccttggtggtgcttatcaccgctgtccatgtgttcatggtgccaatacttcctgcctccttctattacttcggttctcgcagcagtataagccacccaaagaatgtcctcccagccgtcgaggtggttgactcgcgcctcaaggggtgtttcccttctgattcatatggtgctgtggcattccgaggcgcgccatggaaggctgagattggtcgatggcttgctgggtgtcatgctaactcttcgtctgttgatgttactgaggccatgggtgcaaaacgctgcgtgaaagactgcagtgctcgtggtgtttgcaactataatctgggagagtgcagatgctttcatggatattctgggaaaggatgtgaggaggttctgaacttggaatgcaaccttccaagctccccagaatggcctgtaggtcaatggatagtttccatctgtgcagctcactgtgataaaacaagggcaatgtgcttttgtgggcctgggacaaaatacccagatcgtcctgtggcagaagcttgtggttttaaaacaattttacctgcaaaacctgatggtccaaagcttactgattggaaaacacctgacctggaaaacatacttacaacaaacagcagtaagttaggatggtgtaatgtggtccctgaggacgcatattcatccaaagtgaagtttaaagaagaatgtgattgcaaatatgatggtctctgggggcagttctgtgagacacgtgctgaatgcagctgcatcaaccagtgctctggacatgggcattgccgtggtggtttctgtaaatgtgacagtggatattttgggattgattgcagtatcccatcagcatattcgcttgcatatgactggccctcgtggctccagacaccagtgaatttaccagatctgaaaactttgaacagtaccaccattggtgttaaggccgttgttcagaaaaaaaggccactgatatatgtatatgatttgccagctgagtttgacagtcatcttcttgaaggacgacattacagattccagtgtgtaaacagaatatatgatgacatgaatagaactatatggacccagcaattgtatggtgctcagatagcacttcatgagagcattcttgctagccctcaccgcactcttaatggggacgaagctgattatttctatgtgccagtgcttgactcatgtctaataactagatccgatgatgctccacatcttctattgccgagggacctgcgccgaaggagctaccatgcacttgagtactatagaatggcacatggtcacatagctcagcagtatccttactggaaccgcacttcgggaagagaccatatctggttcttttcatgggatgaaggtgcctgctatgcaccaaaagagatttggaagagcatgatgcttgtccactgggggaacactaacacaaaacataagaattcaacgacagcttattgggcagataactgggatgatattcctttggataagagaggcaaccatccatgttttgatccaagaaaggatctagtgcttccggcatggaaggaacctaacccaggggccatatggttaaaactgtgggcaaggccaaggaacaaccgtacaacacttttttatttcaacggtaatctaggttcagcatacgaaggaggccgtccagaagacacgtatagcatggggattcggcaaaagctagcagctgaatttggttccacaccaaacaagcagggaaggcttggacggcagcatgcggccgatgtgacagttacctatctacgaactgaaaaatattatgaagaattagcaagctctgttttttgtggtgtcctgccaggggatggctggagtggccgtatggaagatagcatgcttcaaggatgcattcctgtaataattcaggatggaatttttctgccatatgagaacgtgctcaactacaatagttttgcagtccgcatacaggaagatgacatcccaggcctcataagcacactccgaggaataaacgatacgcaagtagagtttatgctgggaaatgtccgccagatgtggcagaggtttttctatcgagactctatattgttagaggcgcaaagacagaaaaaactcttctctgaagaggcaccctggtctgttgaggtattgcattataaactgtacaatgacccttggcgtcaagatttcctgcaaacaaaggatactcggctgccgaacatctgttcaagaacttcctgaagcatttagtcaggcagcattgcaactgtaaagaataagcatatattcttaggaacaaaagtacaaaactgtagatatttcttgcattctggacaattgttcttttgactgatagcccaatttaattagaccatttcctgaaaaaaaagaaaagaaaaatgcactgttttcatctatcaaaacatggatagcatacatcgcatttacagctctggtgtttgcaatcccaagctacatcgatttttaccgagaaagaattggattttgtcgtccag

SEQ ID NO: 84769 - DNA, 3160 bp, Zea Mays
cgacagtcttgttaccgtttcggcgtttcgtttcattccgtctttgtcctcgcgtctgctccggtcgcaggaggcaggatcgctcggctgctccgtcctccgtccgcacggccccgctccctgctgccgccacgcgaccatcgccgcagccacctcaccgagcacccccgtgcgccggtcctgccaccgagccctccacgaccccgtggccgcgcccggccccggtcgcaccgcgctccgctggaccccagtaccatgtctccaagatccactctgaccttgtaggaacaccaattccaacgattctgacggctcgcgctttcatcgaagagttgatccttgtcaggcttgtgatccgcagccgcctctgtctgatcctgctcagctctcgccagccgccgctccgccggaggcctcacgctcctcaccgcgtccgtgcttaccctgaccccaccctcacttggctcccttgaactacggcgtcatcatcgacgccgacagcaggggaagcgcgtctccgcctgatgcccggatgatagtttgaccatgttcgcaatccgttcgacgaaatgccctgtggcatttgtgggcgtagctggcaccttggtggtgcttatcaccgctgtccatgtgttcatggtgccaatacttcctgcctccttctattacttcggttctcgcagcagtataagccacccaaagaatgtcctcccagccgtcgaggtggttgactcgcgcctcaaggggtgtttcccttctgattcatatggtgctgtggcattccgaggcgcgccatggaaggctgagattggtcgatggcttgctgggtgtcatgctaactcttcgtctgttgatgttactgaggccatgggtgcaaaacgctgcgtgaaagactgcagtgctcgtggtgtttgcaactataatctgggagagtgcagatgctttcatggatattctgggaaaggatgtgaggaggttctgaacttggaatgcaaccttccaagctccccagaatggcctgtaggtcaatggatagtttccatctgtgcagctcactgtgataaaacaagggcaatgtgcttttgtgggcctgggacaaaatacccagatcgtcctgtggcagaagcttgtggttttaaaacaattttacctgcaaaacctgatggtccaaagcttactgattggaaaacacctgacctggaaaacatacttacaacaaacagcagtaagttaggatggtgtaatgtggtccctgaggacgcatattcatccaaagtgaagtttaaagaagaatgtgattgcaaatatgatggtctctgggggcagttctgtgagacacgtgctgaatgcagctgcatcaaccagtgctctggacatgggcattgccgtggtggtttctgtaaatgtgacagtggatattttgggattgattgcagtatcccatcagcatattcgcttgcatatgactggccctcgtggctccagacaccagtgaatttaccagatctgaaaactttgaacagtaccaccattggtgttaaggccgttgttcagaaaaaaaggccactgatatatgtatatgatttgccagctgagtttgacagtcatcttcttgaaggacgacattacagattccagtgtgtaaacagaatatatgatgacatgaatagaactatatggacccagcaattatagcacttcatgagagcattcttgctagccctcaccgcactcttaatggggacgaagctgattatttctatgtgccagtgcttgactcatgtctaataactagatccgatgatgctccacatcttctattgccgagggacctgcgccgaaggagctaccatgcacttgagtactatagaatggcacatggtcacatagctcagcagtatccttactggaaccgcacttcgggaagagaccatatctggttcttttcatgggatgaaggtgcctgctatgcaccaaaagagatttggaagagcatgatgcttgtccactgggggaacactaacacaaaacataagaattcaacgacagcttattgggcagataactgggatgatattcctttggataagagaggcaaccatccatgttttgatccaagaaaggatctagtgcttccggcatggaaggaacctaacccaggggccatatggttaaaactgtgggcaaggccaaggaacaaccgtacaacacttttttatttcaacggtaatctaggttcagcatacgaaggaggccgtccagaagacacgtatagcatggggattcggcaaaagctagcagctgaatttggttccacaccaaacaagcagggaaggcttggacggcagcatgcggccgatgtgacagttacctatctacgaactgaaaaatattatgaagaattagcaagctctgttttttgtggtgtcctgccaggggatggctggagtggccgtatggaagatagcatgcttcaaggatgcattcctgtaataattcaggatggaatttttctgccatatgagaacgtgctcaactacaatagttttgcagtccgcatacaggaagatgacatcccaggcctcataagcacactccgaggaataaacgatacgcaagtagagtttatgctgggaaatgtccgccagatgtggcagaggtttttctatcgagactctatattgttagaggcgcaaagacagaaaaaactcttctctgaagaggcaccctggtctgttgaggtatcgaaacttcctgatgacgacgatgtctttgcaacgtttatacaggtattgcattataaactgtacaatgacccttggcgtcaagatttcctgcaaacaaaggatactcggctgccgaacatctgttcaagaacttcctgaagcatttagtcaggcagcattgcaactgtaaagaataagcatatattcttaggaacaaaagtacaaaactgtagatatttcttgcattctggacaattgttcttttgactgatagcccaatttaattagaccatttcctgaaaaaaaagaaaagaaaaatgcactgttttcatctatcaaaacatggatagcatacatcgcatttacagctctggtgtttgcaatcccaagctacatcgatttttaccgagaaagaattggattttgtcgtccag

SEQ ID NO: 84770 - DNA, 1627 bp, Zea Mays
cgtcagacctacgagggcatcgaggccccgcactgggccgacctctccgaccccaacgccggccgcgccgccgtcgacgacgaggcctggttttgccgccccgattgccagcatccgaagacggccgaggatttcttcaagctgagccccagccccaagggcaagctgctgcgatcggtttccgccatgctgccgttcgccgaaagggacgccaacgccaccaacctcagggacggcagtagcaacctcaagtggcggggtggcggcgccgttgctgcctccacgccgccgaagccaaaggcagcgcccaagaagaggttccaggaggatagcgagaaccatgaccctgcgctggccacgccgcccccacggcaggcgccaagtaggccgccgttcggcgcccctcggtggaacaagaatgccaaggaggccatcaagtccagtgcggagaagcggccggacaatgctgagaaggaggcgctgctcaataagcacgtcccgccgaggcagctcaagagcaccctctcagcgaggaacctcttctctggaaaggatatacttggccagatttcggagttctacgatgagctgaagcggatggttggtggtggcgtcggccggcctgtcacagacacacaggaggagcacagctcagacccagtgaatccgagctatttgatggagaaggtggctcctgatgagacagtgaaggaggaggcgagacaagaaacggcgaaaaagagtccaagcccaatgaagggaaagaaagtggggctgaaggtggaagcagggaagcaaaggtctccctctgtgctgaaggaggtgagggcaacgccgccgactccacagcggtttctatccccatcgccaaaccgcattaagaatgttaaacctggagggatgtccacagcaggctcgccactcaaaaaggcaccaaaggagaaggggacacctagtaaggacctggagagcaaaaaagatgctgtgaggcaaccctttggtgttaaggatatgaacaatacaagagcagcgtgtgatgcagaagggagctccagcagcatgttttggttcttgaagccctgcactttccttgtggagtagcgtcataacactacaattttttaacgagcaacacttgatatagttagaatccattacttcattcatttccaaatattctctgttcctatttgattgattcatttcatgggtactctatacgggaagtaaacaaaaagaatcatgtatagtcatacaggttgaaagtcttctccatatgtataattcgagatatagcaaaacgtggttctgctgctttgtcgtttgttcaaataaactgcatttttttgtcccttgaagtgatatactgaggttatacaattcaactactacttatcagttcgaaacagtttgaagtgcaatctatatacattccttgggggtgatataagtcgatggtctgtttcttaattcatgaaggtttgtgcctgccacattggggatgttgtttctgtttcttcaattgttttggcacaaggatactttgtagtcctaagttgtaacaatgtggattcactggtctgtaaggaagtgcaagaattctgaaatctcttccgggaatcacaac

SEQ ID NO: 84771 - DNA, 756 bp, Zea Mays
gtcgcgcgctctctgtcttctctcccagccgctgccgccgcctctatctctcccttccctcttctctctcccctcacctctttccttccttccctcgcctcgctcctctctatctcgaccaagcagcagcggccgagccctggccgagccgccctcccccgacggctcatgtcaaagagaaagatttttgtcggaggcgttgcttgggagacaactgaagggctcagggtgccttggaagtacgctagcttgttgtcatgaagaagtcattcaagttccttccagggagttattagttcatatgtatatttctgtttatatcttatcttgtttatgtttagatttatatgagcagcaacttaatgattgcaccagctgaagttggtgcataaggctgcaacaccatctagtggaggtagataaggcatcaaaactgtatttttatttgcaaatgcagcaacaatatactaatttgatgtacttttttctagtggtgttctggacaaagaaagcttgtaccttaaaacaggaggatacaagaagctggagtggttgtctgaaggcttttgaactgcttgaagcattagtgtagctttggtgcttttatgactaatcagctctggagcagctagagtgatatagttgtgggcttttgaacaatagttggagtgatataaaacattagtgatctagttgtgaatgatattattattgtgatgcttttgtgaatatataattgtggtgcttttgtgttta

SEQ ID NO: 84772 - DNA, 596 bp, Zea Mays
gttatctaaggaactcttggatttgggtgaggcagttggaacccagagccgtggtctctctcaagaatgcatttcattgcttcccatcactaagtataagtgtggattcttttcaaggaagaaaacacgccgtgaaaggtgtgtgatttgccaaatggagtacaggagaggaaatttgcagattacgcttccatgcaagcatgtataccatgccagctgcgtgacaagatggcttagcataaacaaggtatgccctgtttgctttgctgaagttcctggcgaggattctctgaggcaatgattcatcagttgtgatgccactatgaagttgctgctctgggtactgcgcccccaatggacgcatgatttctgctttgaaggcagcttgttgtccccactttagaattgtgtattagcgccatattaccaaataggttattacttatcagatgtatttaggtagtgtttggtttcagaatatggtaggatggagtcactttgctcctaatttattgttgtttgaattgatttcatgtaggacatagtaactctaaaaatggaaaaactatgcttaaatactgaagcatctgactccc

SEQ ID NO: 84773 - DNA, 687 bp, Zea Mays
gtaagtttgaaaacacaggcatccaacaggtacaccaaagtccgggtagtcctcaggttgtttggcaagacaacattgaccctgacaatatgacatatgaggaactcttggatttgggtgaggcagttggaacccagagccgtggtctctctcaagaatgcatttcattgcttcccatcactaagtataagtgtggattcttttcaaggaagaaaacacgccgtgaaaggtgtgtgatttgccaaatggagtacaggagaggaaatttgcagattacgcttccatgcaagcatgtataccatgccagctgcgtgacaagatggcttagcataaacaaggtatgccctgtttgctttgctgaagttcctggcgaggattctctgaggcaatgattcatcagttgtgatgccactatgaagttgctgctctgggtactgcgcccccaatggacgcatgatttctgctttgaaggcagcttgttgtccccactttagaattgtgtattagcgccatattaccaaataggttattacttatcagatgtatttaggtagtgtttggtttcagaatatggtaggatggagtcactttgctcctaatttattgttgtttgaattgatttcatgtaggacatagtaactctaaaaatggaaaaactatgcttaaatactgaagcatctgactccc

SEQ ID NO: 84774 - DNA, 1143 bp, Zea Mays
tatcaaccgcatcctctattccagttcttctccacctcgtcctcgtgccttctcgcccgcccccccaaaattcacccggccaccctctaccaccacgtcggcgcgggtagcaagcagttggtctcatcgtcctcgcacctgacaacgtcgcggttcgcgctctcgcctcgtgccgcgcgcccattcctcgccctcgtctcctgcgagttcccacgccccccggtgccgccaccccggagccagtcctcgccgcattgttcccctcctcctggtgatcccgcaccgcgctgtgtccgctccatcttcctccgccgccacgctcatcgccgggtaatccgtactggacaatgatgcatacaaactcatacaaaacatgggataacactacacctgtaaacaatgtggattctgccaatgttgtcctgcagggtggtgaagctccccgcacaactgcaaatactactagtgaggattgcatccaacaggtacaccaaagtccgggtagtcctcaggttgtttggcaagacaacattgaccctgacaatatgacatatgaggaactcttggatttgggtgaggcagttggaacccagagccgtggtctctctcaagaatgcatttcattgcttcccatcactaagtataagtgtggattcttttcaaggaagaaaacacgccgtgaaaggtgtgtgatttgccaaatggagtacaggagaggaaatttgcagattacgcttccatgcaagcatgtataccatgccagctgcgtgacaagatggcttagcataaacaaggtatgccctgtttgctttgctgaagttcctggcgaggattctctgaggcaatgattcatcagttgtgatgccactatgaagttgctgctctgggtactgcgcccccaatggacgcatgatttctgctttgaaggcagcttgttgtccccactttagaattgtgtattagcgccatattaccaaataggttattacttatcagatgtatttaggtagtgtttggtttcagaatatggtaggatggagtcactttgctcctaatttattgttgtttgaattgatttcatgtaggacatagtaactctaaaaatggaaaaactatgcttaaatactgaagcatctgactccc

SEQ ID NO: 84775 - DNA, 1305 bp, Zea Mays
tatcaaccgcatcctctattccagttcttctccacctcgtcctcgtgccttctcgcccgcccccccaaaattcacccggccaccctctaccaccacgtcggcgcgggtagcaagcagttggtctcatcgtcctcgcacctgacaacgtcgcggttcgcgctctcgcctcgtgccgcgcgcccattcctcgccctcgtctcctgcgagttcccacgccccccggtgccgccaccccggagccagtcctcgccgcattgttcccctcctcctggtgatcccgcaccgcgctgtgtccgctccatcttcctccgccgccacgctcatcgccggttcatgtttcatcttaaggaatgaccagcagtcgacaaatggaactgcactacataaacactggatttccatacacaatcaccgagagtttcatggatttctttgagggtctcacttatgctcatgctgactttgctctcatggatggctttcaggatcagggtaatccgtactggacaatgatgcatacaaactcatacaaaacatgggataacactacacctgtaaacaatgtggattctgccaatgttgtcctgcagggtggtgaagctccccgcacaactgcaaatactactagtgaggattgcatccaacaggtacaccaaagtccgggtagtcctcaggttgtttggcaagacaacattgaccctgacaatatgacatatgaggaactcttggatttgggtgaggcagttggaacccagagccgtggtctctctcaagaatgcatttcattgcttcccatcactaagtataagtgtggattcttttcaaggaagaaaacacgccgtgaaaggtgtgtgatttgccaaatggagtacaggagaggaaatttgcagattacgcttccatgcaagcatgtataccatgccagctgcgtgacaagatggcttagcataaacaaggtatgccctgtttgctttgctgaagttcctggcgaggattctctgaggcaatgattcatcagttgtgatgccactatgaagttgctgctctgggtactgcgcccccaatggacgcatgatttctgctttgaaggcagcttgttgtccccactttagaattgtgtattagcgccatattaccaaataggttattacttatcagatgtatttaggtagtgtttggtttcagaatatggtaggatggagtcactttgctcctaatttattgttgtttgaattgatttcatgtaggacatagtaactctaaaaatggaaaaactatgcttaaatactgaagcatctgactccc

SEQ ID NO: 84776 - DNA, 1128 bp, Zea Mays
tatcaaccgcatcctctattccagttcttctccacctcgtcctcgtgccttctcgcccgcccccccaaaattcacccggccaccctctaccaccacgtcggcgcgggtagcaagcagttggtctcatcgtcctcgcacctgacaacgtcgcggttcatgtttcatcttaaggaatgaccagcagtcgacaaatggaactgcactacataaacactggatttccatacacaatcaccgagagtttcatggatttctttgagggtctcacttatgctcatgctgactttgctctcatggatggctttcaggatcagggtaatccgtactggacaatgatgcatacaaactcatacaaaacatgggataacactacacctgtaaacaatgtggattctgccaatgttgtcctgcagggtggtgaagctccccgcacaactgcaaatactactagtgaggattgcatccaacaggtacaccaaagtccgggtagtcctcaggttgtttggcaagacaacattgaccctgacaatatgacatatgaggaactcttggatttgggtgaggcagttggaacccagagccgtggtctctctcaagaatgcatttcattgcttcccatcactaagtataagtgtggattcttttcaaggaagaaaacacgccgtgaaaggtgtgtgatttgccaaatggagtacaggagaggaaatttgcagattacgcttccatgcaagcatgtataccatgccagctgcgtgacaagatggcttagcataaacaaggtatgccctgtttgctttgctgaagttcctggcgaggattctctgaggcaatgattcatcagttgtgatgccactatgaagttgctgctctgggtactgcgcccccaatggacgcatgatttctgctttgaaggcagcttgttgtccccactttagaattgtgtattagcgccatattaccaaataggttattacttatcagatgtatttaggtagtgtttggtttcagaatatggtaggatggagtcactttgctcctaatttattgttgtttgaattgatttcatgtaggacatagtaactctaaaaatggaaaaactatgcttaaatactgaagcatctgactccc

SEQ ID NO: 84777 - DNA, 1311 bp, Zea Mays
ccgccgccgaccgcctgcacaagcctgcggcgagatccggcgtcgccggcgagcttcagcaccggcacgtgctccggaaggaaatagcttccggtgacgtacgctaccctctccgcggcgtcccggggagcggggacggggagcgctttttgctgtcacccgcacacgagcgacgagctccaccacctgcccagctaaccatcaggaggtctggaggatcacaagtgccttggagaaccacaagtatgaaattgctgactgggaccttggtgccggaatatacatagacttctacgttctgaagaactcaatgcaagaaagaaatgccatggatgattcggattcactcgaggagatgagtgaatcatgcagaagtttctttggtcgattaaacgaatcgttgttagtctggggaagcaaattacctgttgagtcaaggtaacactcttctacagtatgtgactgatccacatccactatctgaaaccatgtccttctgtaccatgttttgatggagttggcccactggattataatgagctggtgcaaatagcaaacctgaactacatgaggaacttcgctgttatgttaaattgttcaaatcccagctgattagcaccatttggaattctgaagcattcttgtttaggtttatattcggagtattctctcactgggcttgctgacagggcatgctactcgaagatggcagaggagctatgcgcgcttctggtggacaccccaagcgagacgctgaacctacccatggggtgtcttctgacgatgctcaacgctccagttccagacgagagcaggtcgtcgtacctgcaggatgcactctccgtcttcaccgaaatcctttgcagcgatccgtaggtgaaggggagtgaagcctacaggcaacacgccgaagagtttgtacgtctcatgtttgatacttgtagaaaattaggaatgtataactatgacctgatgttgctccggtgaatttgtaacgccatctgaagacatgtgtcgggatcttcgttgtatgtgagtaccaggtcttatgaaacgttgacttgcgagctgtaccaatggggagtgatttcctgggcttcattttctctgtgtgtgtgtgtgtgtttattacagggaagggcagcgtcacggcgacccgtgcttcggtgtacattggagattactgaggccttcgtttcagccgtaaatcacatggatcgaagagtactttaacttggaaatgatttagtctccctcaatcccactcattatgatcttaattccgacccccagaccagagtagagagagtg

SEQ ID NO: 84778 - DNA, 1347 bp, Zea Mays
gtcgggttcccacccagcgtgcccgccgccgaccgcctgcacaagcctgcggcgagatccggcgtcgccggcgagcttcagcaccggcacgtgctccggaaggaaatagcttccggtgacgtacgctaccctctccgcggcgtcccggggagcggggacggggagcgctttttgctgtcacccgcacacgagcgacgagctccaccacctgcccagtattgtgagtcatggagtagagatgatgctcaaaggcaatacattgtagaacttggtataccagaagaatggatgcatgaagctctgtgcatgaaaattattacacatgaagcatgtgtagctaatgagctctatatacaggctctttatcacgaatactatggagataaacagggtgcactggagaatttgattcagtgtggcaactggaagaaagctcacactattttcgtgacttctgttgctcattctatgtttctgtcatctaaccatcaggaggtctggaggatcacaagtgccttggagaaccacaagtatgaaattgctgactgggaccttggtgccggaatatacatagacttctacgttctgaagaactcaatgcaagaaagaaatgccatggatgattcggattcactcgaggagatgagtgaatcatgcagaagtttctttggtcgattaaacgaatcgttgttagtctggggaagcaaattacctgttgagtcaagggcatgctactcgaagatggcagaggagctatgcgcgcttctggtggacaccccaagcgagacgctgaacctacccatggggtgtcttctgacgatgctcaacgctccagttccagacgagagcaggtcgtcgtacctgcaggatgcactctccgtcttcaccgaaatcctttgcagcgatccgtaggtgaaggggagtgaagcctacaggcaacacgccgaagagtttgtacgtctcatgtttgatacttgtagaaaattaggaatgtataactatgacctgatgttgctccggtgaatttgtaacgccatctgaagacatgtgtcgggatcttcgttgtatgtgagtaccaggtcttatgaaacgttgacttgcgagctgtaccaatggggagtgatttcctgggcttcattttctctgtgtgtgtgtgtgtgtttattacagggaagggcagcgtcacggcgacccgtgcttcggtgtacattggagattactgaggccttcgtttcagccgtaaatcacatggatcgaagagtactttaacttggaaatgatttagtctccctcaatcccactcattatgatcttaattccgacccccagaccagagtagagagagtg

SEQ ID NO: 84779 - DNA, 4072 bp, Zea Mays
gtcgggttcccacccagcgtgcccgccgccgaccgcctgcacaagcctgcggcgagatccggcgtcgccggcgagcttcagcaccggcacgtgctccggaaggaaatagcttccggtgacgtacgctaccctctccgcggcgtcccggggagcggggacggggagcgctttttgctgtcacccgcacacgagcgacgagctccaccacctgcccagggttagttgtgtatggaacaatgacgaacatggcaccacggcagggacccgtcactcagtgctgttgattctggaacatcgcctcgctaccacccatggcaggtagcactgtgttccctgtgctgcgctcctccgagtacttcacaagtccgtcaattgatgagctggtagagagggaggtggctgatcctggctactgcagcagggttccaaacttcatcatagggagggctggatatgggcaggttaggttcttgggcaacaccgatgtgaggggcattgacctgaatgaaattgtcaggtttgaaaaacactatgtggtggtttatgaggatgagacttgtaagccacctgtagggcatggtcttaacaaagcagcagaagtatccttgctgctgaatccgaaggatcatccggagcccagtatccttgttgaagtgctaaggtgtcgtgcaagaaagcaaggttctaggtttctttcattcaatccagtgaatggaagatggaaatttgaggttgatcattttagtagatttgggcttgtggatgaggacgaagaggatgctgtgatggacgaggcagctgttcggcagccaattactgaagtaagagaaagagatccaccttcaaatagttatgagattgagctctcacattcattgcctgctcatctcgggcttgaccctgcaaaggtgcaagaaatgaggatggtgatgttttccaatgaggaagaagatgaatacatggaggatgggttcccttctgacaagaggtaccttagcagagaaaggatgaatgtggattcacctacctcaagcagtaaaggttcgaggttaaggtctctctctcccttgcacatgtcttctcagaaggctggcaggagatctggtatgcctgttcggaaagaacgtcaggcacttttggaatacaatttgaattcttcagagcttggttcatcgaatcagggtattcttatgtctgggcaaaacagaggatttccagtgagtatgaccaaggtggaaggctttaagctgccgcctgagcaagaaactcctgttgctggaaacacgtatactgtctgtgtagtggatgctgctttattcatgggtagatcatttcgtgttggttggggaccaaatggtttacttgtacattcaggtagtctggtcaatagtcctggaactggcctatcttctgttattcacatagagaaagttgcaagtgacaaagttgtgcgtgatgataaggataagattaaggatgacctaacagaactatgtttttctgctccaatggacctccataagagtcttgatcatgactttctagagactgagtctgactcgttcagattgaagcttcaaaaagtcatgacaaatcgtttggttttgcctgacatctgcaggtcatatattgatatcatcgaaaggcagcttgaagtcaatgatttatccatgtcttcacgtgtgctgttgatgcatcaagttacagtctgggagttaattagggtcttgttctcagagagagcaactggtagccagttggactctgttggtgatgatgatcaggaaggcatggttttagacaaaaaagaaggctctgtcgacatagaccctgaagcactccctttgtttaggagagcagattttagcaattggttacaggacagtgtttgccatcgggtccaaggagaggtgggttccttaaatgatgccaggtacttggaaaatatcctcgtccttttgactggtcgacaattggacacggccactgaaattgctgcctcaaggggtgatgttcggttggcaatcttgctaagtcaggcaggtgggtcaatgtcaaatcgatctgaccttgcgcaaacactggatcagtggaaaatgaatggtctagattttgattatattgaggaagactggttaaaggtatatatgttacttgctggtaacgtacaggccgcttttctagatttaccaattgactggaagaggtaccttggtttgattatgtggtatcaattatcacctgatacaccactcgatattatcattcgttcttacgatcaactccttggtgagggcaaagttccctatcctgttcctgtatatatagatgaaggacctcttgatgaagcacctcagtggtccccgggtgaccattttgatatctccttctacctaatgcttcttcatgccaataaagacgagaagtttgggctgctaaagactatgttcagtgcattctcatcttcattcgaccccttggattatcatttcatatggcatcagcgttcaattttggaggctgttggagctttcagttcaaaagatcttcacttgctagatttaagttttgtttatcaattgctttgtcttgggaggtgccattgggctatctatgtcattctgcacatgccgtatcttgacgatgccccatacattcatgagaaattaatcagggaagttttatcacagtattgtgagtcatggagtagagatgatgctcaaaggcaatacattgtagaacttggtataccagaagaatggatgcatgaagctctgtgcatgaaaattattacacatgaagcatgtgtagctaatgagctctatatacaggctctttatcacgaatactatggagataaacagggtgcactggagaatttgattcagtgtggcaactggaagaaagctcacactattttcgtgacttctgttgctcattctatgtttctgtcatctaaccatcaggaggtctggaggatcacaagtgccttggagaaccacaagtatgaaattgctgactgggaccttggtgccggaatatacatagacttctacgttctgaagaactcaatgcaagaaagaaatgccatggatgattcggattcactcgaggagatgagtgaatcatgcagaagtttctttggtcgattaaacgaatcgttgttagtctggggaagcaaattacctgttgagtcaaggtaacactcttctacagtatgtgactgatccacatccactatctgaaaccatgtccttctgtaccatgttttgatggagttggcccactggattataatgagctggtgcaaatagcaaacctgaactacatgaggaacttcgctgttatgttaaattgttcaaatcccagctgattagcaccatttggaattctgaagcattcttgtttaggtttatattcggagtattctctcactgggcttgctgacagggcatgctactcgaagatggcagaggagctatgcgcgcttctggtggacaccccaagcgagacgctgaacctacccatggggtgtcttctgacgatgctcaacgctccagttccagacgagagcaggtcgtcgtacctgcaggatgcactctccgtcttcaccgaaatcctttgcagcgatccgtaggtgaaggggagtgaagcctacaggcaacacgccgaagagtttgtacgtctcatgtttgatacttgtagaaaattaggaatgtataactatgacctgatgttgctccggtgaatttgtaacgccatctgaagacatgtgtcgggatcttcgttgtatgtgagtaccaggtcttatgaaacgttgacttgcgagctgtaccaatggggagtgatttcctgggcttcattttctctgtgtgtgtgtgtgtgtttattacagggaagggcagcgtcacggcgacccgtgcttcggtgtacattggagattactgaggccttcgtttcagccgtaaatcacatggatcgaagagtactttaacttggaaatgatttagtctccctcaatcccactcattatgatcttaattccgacccccagaccagagtagagagagtg

SEQ ID NO: 84780 - DNA, 1101 bp, Zea Mays
ccttgttctacctcccaaagtcgggttcccacccagcgtgcccgccgccgaccgcctgcacaagcctgcggcgagatccggcgtcgccggcgagcttcagcaccggcacgtgctccggaaggaaatagcttccggtgacgtacgctaccctctccgcggcgtcccggggagcggggacggggagcgctttttgctgtcacccgcacacgagcgacgagctccaccacctgcccagctaaccatcaggaggtctggaggatcacaagtgccttggagaaccacaagtatgaaattgctgactgggaccttggtgccggaatatacatagacttctacgttctgaagaactcaatgcaagaaagaaatgccatggatgattcggattcactcgaggagatgagtgaatcatgcagaagtttctttggtcgattaaacgaatcgttgttagtctggggaagcaaattacctgttgagtcaagggcatgctactcgaagatggcagaggagctatgcgcgcttctggtggacaccccaagcgagacgctgaacctacccatggggtgtcttctgacgatgctcaacgctccagttccagacgagagcaggtcgtcgtacctgcaggatgcactctccgtcttcaccgaaatcctttgcagcgatccgtaggtgaaggggagtgaagcctacaggcaacacgccgaagagtttgtacgtctcatgtttgatacttgtagaaaattaggaatgtataactatgacctgatgttgctccggtgaatttgtaacgccatctgaagacatgtgtcgggatcttcgttgtatgtgagtaccaggtcttatgaaacgttgacttgcgagctgtaccaatggggagtgatttcctgggcttcattttctctgtgtgtgtgtgtgtgtttattacagggaagggcagcgtcacggcgacccgtgcttcggtgtacattggagattactgaggccttcgtttcagccgtaaatcacatggatcgaagagtactttaacttggaaatgatttagtctccctcaatcccactcattatgatcttaattccgacccccagaccagagtagagagagtg

SEQ ID NO: 84781 - DNA, 1203 bp, Zea Mays
ccttgttctacctcccaaagtcgggttcccacccagcgtgcccgccgccgaccgcctgcacaagcctgcggcgagatccggcgtcgccggcgagcttcagcaccggcacgtgctccggaaggaaatagcttccggtgacgtacgctaccctctccgcggcgtcccggggagcggggacggggagcgctttttgctgtcacccgcacacgagcgacgagctccaccacctgcccagggttagttgtgtatggaacaatgacgaacatggcaccacggcagggacccgtcactcagtgctgttgattctggaacatcgcctcgctaccacccatggcagctaaccatcaggaggtctggaggatcacaagtgccttggagaaccacaagtatgaaattgctgactgggaccttggtgccggaatatacatagacttctacgttctgaagaactcaatgcaagaaagaaatgccatggatgattcggattcactcgaggagatgagtgaatcatgcagaagtttctttggtcgattaaacgaatcgttgttagtctggggaagcaaattacctgttgagtcaagggcatgctactcgaagatggcagaggagctatgcgcgcttctggtggacaccccaagcgagacgctgaacctacccatggggtgtcttctgacgatgctcaacgctccagttccagacgagagcaggtcgtcgtacctgcaggatgcactctccgtcttcaccgaaatcctttgcagcgatccgtaggtgaaggggagtgaagcctacaggcaacacgccgaagagtttgtacgtctcatgtttgatacttgtagaaaattaggaatgtataactatgacctgatgttgctccggtgaatttgtaacgccatctgaagacatgtgtcgggatcttcgttgtatgtgagtaccaggtcttatgaaacgttgacttgcgagctgtaccaatggggagtgatttcctgggcttcattttctctgtgtgtgtgtgtgtgtttattacagggaagggcagcgtcacggcgacccgtgcttcggtgtacattggagattactgaggccttcgtttcagccgtaaatcacatggatcgaagagtactttaacttggaaatgatttagtctccctcaatcccactcattatgatcttaattccgacccccagaccagagtagagagagtg

SEQ ID NO: 84782 - DNA, 3844 bp, Zea Mays
gaacccttgttctacctcccaaagtcgggttcccacccagcgtgcccgccgccgaccgcctgcacaagcctgcggcgagatccggcgtcgccggcgagcttcagcaccggcacgtgctccggaaggaaatagcttccggtgacgtacgctaccctctccgcggcgtcccggggagcggggacggggagcgctttttgctgtcacccgcacacgagcgacgagctccaccacctgcccagggttagttgtgtatggaacaatgacgaacatggcaccacggcagggacccgtcactcagtgctgttgattctggaacatcgcctcgctaccacccatggcaggtagcactgtgttccctgtgctgcgctcctccgagtacttcacaagtccgtcaattgatgagctggtagagagggaggtggctgatcctggctactgcagcagggttccaaacttcatcatagggagggctggatatgggcaggttaggttcttgggcaacaccgatgtgaggggcattgacctgaatgaaattgtcaggtttgaaaaacactatgtggtggtttatgaggatgagacttgtaagccacctgtagggcatggtcttaacaaagcagcagaagtatccttgctgctgaatccgaaggatcatccggagcccagtatccttgttgaagtgctaaggtgtcgtgcaagaaagcaaggttctaggtttctttcattcaatccagtgaatggaagatggaaatttgaggttgatcattttagtagatttgggcttgtggatgaggacgaagaggatgctgtgatggacgaggcagctgttcggcagccaattactgaagtaagagaaagagatccaccttcaaatagttatgagattgagctctcacattcattgcctgctcatctcgggcttgaccctgcaaaggtgcaagaaatgaggatggtgatgttttccaatgaggaagaagatgaatacatggaggatgggttcccttctgacaagaggtaccttagcagagaaaggatgaatgtggattcacctacctcaagcagtaaaggttcgaggttaaggtctctctctcccttgcacatgtcttctcagaaggctggcaggagatctggtatgcctgttcggaaagaacgtcaggcacttttggaatacaatttgaattcttcagagcttggttcatcgaatcagggtattcttatgtctgggcaaaacagaggatttccagtgagtatgaccaaggtggaaggctttaagctgccgcctgagcaagaaactcctgttgctggaaacacgtatactgtctgtgtagtggatgctgctttattcatgggtagatcatttcgtgttggttggggaccaaatggtttacttgtacattcaggtagtctggtcaatagtcctggaactggcctatcttctgttattcacatagagaaagttgcaagtgacaaagttgtgcgtgatgataaggataagattaaggatgacctaacagaactatgtttttctgctccaatggacctccataagagtcttgatcatgactttctagagactgagtctgactcgttcagattgaagcttcaaaaagtcatgacaaatcgtttggttttgcctgacatctgcaggtcatatattgatatcatcgaaaggcagcttgaagtcaatgatttatccatgtcttcacgtgtgctgttgatgcatcaagttacagtctgggagttaattagggtcttgttctcagagagagcaactggtagccagttggactctgttggtgatgatgatcaggaaggcatggttttagacaaaaaagaaggctctgtcgacatagaccctgaagcactccctttgtttaggagagcagattttagcaattggttacaggacagtgtttgccatcgggtccaaggagaggtgggttccttaaatgatgccaggtacttggaaaatatcctcgtccttttgactggtcgacaattggacacggccactgaaattgctgcctcaaggggtgatgttcggttggcaatcttgctaagtcaggcaggtgggtcaatgtcaaatcgatctgaccttgcgcaaacactggatcagtggaaaatgaatggtctagattttgattatattgaggaagactggttaaaggtatatatgttacttgctggtaacgtacaggccgcttttctagatttaccaattgactggaagaggtaccttggtttgattatgtggtatcaattatcacctgatacaccactcgatattatcattcgttcttacgatcaactccttggtgagggcaaagttccctatcctgttcctgtatatatagatgaaggacctcttgatgaagcacctcagtggtccccgggtgaccattttgatatctccttctacctaatgcttcttcatgccaataaagacgagaagtttgggctgctaaagactatgttcagtgcattctcatcttcattcgaccccttggattatcatttcatatggcatcagcgttcaattttggaggctgttggagctttcagttcaaaagatcttcacttgctagatttaagttttgtttatcaattgctttgtcttgggaggtgccattgggctatctatgtcattctgcacatgccgtatcttgacgatgccccatacattcatgagaaattaatcagggaagttttatcacagtattgtgagtcatggagtagagatgatgctcaaaggcaatacattgtagaacttggtataccagaagaatggatgcatgaagctctgtgcatgaaaattattacacatgaagcatgtgtagctaatgagctctatatacaggctctttatcacgaatactatggagataaacagggtgcactggagaatttgattcagtgtggcaactggaagaaagctcacactattttcgtgacttctgttgctcattctatgtttctgtcatctaaccatcaggaggtctggaggatcacaagtgccttggagaaccacaagtatgaaattgctgactgggaccttggtgccggaatatacatagacttctacgttctgaagaactcaatgcaagaaagaaatgccatggatgattcggattcactcgaggagatgagtgaatcatgcagaagtttctttggtcgattaaacgaatcgttgttagtctggggaagcaaattacctgttgagtcaagggcatgctactcgaagatggcagaggagctatgcgcgcttctggtggacaccccaagcgagacgctgaacctacccatggggtgtcttctgacgatgctcaacgctccagttccagacgagagcaggtcgtcgtacctgcaggatgcactctccgtcttcaccgaaatcctttgcagcgatccgtaggtgaaggggagtgaagcctacaggcaacacgccgaagagtttgtacgtctcatgtttgatacttgtagaaaattaggaatgtataactatgacctgatgttgctccggtgaatttgtaacgccatctgaagacatgtgtcgggatcttcgttgtatgtgagtaccaggtcttatgaaacgttgacttgcgagctgtaccaatggggagtgatttcctgggcttcattttctctgtgtgtgtgtgtgtgtttattacagggaagggcagcgtcacggcgacccgtgcttcggtgtacattggagattactgaggccttcgtttcagccgtaaatcacatggatcgaagagtactttaacttggaaatgatttagtctccctcaatcccactcattatgatcttaattccgacccccagaccagagtagagagagtg

SEQ ID NO: 84783 - DNA, 1055 bp, Zea Mays
aattaagccagcgatcgaggtggtgtagtgtagcttccgagcgaagctcctaccgttgccgccggccggagatatgtcgtcgggcggccgacgtggcaggatcagcgacgacgagatcaacgagctgatctccaagctccaggcgctcctcccggaatcctcacgccgccggaacgcgagccggtcgtcggcgtcgaagcttctgaaggagacgtgcgcctacgtcaagagcctgcaccgggaggtggacgacctctcggagcggctgtcggggctcatggagaccatggacaacgacagcccccaggccgagatcatccggagcctcctccggtgactccaggtccaggttccagccatgcatgccgcttgccgccccggtcgtccggcgcgcgcggccgccctcttctgctgcctgccatctagctagctgccgcagccagcgcaggtgcactggagattggagaaggagaagacgacgacgcacggccgagcttgtttgttcgctcgtttatttgttacggcgacgaccttaattgtgttcctttgtttttaatttgttctcctcctcctcctcctcctcattcgggtgcgtgtttgtttccgtgttgaattagttcaagagcaagagcccttgctcagaagaaggcgaccaagtgctctactcgatcttctcgtgtaccacgccagggggggttagtagagtagagataatatatggacttctattaaccaactaataccacgtactggtaggttgtagttgcagtagactactggtagtagggtgtagttttgcagtagactacagtagcagctctacattgcagatgcgtccaaagagttgttgttgttctgtagattgcatgctgctcttgtctctgtcctttagcttacgccaatgggcggcggacaaggagctgaacgacgaccactctgtctggtggagacaaatatatacactatcacgtgattttcctctctttagctccatcctgatgtaacttggtaatttactccatccctccgtcttttttttttgttatagttctttt

SEQ ID NO: 84784 - DNA, 2184 bp, Zea Mays
gagtcccatttccccaagtacgagagagagagagagagagagcagaggagcacgctacgctacgtgaggggagagaagagagagggaggtcgagggagggaggcagcaggggttgcagcagaggccagaagcattagaagcggcagtcgtaaccaagtggcatcagtagatagagccagccatctatctatccatctatctagctctacaggtataaatcctcacgcatcggtaggagggcgagaggggggccgacgggggacgggagaggccgcctgccagcaggccaactaccgagtgggggaggaccgggaaaccggaggaggggatttctcggggagcggagggtcggccaggacctgattgggctccagggcgcgatctttgagcgcagatttggtgcccgcgatctgccatggatttgatttaagattgcaagaacgggactgctaagcaagctaaggtttcatatttttctggatcaatttcaaattaggatttaggaggaggaaataaagcaagaatagaaagcttttttttggggtgaagccatgatgctggaagggaagtcctaccttgttccgcgctccctgctgagctcctgcgagacggagacgcagtgggcgtacctcgctcacgaggtcctcggcggcaagcgcccggcgccggaagacgtcgaggtcgaagacctcgacgaagctgacggcggcggcaagcgcagcaagccgccgtctccgcagccgcacacgccggacatctccgagggtcgcggctccagccgccatgcctccggttgcggagagcagcagggcactgggagcaaccccatgaattcaatcggccgtgacctgaccctcaattgcctcctccggctatctcggtccgactacggctcggtggcctccctcagccgggacttccgatccatggtccgcagcggggagatctaccgcctgcggcgccagaatggggtggccgagcattgggtctacttctcctgcaacgttcttgaatgggatgcctatgacccatatcgagagcgctggatccaagtgcctaagatgccgcctgatgaatgcttcatgtgctctgacaaggaatcacttgcagtgggcactgaactgcttgtgtttgggatggcacgtattgtcttcagatacagcatcctaaccaattcatggaccagggctcatccaatgaactctccgcggtgcctgtttggttcaacaagtgttggggaaaaggccttcgttgctggaggcactgattctattggcaacatactgagctctgcagagatgtatgactctgagacacatacctggacgcccctcccaagcatgaatagggcaaggaagatgtgttctggggttttcatggatggcaagttctatgtgataggtggtgtggctaacaacaacaaattgctgacttgtggggaggagtatgacttgaagaggcgttcctggaggataatcgagaacatgtctgaaggcctcaatggagtgactggtgctcctccccttattgcagttgtcagcaacgagctatacgccgctgattacagcgagaatgacctcaagaagtatgacaagaagaacaacaggtggatcacccttggaaaactgcctgaacggtctgtgtcaatgaatggttggggccttgctttccgagcctgcggtgactgcctgattgtcatcggaggtccgaggacctacactggccgtactattgagctcaactcatggaccccaaacgagcggccgcctgtgtggaatttgattgccaggcggccatctgggaacttcgtgtacaactgcgccgtgatgggttgctgagttccactgaataaaagataagtgcagtggatatttatgaaggatggtatgcacagaggtagcctgtcccaattgcttcggcccttattcttcgtagtagcggtttctgccgtctggcccagttccggaattatgtggacatcagctgattgtcagcagtctcatgtaacccttgagttctgatactcctgtttccctgctaatccatttctacatttgcatttgaatcaactgctcgtgatttcaaagatacgagactatgcaaaacaaatgtcatattaataatctagaaacagcttcgagatgggttttatctattgatgaggaacctgttaagaaatgtttg

SEQ ID NO: 84785 - DNA, 2119 bp, Zea Mays
gagtcccatttccccaagtacgagagagagagagagagagagcagaggagcacgctacgctacgtgaggggagagaagagagagggaggtcgagggagggaggcagcaggggttgcagcagaggccagaagcattagaagcggcagtcgtaaccaagtggcatcagtagatagagccagccatctatctatccatctatctagctctacaggtataaatcctcacgcatcggtaggagggcgagaggggggccgacgggggacgggagaggccgcctgccagcaggccaactaccgagtgggggaggaccgggaaaccggaggaggggatttctcggggagcggagggtcggccaggacctgattgggctccagggcgcgatctttgagcgcagatttggtgcccgcgatctgccatggatttgatttaaggatttaggaggaggaaataaagcaagaatagaaagcttttttttggggtgaagccatgatgctggaagggaagtcctaccttgttccgcgctccctgctgagctcctgcgagacggagacgcagtgggcgtacctcgctcacgaggtcctcggcggcaagcgcccggcgccggaagacgtcgaggtcgaagacctcgacgaagctgacggcggcggcaagcgcagcaagccgccgtctccgcagccgcacacgccggacatctccgagggtcgcggctccagccgccatgcctccggttgcggagagcagcagggcactgggagcaaccccatgaattcaatcggccgtgacctgaccctcaattgcctcctccggctatctcggtccgactacggctcggtggcctccctcagccgggacttccgatccatggtccgcagcggggagatctaccgcctgcggcgccagaatggggtggccgagcattgggtctacttctcctgcaacgttcttgaatgggatgcctatgacccatatcgagagcgctggatccaagtgcctaagatgccgcctgatgaatgcttcatgtgctctgacaaggaatcacttgcagtgggcactgaactgcttgtgtttgggatggcacgtattgtcttcagatacagcatcctaaccaattcatggaccagggctcatccaatgaactctccgcggtgcctgtttggttcaacaagtgttggggaaaaggccttcgttgctggaggcactgattctattggcaacatactgagctctgcagagatgtatgactctgagacacatacctggacgcccctcccaagcatgaatagggcaaggaagatgtgttctggggttttcatggatggcaagttctatgtgataggtggtgtggctaacaacaacaaattgctgacttgtggggaggagtatgacttgaagaggcgttcctggaggataatcgagaacatgtctgaaggcctcaatggagtgactggtgctcctccccttattgcagttgtcagcaacgagctatacgccgctgattacagcgagaatgacctcaagaagtatgacaagaagaacaacaggtggatcacccttggaaaactgcctgaacggtctgtgtcaatgaatggttggggccttgctttccgagcctgcggtgactgcctgattgtcatcggaggtccgaggacctacactggccgtactattgagctcaactcatggaccccaaacgagcggccgcctgtgtggaatttgattgccaggcggccatctgggaacttcgtgtacaactgcgccgtgatgggttgctgagttccactgaataaaagataagtgcagtggatatttatgaaggatggtatgcacagaggtagcctgtcccaattgcttcggcccttattcttcgtagtagcggtttctgccgtctggcccagttccggaattatgtggacatcagctgattgtcagcagtctcatgtaacccttgagttctgatactcctgtttccctgctaatccatttctacatttgcatttgaatcaactgctcgtgatttcaaagatacgagactatgcaaaacaaatgtcatattaataatctagaaacagcttcgagatgggttttatctattgatgaggaacctgttaagaaatgtttg

SEQ ID NO: 84786 - DNA, 2372 bp, Zea Mays
cggacgcacacaaagcgaaaggaagagagagagagggggggaggaagggggcagcccagagcaggagagagaaattcgaggggaataaaaagggaaagaaataaagtgagggaggggagagtcccatttccccaagtacgagagagagagagagagagagcagaggagcacgctacgctacgtgaggggagagaagagagagggaggtcgagggagggaggcagcaggggttgcagcagaggccagaagcattagaagcggcagtcgtaaccaagtggcatcagtagatagagccagccatctatctatccatctatctagctctacaggtataaatcctcacgcatcggtaggagggcgagaggggggccgacgggggacgggagaggccgcctgccagcaggccaactaccgagtgggggaggaccgggaaaccggaggaggggatttctcggggagcggagggtcggccaggacctgattgggctccagggcgcgatctttgagcgcagatttggtgcccgcgatctgccatggatttgatttaagatttagggagatcggtcgtgttcgcgtcgcgctgcgagattcgattttttatgcctgttttattcacgagattgcaagaacgggactgctaagcaagctaaggtttcatatttttctggatcaatttcaaattaggatttaggaggaggaaataaagcaagaatagaaagcttttttttggggtgaagccatgatgctggaagggaagtcctaccttgttccgcgctccctgctgagctcctgcgagacggagacgcagtgggcgtacctcgctcacgaggtcctcggcggcaagcgcccggcgccggaagacgtcgaggtcgaagacctcgacgaagctgacggcggcggcaagcgcagcaagccgccgtctccgcagccgcacacgccggacatctccgagggtcgcggctccagccgccatgcctccggttgcggagagcagcagggcactgggagcaaccccatgaattcaatcggccgtgacctgaccctcaattgcctcctccggctatctcggtccgactacggctcggtggcctccctcagccgggacttccgatccatggtccgcagcggggagatctaccgcctgcggcgccagaatggggtggccgagcattgggtctacttctcctgcaacgttcttgaatgggatgcctatgacccatatcgagagcgctggatccaagtgcctaagatgccgcctgatgaatgcttcatgtgctctgacaaggaatcacttgcagtgggcactgaactgcttgtgtttgggatggcacgtattgtcttcagatacagcatcctaaccaattcatggaccagggctcatccaatgaactctccgcggtgcctgtttggttcaacaagtgttggggaaaaggccttcgttgctggaggcactgattctattggcaacatactgagctctgcagagatgtatgactctgagacacatacctggacgcccctcccaagcatgaatagggcaaggaagatgtgttctggggttttcatggatggcaagttctatgtgataggtggtgtggctaacaacaacaaattgctgacttgtggggaggagtatgacttgaagaggcgttcctggaggataatcgagaacatgtctgaaggcctcaatggagtgactggtgctcctccccttattgcagttgtcagcaacgagctatacgccgctgattacagcgagaatgacctcaagaagtatgacaagaagaacaacaggtggatcacccttggaaaactgcctgaacggtctgtgtcaatgaatggttggggccttgctttccgagcctgcggtgactgcctgattgtcatcggaggtccgaggacctacactggccgtactattgagctcaactcatggaccccaaacgagcggccgcctgtgtggaatttgattgccaggcggccatctgggaacttcgtgtacaactgcgccgtgatgggttgctgagttccactgaataaaagataagtgcagtggatatttatgaaggatggtatgcacagaggtagcctgtcccaattgcttcggcccttattcttcgtagtagcggtttctgccgtctggcccagttccggaattatgtggacatcagctgattgtcagcagtctcatgtaacccttgagttctgatactcctgtttccctgctaatccatttctacatttgcatttgaatcaactgctcgtgatttcaaagatacgagactatgcaaaacaaatgtcatattaataatctagaaacagcttcgagatgggttttatctattgatgaggaacctgttaagaaatgtttg

SEQ ID NO: 84787 - DNA, 2293 bp, Zea Mays
cgacaccatctccgtgcatacaatgctggccttggagcaagggcttgatggagttgtacttaaagtagatgacatggatgatatcattaagctcaaggaacgaggcaaagagtcaattaccattgacaaaggctactgtaacaaaggtcgaggttgttggtatgggtgatcgtgtttgtgtggatctttgcagtatcatgcgacctggcgaaggccttctggttggatcgtatgccagaggaatgtttcttgttcattctgaatgcttggagactaattacattgcaagcaggcctttcagagtcaatgcggggcctgtacatgcatatgtcaccgttcctggtggcaagacaagctacctctcagagttggggtcaggaaaggaagtcatcgtgatcaatcagagtgggctatggcgtactgcaattgtcggtcgtgtgaagatcgaatcaaggcctctgatccttgtagaagcgaaggataactctggagacgagacgtatagcatttttctacaaaacgcagaaacagttgcacttattacccctaacacaggatcaagtggaaggaccgccattcccgtgacttcgctgaaagtcggtgatgaagttctggtgaggaaacagggcgccgcccgtcacactgggatagagattcaggagtttattgttgagagatgaaaatggaaacgctgaatgcaccagtttcacgtcgttttgaacaaaaaaatgatgtatgattgcaacattcatctgttctgttggttaagattgtgagattccattgcagcatacaattgtgagattccattgcaacgtacaataatagatcaagacattgatgccaagtgagtgaatttcggaacagtcacgacacaggtcaataatgaaccaggcctgacaacttatcataaggttgacatggtcatattcccgtggcacacaccatcgccgaaacatcagtagaagcaaaagctacaacatgctcagtgctcacagcttgagcccacaaacacacagcctacaggggccttggccccgctaataagtccagttctagtgcacttgggcaaagttctagtgcacttgggcagtgcggtatcctgccaaaggtgctgctgctccaagcgagcgccgtggcgaaggccgtgctgccggttgagctctcatcggcgattttggggtgctgctcagcggcgattttggggtgctggtcataggcgatttgggggcagcgtgcgaggctttccggatgtcgactaatggcgatggtgcaccatatttggcatcttgtagctgttccagctcttccagcacctgcgacattggaggccgcagcttggcgtcaccgcaaatgcattgcgaggcaatgcttgcaatggcatttgcgccctttttggggtactgtcctcccaacttcgtgtccatgatacggtacagtctgcgcttgtcgcccaggtgaggtctggcccagtcaactaggttctgctcaaagcctggttttgatttatccagagcccttcttccagtgagcagttcaagcaacaccaccccgaagctatagacatctgcctttgcagagagacggcctgcaaagacgcaagcaacatgaaactaaacagatccagaaccgccactgtaaattacctaaatcgaagatttatattccacgtgttgccactgttatgaacaaagttgactggactaatcttgttgactggagcattcaaggactaatctgatgtatcatgctgtttaaggaattgaagcacaaaattgaacaagtacaattgactccaaaagaaatataaatacagttatttgatggcaggtccccacaatgatttcttttagcttaaacaaatagccctttgttataccctgtatcaccaaatatgctttaggtagaaaatgaaatgttcaggcatccttagttgttgcagtacgaggaagtattattgacatctccctttaaaagttgaagccacaaaccagagtaatgcacaacactactaccccaatatttcatcagtacgcacgcgaggaaaaaatatctaacctgttgcaatgtactctggagctgcatatccatgagtacccatgacttgtgtggatacatgggttttatccccagttggaccggcttttgccaagccaaaatctgaaagttttgcgttgaattcctgcaccgaaacaaggacaaagaacaagataaaggaccattctacaaggcagacatggtcggcaatcagagctggatgtcttgaattcctaattaagcttaccgaatcgag

SEQ ID NO: 84788 - DNA, 2326 bp, Zea Mays
cttcagcatacgacaccatctccgtgcatacaatgctggccttggagcaagggcttgatggagttgtacttaaagtagatgacatggatgatatcattaagctcaaggattattttgatcgaaggaacgaggcaaagagtcaattaccattgacaaaggctactgtaacaaaggtcgaggttgttggtatgggtgatcgtgtttgtgtggatctttgcagtatcatgcgacctggcgaaggccttctggtttgtgttggatcgtatgccagaggaatgtttcttgttcattctgaatgcttggagactaattacattgcaagcaggcctttcagagtcaatgcggggcctgtacatgcatatgtcaccgttcctggtggcaagacaagctacctctcagagttggggtcaggaaaggaagtcatcgtgatcaatcagagtgggctatggcgtactgcaattgtcggtcgtgtgaagatcgaatcaaggcctctgatccttgtagaagcgaaggataactctggagacgagacgtatagcatttttctacaaaacgcagaaacagttgcacttattacccctaacacaggatcaagtggaaggaccgccattcccgtgacttcgctgaaagtcggtgatgaagttctggtgaggaaacagggcgccgcccgtcacactgggatagagattcaggagtttattgttgagagatgaaaatggaaacgctgaatgcaccagtttcacgtcgttttgaacaaaaaaatgatgtatgattgcaacattcatctgttctgttggttaagattgtgagattccattgcagcatacaattgtgagattccattgcaacgtacaataatagatcaagacattgatgccaagtgagtgaatttcggaacagtcacgacacaggtcaataatgaaccaggcctgacaacttatcataaggttgacatggtcatattcccgtggcacacaccatcgccgaaacatcagtagaagcaaaagctacaacatgctcagtgctcacagcttgagcccacaaacacacagcctacaggggccttggccccgctaataagtccagttctagtgcacttgggcaaagttctagtgcacttgggcagtgcggtatcctgccaaaggtgctgctgctccaagcgagcgccgtggcgaaggccgtgctgccggttgagctctcatcggcgattttggggtgctgctcagcggcgattttggggtgctggtcataggcgatttgggggcagcgtgcgaggctttccggatgtcgactaatggcgatggtgcaccatatttggcatcttgtagctgttccagctcttccagcacctgcgacattggaggccgcagcttggcgtcaccgcaaatgcattgcgaggcaatgcttgcaatggcatttgcgccctttttggggtactgtcctcccaacttcgtgtccatgatacggtacagtctgcgcttgtcgcccaggtgaggtctggcccagtcaactaggttctgctcaaagcctggttttgatttatccagagcccttcttccagtgagcagttcaagcaacaccaccccgaagctatagacatctgcctttgcagagagacggcctgcaaagacgcaagcaacatgaaactaaacagatccagaaccgccactgtaaattacctaaatcgaagatttatattccacgtgttgccactgttatgaacaaagttgactggactaatcttgttgactggagcattcaaggactaatctgatgtatcatgctgtttaaggaattgaagcacaaaattgaacaagtacaattgactccaaaagaaatataaatacagttatttgatggcaggtccccacaatgatttcttttagcttaaacaaatagccctttgttataccctgtatcaccaaatatgctttaggtagaaaatgaaatgttcaggcatccttagttgttgcagtacgaggaagtattattgacatctccctttaaaagttgaagccacaaaccagagtaatgcacaacactactaccccaatatttcatcagtacgcacgcgaggaaaaaatatctaacctgttgcaatgtactctggagctgcatatccatgagtacccatgacttgtgtggatacatgggttttatccccagttggaccggcttttgccaagccaaaatctgaaagttttgcgttgaattcctgcaccgaaacaaggacaaagaacaagataaaggaccattctacaaggcagacatggtcggcaatcagagctggatgtcttgaattcctaattaagcttaccgaatcgag

SEQ ID NO: 84789 - DNA, 2989 bp, Zea Mays
ctccaacacggctccaccatcctcgggcctttggcccaattaatcttgttctacgtgggcggtgggcctccaagcgcgtatggtgcaggaaggaggttccggacggacgaggaggatgacgagttgacgacagaaaaaaaaaggctcttccgatgattcagccatcacaatggcatcctcctcttccttggcctccgccaaagccctagcacgctcccacgcgtccctcctcgcgccccaaacccagagaacagtggtcgcgccagcgccgtcgcgctcgcgccgcgcctccgtcaggatgcgcgcctctgctgccgcgccggcggagccgaagaagaccgtctgggtgtggaccgagagccggcaggtgatgacggcggccgtggagagggggtggagcactttcctcttcggatccaaagacctcggcaaggactgcaaccgctcgcataaatgctctcttcattgacggtccagggattttcgatgaggagaaccagaaggttgctgtaatttcacaagtctcttcgcccggtgaacttgaccttgtacaaccggacaacgccgaagccgagaacattgtcatagactttcgaggtggctggcaggttatacgggcagaaaatatagttgctgcattccaaggatgtaaaggaaatgtattggctgtatcaacgaacacaactgaggcgcaagtttttcttgaggccttggagcaagggcttgatggagttgtacttaaagtagatgacatggatgatatcattaagctcaaggattattttgatcgaaggaacgaggcaaagagtcaattaccattgacaaaggctactgtaacaaaggtcgaggttgttggtatgggtgatcgtgtttgtgtggatctttgcagtatcatgcgacctggcgaaggccttctggttggatcgtatgccagaggaatgtttcttgttcattctgaatgcttggagactaattacattgcaagcaggcctttcagagtcaatgcggggcctgtacatgcatatgtcaccgttcctggtggcaagacaagctacctctcagagttggggtcaggaaaggaagtcatcgtgatcaatcagagtgggctatggcgtactgcaattgtcggtcgtgtgaagatcgaatcaaggcctctgatccttgtagaagcgaaggataactctggagacgagacgtatagcatttttctacaaaacgcagaaacagttgcacttattacccctaacacaggatcaagtggaaggaccgccattcccgtgacttcgctgaaagtcggtgatgaagttctggtgaggaaacagggcgccgcccgtcacactgggatagagattcaggagtttattgttgagagatgaaaatggaaacgctgaatgcaccagtttcacgtcgttttgaacaaaaaaatgatgtatgattgcaacattcatctgttctgttggttaagattgtgagattccattgcagcatacaattgtgagattccattgcaacgtacaataatagatcaagacattgatgccaagtgagtgaatttcggaacagtcacgacacaggtcaataatgaaccaggcctgacaacttatcataaggttgacatggtcatattcccgtggcacacaccatcgccgaaacatcagtagaagcaaaagctacaacatgctcagtgctcacagcttgagcccacaaacacacagcctacaggggccttggccccgctaataagtccagttctagtgcacttgggcaaagttctagtgcacttgggcagtgcggtatcctgccaaaggtgctgctgctccaagcgagcgccgtggcgaaggccgtgctgccggttgagctctcatcggcgattttggggtgctgctcagcggcgattttggggtgctggtcataggcgatttgggggcagcgtgcgaggctttccggatgtcgactaatggcgatggtgcaccatatttggcatcttgtagctgttccagctcttccagcacctgcgacattggaggccgcagcttggcgtcaccgcaaatgcattgcgaggcaatgcttgcaatggcatttgcgccctttttggggtactgtcctcccaacttcgtgtccatgatacggtacagtctgcgcttgtcgcccaggtgaggtctggcccagtcaactaggttctgctcaaagcctggttttgatttatccagagcccttcttccagtgagcagttcaagcaacaccaccccgaagctatagacatctgcctttgcagagagacggcctgcaaagacgcaagcaacatgaaactaaacagatccagaaccgccactgtaaattacctaaatcgaagatttatattccacgtgttgccactgttatgaacaaagttgactggactaatcttgttgactggagcattcaaggactaatctgatgtatcatgctgtttaaggaattgaagcacaaaattgaacaagtacaattgactccaaaagaaatataaatacagttatttgatggcaggtccccacaatgatttcttttagcttaaacaaatagccctttgttataccctgtatcaccaaatatgctttaggtagaaaatgaaatgttcaggcatccttagttgttgcagtacgaggaagtattattgacatctccctttaaaagttgaagccacaaaccagagtaatgcacaacactactaccccaatatttcatcagtacgcacgcgaggaaaaaatatctaacctgttgcaatgtactctggagctgcatatccatgagtacccatgacttgtgtggatacatgggttttatccccagttggaccggcttttgccaagccaaaatctgaaagttttgcgttgaattcctgcaccgaaacaaggacaaagaacaagataaaggaccattctacaaggcagacatggtcggcaatcagagctggatgtcttgaattcctaattaagcttaccgaatcgag

SEQ ID NO: 84790 - DNA, 3123 bp, Zea Mays
ctccaacacggctccaccatcctcgggcctttggcccaattaatcttgttctacgtgggcggtgggcctccaagcgcgtatggtgcaggaaggaggttccggacggacgaggaggatgacgagttgacgacagaaaaaaaaaggctcttccgatgattcagccatcacaatggcatcctcctcttccttggcctccgccaaagccctagcacgctcccacgcgtccctcctcgcgccccaaacccagagaacaggtacccggtgtctcgctttctttctcgcaggattctctcgcccggtccctcagtccggtccgtgtctcgcggctccgtgcgaccgtgccgggcaattcaagctgctccccttcgacgatccgtcttccgccgtcactctgccgatggcttctgcacttcagcgcctgatgcgcgcctctgctgccgcgccggcggagccgaagaagaccgtctgggtgtggaccgagagccggcaggtgatgacggcggccgtggagagggggtggagcactttcctcttcggatccaaagacctcggcaaggactggtcatcaaccgctcgcataaatgctctcttcattgacggtccagggattttcgatgaggagaaccagaaggttgctgtaatttcacaagtctcttcgcccggtgaacttgaccttgtacaaccggacaacgccgaagccgagaacattgtcatagactttcgaggtggctggcaggttatacgggcagaaaatatagttgctgcattccaaggatgtaaaggaaatgtattggctgtatcaacgaacacaactgaggcgcaagtttttcttgaggccttggagcaagggcttgatggagttgtacttaaagtagatgacatggatgatatcattaagctcaaggattattttgatcgaaggaacgaggcaaagagtcaattaccattgacaaaggctactgtaacaaaggtcgaggttgttggtatgggtgatcgtgtttgtgtggatctttgcagtatcatgcgacctggcgaaggccttctggtttgtgttggatcgtatgccagaggaatgtttcttgttcattctgaatgcttggagactaattacattgcaagcaggcctttcagagtcaatgcggggcctgtacatgcatatgtcaccgttcctggtggcaagacaagctacctctcagagttggggtcaggaaaggaagtcatcgtgatcaatcagagtgggctatggcgtactgcaattgtcggtcgtgtgaagatcgaatcaaggcctctgatccttgtagaagcgaaggataactctggagacgagacgtatagcatttttctacaaaacgcagaaacagttgcacttattacccctaacacaggatcaagtggaaggaccgccattcccgtgacttcgctgaaagtcggtgatgaagttctggtgaggaaacagggcgccgcccgtcacactgggatagagattcaggagtttattgttgagagatgaaaatggaaacgctgaatgcaccagtttcacgtcgttttgaacaaaaaaatgatgtatgattgcaacattcatctgttctgttggttaagattgtgagattccattgcagcatacaattgtgagattccattgcaacgtacaataatagatcaagacattgatgccaagtgagtgaatttcggaacagtcacgacacaggtcaataatgaaccaggcctgacaacttatcataaggttgacatggtcatattcccgtggcacacaccatcgccgaaacatcagtagaagcaaaagctacaacatgctcagtgctcacagcttgagcccacaaacacacagcctacaggggccttggccccgctaataagtccagttctagtgcacttgggcaaagttctagtgcacttgggcagtgcggtatcctgccaaaggtgctgctgctccaagcgagcgccgtggcgaaggccgtgctgccggttgagctctcatcggcgattttggggtgctgctcagcggcgattttggggtgctggtcataggcgatttgggggcagcgtgcgaggctttccggatgtcgactaatggcgatggtgcaccatatttggcatcttgtagctgttccagctcttccagcacctgcgacattggaggccgcagcttggcgtcaccgcaaatgcattgcgaggcaatgcttgcaatggcatttgcgccctttttggggtactgtcctcccaacttcgtgtccatgatacggtacagtctgcgcttgtcgcccaggtgaggtctggcccagtcaactaggttctgctcaaagcctggttttgatttatccagagcccttcttccagtgagcagttcaagcaacaccaccccgaagctatagacatctgcctttgcagagagacggcctgcaaagacgcaagcaacatgaaactaaacagatccagaaccgccactgtaaattacctaaatcgaagatttatattccacgtgttgccactgttatgaacaaagttgactggactaatcttgttgactggagcattcaaggactaatctgatgtatcatgctgtttaaggaattgaagcacaaaattgaacaagtacaattgactccaaaagaaatataaatacagttatttgatggcaggtccccacaatgatttcttttagcttaaacaaatagccctttgttataccctgtatcaccaaatatgctttaggtagaaaatgaaatgttcaggcatccttagttgttgcagtacgaggaagtattattgacatctccctttaaaagttgaagccacaaaccagagtaatgcacaacactactaccccaatatttcatcagtacgcacgcgaggaaaaaatatctaacctgttgcaatgtactctggagctgcatatccatgagtacccatgacttgtgtggatacatgggttttatccccagttggaccggcttttgccaagccaaaatctgaaagttttgcgttgaattcctgcaccgaaacaaggacaaagaacaagataaaggaccattctacaaggcagacatggtcggcaatcagagctggatgtcttgaattcctaattaagcttaccgaatcgag

SEQ ID NO: 84791 - DNA, 2977 bp, Zea Mays
ctccaacacggctccaccatcctcgggcctttggcccaattaatcttgttctacgtgggcggtgggcctccaagcgcgtatggtgcaggaaggaggttccggacggacgaggaggatgacgagttgacgacagaaaaaaaaaggctcttccgatgattcagccatcacaatggcatcctcctcttccttggcctccgccaaagccctagcacgctcccacgcgtccctcctcgcgccccaaacccagagaacaggtacccggtgtctcgctttctttctcgcaggattctctcgcccggtccctcagtccggtccgtgtctcgcggctccgtgcgaccgtgccgggcaattcaagctgctccccttcgacgatccgtcttccgccgtcactctgccgatggcttctgcacttcagcgcctcaaccgctcgcataaatgctctcttcattgacggtccagggattttcgatgaggagaaccagaaggttgctgtaatttcacaagtctcttcgcccggtgaacttgaccttgtacaaccggacaacgccgaagccgagaacattgtcatagactttcgaggtggctggcaggttatacgggcagaaaatatagttgctgcattccaaggatgtaaaggaaatgtattggctgtatcaacgaacacaactgaggcgcaagtttttcttgaggccttggagcaagggcttgatggagttgtacttaaagtagatgacatggatgatatcattaagctcaaggattattttgatcgaaggaacgaggcaaagagtcaattaccattgacaaaggctactgtaacaaaggtcgaggttgttggtatgggtgatcgtgtttgtgtggatctttgcagtatcatgcgacctggcgaaggccttctggtttgtgttggatcgtatgccagaggaatgtttcttgttcattctgaatgcttggagactaattacattgcaagcaggcctttcagagtcaatgcggggcctgtacatgcatatgtcaccgttcctggtggcaagacaagctacctctcagagttggggtcaggaaaggaagtcatcgtgatcaatcagagtgggctatggcgtactgcaattgtcggtcgtgtgaagatcgaatcaaggcctctgatccttgtagaagcgaaggataactctggagacgagacgtatagcatttttctacaaaacgcagaaacagttgcacttattacccctaacacaggatcaagtggaaggaccgccattcccgtgacttcgctgaaagtcggtgatgaagttctggtgaggaaacagggcgccgcccgtcacactgggatagagattcaggagtttattgttgagagatgaaaatggaaacgctgaatgcaccagtttcacgtcgttttgaacaaaaaaatgatgtatgattgcaacattcatctgttctgttggttaagattgtgagattccattgcagcatacaattgtgagattccattgcaacgtacaataatagatcaagacattgatgccaagtgagtgaatttcggaacagtcacgacacaggtcaataatgaaccaggcctgacaacttatcataaggttgacatggtcatattcccgtggcacacaccatcgccgaaacatcagtagaagcaaaagctacaacatgctcagtgctcacagcttgagcccacaaacacacagcctacaggggccttggccccgctaataagtccagttctagtgcacttgggcaaagttctagtgcacttgggcagtgcggtatcctgccaaaggtgctgctgctccaagcgagcgccgtggcgaaggccgtgctgccggttgagctctcatcggcgattttggggtgctgctcagcggcgattttggggtgctggtcataggcgatttgggggcagcgtgcgaggctttccggatgtcgactaatggcgatggtgcaccatatttggcatcttgtagctgttccagctcttccagcacctgcgacattggaggccgcagcttggcgtcaccgcaaatgcattgcgaggcaatgcttgcaatggcatttgcgccctttttggggtactgtcctcccaacttcgtgtccatgatacggtacagtctgcgcttgtcgcccaggtgaggtctggcccagtcaactaggttctgctcaaagcctggttttgatttatccagagcccttcttccagtgagcagttcaagcaacaccaccccgaagctatagacatctgcctttgcagagagacggcctgcaaagacgcaagcaacatgaaactaaacagatccagaaccgccactgtaaattacctaaatcgaagatttatattccacgtgttgccactgttatgaacaaagttgactggactaatcttgttgactggagcattcaaggactaatctgatgtatcatgctgtttaaggaattgaagcacaaaattgaacaagtacaattgactccaaaagaaatataaatacagttatttgatggcaggtccccacaatgatttcttttagcttaaacaaatagccctttgttataccctgtatcaccaaatatgctttaggtagaaaatgaaatgttcaggcatccttagttgttgcagtacgaggaagtattattgacatctccctttaaaagttgaagccacaaaccagagtaatgcacaacactactaccccaatatttcatcagtacgcacgcgaggaaaaaatatctaacctgttgcaatgtactctggagctgcatatccatgagtacccatgacttgtgtggatacatgggttttatccccagttggaccggcttttgccaagccaaaatctgaaagttttgcgttgaattcctgcaccgaaacaaggacaaagaacaagataaaggaccattctacaaggcagacatggtcggcaatcagagctggatgtcttgaattcctaattaagcttaccgaatcgag

SEQ ID NO: 84792 - DNA, 2222 bp, Zea Mays
taaactgctggccttggagcaagggcttgatggagttgtacttaaagtagatgacatggatgatatcattaagctcaaggattattttgatcgaaggaacgaggcaaagagtcaattaccattgacaaaggctactgtaacaaaggtcgaggttgttggtatgggtgatcgtgtttgtgtggatctttgcagtatcatgcgacctggcgaaggccttctggtttgtgttggatcgtatgccagaggaatgtttcttgttcattctgaatgcttggagactaattacattgcaagcaggcctttcagagtcaatgcggggcctgtacatgcatatgtcaccgttcctggtggcaagacaagctacctctcagagttggggtcaggaaaggaagtcatcgtgatcaatcagagtgggctatggcgtactgcaattgtcggtcgtgtgaagatcgaatcaaggcctctgatccttgtagaagcgaaggatcaagtggaaggaccgccattcccgtgacttcgctgaaagtcggtgatgaagttctggtgaggaaacagggcgccgcccgtcacactgggatagagattcaggagtttattgttgagagatgaaaatggaaacgctgaatgcaccagtttcacgtcgttttgaacaaaaaaatgatgtatgattgcaacattcatctgttctgttggttaagattgtgagattccattgcagcatacaattgtgagattccattgcaacgtacaataatagatcaagacattgatgccaagtgagtgaatttcggaacagtcacgacacaggtcaataatgaaccaggcctgacaacttatcataaggttgacatggtcatattcccgtggcacacaccatcgccgaaacatcagtagaagcaaaagctacaacatgctcagtgctcacagcttgagcccacaaacacacagcctacaggggccttggccccgctaataagtccagttctagtgcacttgggcaaagttctagtgcacttgggcagtgcggtatcctgccaaaggtgctgctgctccaagcgagcgccgtggcgaaggccgtgctgccggttgagctctcatcggcgattttggggtgctgctcagcggcgattttggggtgctggtcataggcgatttgggggcagcgtgcgaggctttccggatgtcgactaatggcgatggtgcaccatatttggcatcttgtagctgttccagctcttccagcacctgcgacattggaggccgcagcttggcgtcaccgcaaatgcattgcgaggcaatgcttgcaatggcatttgcgccctttttggggtactgtcctcccaacttcgtgtccatgatacggtacagtctgcgcttgtcgcccaggtgaggtctggcccagtcaactaggttctgctcaaagcctggttttgatttatccagagcccttcttccagtgagcagttcaagcaacaccaccccgaagctatagacatctgcctttgcagagagacggcctgcaaagacgcaagcaacatgaaactaaacagatccagaaccgccactgtaaattacctaaatcgaagatttatattccacgtgttgccactgttatgaacaaagttgactggactaatcttgttgactggagcattcaaggactaatctgatgtatcatgctgtttaaggaattgaagcacaaaattgaacaagtacaattgactccaaaagaaatataaatacagttatttgatggcaggtccccacaatgatttcttttagcttaaacaaatagccctttgttataccctgtatcaccaaatatgctttaggtagaaaatgaaatgttcaggcatccttagttgttgcagtacgaggaagtattattgacatctccctttaaaagttgaagccacaaaccagagtaatgcacaacactactaccccaatatttcatcagtacgcacgcgaggaaaaaatatctaacctgttgcaatgtactctggagctgcatatccatgagtacccatgacttgtgtggatacatgggttttatccccagttggaccggcttttgccaagccaaaatctgaaagttttgcgttgaattcctgcaccgaaacaaggacaaagaacaagataaaggaccattctacaaggcagacatggtcggcaatcagagctggatgtcttgaattcctaattaagcttaccgaatcgag

SEQ ID NO: 84793 - DNA, 473 bp, Zea Mays
gagatttaccgttggggagtggtcgcgggcgtggagcggtcggcggtcggcggcggggcaggggcggccgagcttgggctgggcgctgttggcctgcggcttctgggcgtgggcgtgggcgtgggcgaagaggtcgtcgtcgccgccgaggctggcgcgggagagctccttcttgttctgcttgcgcgtctcgcggatcttggagaagtccatggagtagtccggcagcgcgccgttcttcgtgtcccagtccccgaacgccggcaccgtcatccagacgccgctgttggcgcccgcggcatcgtggccccgctgctgcacgcacgcacgcaccagcgcacggtgtgatgactgatgagctagtgagaaggacgaacgcaagcacggatcgcgctcgcagcagggacccgtggccgagcctagcaaggaaagggttgttcagggggggggggggggggggcgcagaggtcgct

SEQ ID NO: 84794 - DNA, 1703 bp, Zea Mays
agcttagagtttgtttggttagcacaagattggagtggattagaggggattgaagggaacttgtggagtttgaatgcaaggattgggccagcaagaaaatcaacataaaatatgaaattcgggaaagtaggaagggatacaaagcaggagccctgaagaagggcatggaacatagttacgcccaagaatgtgattttgttgccatctttgatgcagattttcaacctgatcctgacttccttttaagaactataccatttcttgtgcataacccgaagattgctctagtacagacacgttgggagtttgtgaactacaatatttgcctactgacaaggatacagaagatgtcactagattatcattttaaggtagagcaggaatcagggtcatctgtgcatgccttctttggtttcaacggtacggctggcgtgtggcgggtatcagctatcggtgaagcaggaggatggaaggatcgcaccactgtggaagacatggacttggctgtgcgggcaagcctcaagggatggcagttcctgtatgttggtgatataaggttttttgtacaggttaagagtgaactcccaagtactttcaaggcctaccgtcatcaacagcacaggtggacttgtggtgctgccaacctcttcaggaaaatggccggggacattgttataagcaagggggcgactgtatggaagaagcttcaccttctgtacagcttcttcttcgtccgaagggtcatcgctcccatcctaacgttcctgttctactgcgtcgtgatcccactgtctgtcatggtccccgaagtcagcatccctgcctggggaatgttctacattcccactgccatcaccatcatgacagccatcaggaatccttggtctatccatctggtgccaatatggatcctgttcgagaacgtcatgtccatgcaccgaatgcgcgcggcgctgacggggctgctggagaccacgtacgtggacgagtgggtggtcaccgagaaggtgggcgatcatgtgaaggacaagctcgaggtccctctccttacaccggtgaagccaaccgagtgcgtcgagaggatctacttgcctgagctcctggtcgcgttctacctgttgctatgcgcgtcgtacgatgtcgtgctcggagccgggcactactacccgtacatcttcctccaggccttcgctttcctcgtgctggggtttggcttcgccggcaccgtgacgccctgctcttgttcataagccatcgcgcgcatagcgctagcgcccatggctattttgctgcattcttccctgattcgcctcctctaaagtctgtaactagaaaagagaaagcgattctttctgtaaatcgaacagaataaacgctgcacgcgtgtgcagcatttgagcagtaacttggtttttttgagctgactgcatgtcattttcacggtcgctgcaggccggtaagcaagaatagcagtagccctggctttgggtgcctgtgtgggtacgtgggtatgggcctggagtggaccagaggctatcagatcagccagtgccagcccatctgcccatgagaggtttgtctgaactctgaagtgatcgagtgaacccgtcgctgcaatggacagcacagtacggagtacggtacagttccacggagtcacggactcatctccagcgaggcgtcgccgatcgcttttcatcgac

SEQ ID NO: 84795 - DNA, 1758 bp, Zea Mays
agcttagagtttgtttggttagcacaagattggagtggattagaggggattgaagggaacttgtggagtttgaatgcaaggattgggccagcaagaaaatcaacataaaatatgaaattcgggaaagtaggaagggatacaaagcaggagccctgaagaagggcatggaacatagttacgcccaagaatgtgattttgttgccatctttgatgcagattttcaacctgatcctgacttccttttaagaactataccatttcttgtgcataacccgaagattgctctagtacagacacgttgggagtttggatgttcctgacctggcctttgccgggcaattttgcagtgaactacaatatttgcctactgacaaggatacagaagatgtcactagattatcattttaaggtagagcaggaatcagggtcatctgtgcatgccttctttggtttcaacggtacggctggcgtgtggcgggtatcagctatcggtgaagcaggaggatggaaggatcgcaccactgtggaagacatggacttggctgtgcgggcaagcctcaagggatggcagttcctgtatgttggtgatataagggtgcgtctttctgcacacttgtagtaaaggttaagagtgaactcccaagtactttcaaggcctaccgtcatcaacagcacaggtggacttgtggtgctgccaacctcttcaggaaaatggccggggacattgttataagcaagggggcgactgtatggaagaagcttcaccttctgtacagcttcttcttcgtccgaagggtcatcgctcccatcctaacgttcctgttctactgcgtcgtgatcccactgtctgtcatggtccccgaagtcagcatccctgcctggggaatgttctacattcccactgccatcaccatcatgacagccatcaggaatccttggtctatccatctggtgccaatatggatcctgttcgagaacgtcatgtccatgcaccgaatgcgcgcggcgctgacggggctgctggagaccacgtacgtggacgagtgggtggtcaccgagaaggtgggcgatcatgtgaaggacaagctcgaggtccctctccttacaccggtgaagccaaccgagtgcgtcgagaggatctacttgcctgagctcctggtcgcgttctacctgttgctatgcgcgtcgtacgatgtcgtgctcggagccgggcactactacccgtacatcttcctccaggccttcgctttcctcgtgctggggtttggcttcgccggcaccgtgacgccctgctcttgttcataagccatcgcgcgcatagcgctagcgcccatggctattttgctgcattcttccctgattcgcctcctctaaagtctgtaactagaaaagagaaagcgattctttctgtaaatcgaacagaataaacgctgcacgcgtgtgcagcatttgagcagtaacttggtttttttgagctgactgcatgtcattttcacggtcgctgcaggccggtaagcaagaatagcagtagccctggctttgggtgcctgtgtgggtacgtgggtatgggcctggagtggaccagaggctatcagatcagccagtgccagcccatctgcccatgagaggtttgtctgaactctgaagtgatcgagtgaacccgtcgctgcaatggacagcacagtacggagtacggtacagttccacggagtcacggactcatctccagcgaggcgtcgccgatcgcttttcatcgac

SEQ ID NO: 84796 - DNA, 1778 bp, Zea Mays
agcttagagtttgtttggttagcacaagattggagtggattagaggggattgaagggaacttgtggagtttgaatgcaaggattgggccagcaagaaaatcaacataaaatatgaaattcgggaaagtaggaagggatacaaagcaggagccctgaagaagggcatggaacatagttacgcccaagaatgtgattttgttgccatctttgatgcagattttcaacctgatcctgacttccttttaagaactataccatttcttgtgcataacccgaagattgctctagtacagacacgttgggagtttggatgttcctgacctggcctttgccgggcaattttgcagtgaactacaatatttgcctactgacaaggatacagaagatgtcactagattatcattttaaggtagagcaggaatcagggtcatctgtgcatgccttctttggtttcaacggtacggctggcgtgtggcgggtatcagctatcggtgaagcaggaggatggaaggatcgcaccactgtggaagacatggacttggctgtgcgggcaagcctcaagggatggcagttcctgtatgttggtgatataagggtgcgtctttctgcacacttgtagtaaaggttaagagtgaactcccaagtactttcaaggcctaccgtcatcaacagcacaggtggacttgtggtgctgccaacctcttcaggaaaatggccggggacattgttataagcaagggggcgactgtatggaagaagcttcaccttctgtacagcttcttcttcgtccgaagggtcatcgctcccatcctaacgttcctgttctactgcgtcgtgatcccactgtctgtcatggtccccgaagtcagcatccctgcctggggaatgttctacattcccactgccatcaccatcatgacagccatcaggaatccttgtcatatttcgtgcacgccaggtctatccatctggtgccaatatggatcctgttcgagaacgtcatgtccatgcaccgaatgcgcgcggcgctgacggggctgctggagaccacgtacgtggacgagtgggtggtcaccgagaaggtgggcgatcatgtgaaggacaagctcgaggtccctctccttacaccggtgaagccaaccgagtgcgtcgagaggatctacttgcctgagctcctggtcgcgttctacctgttgctatgcgcgtcgtacgatgtcgtgctcggagccgggcactactacccgtacatcttcctccaggccttcgctttcctcgtgctggggtttggcttcgccggcaccgtgacgccctgctcttgttcataagccatcgcgcgcatagcgctagcgcccatggctattttgctgcattcttccctgattcgcctcctctaaagtctgtaactagaaaagagaaagcgattctttctgtaaatcgaacagaataaacgctgcacgcgtgtgcagcatttgagcagtaacttggtttttttgagctgactgcatgtcattttcacggtcgctgcaggccggtaagcaagaatagcagtagccctggctttgggtgcctgtgtgggtacgtgggtatgggcctggagtggaccagaggctatcagatcagccagtgccagcccatctgcccatgagaggtttgtctgaactctgaagtgatcgagtgaacccgtcgctgcaatggacagcacagtacggagtacggtacagttccacggagtcacggactcatctccagcgaggcgtcgccgatcgcttttcatcgac

SEQ ID NO: 84797 - DNA, 1867 bp, Zea Mays
gtttgcttgcttgcttgatccaaacatttctaagaagtaaggacatatgtgctatacaaaggttttgaatcaagatgcagttcatctgttcttgttatgcaacatgtaaaacaggaacttgtggagtttgaatgcaaggattgggccagcaagaaaatcaacataaaatatgaaattcgggaaagtaggaagggatacaaagcaggagccctgaagaagggcatggaacatagttacgcccaagaatgtgattttgttgccatctttgatgcagattttcaacctgatcctgacttccttttaagaactataccatttcttgtgcataacccgaagattgctctagtacagacacgttgggagtttgtgaactacaatatttgcctactgacaaggatacagaagatgtcactagattatcattttaaggtagagcaggaatcagggtcatctgtgcatgccttctttggtttcaacggtacggctggcgtgtggcgggtatcagctatcggtgaagcaggaggatggaaggatcgcaccactgtggaagacatggacttggctgtgcgggcaagcctcaagggatggcagttcctgtatgttggtgatataagggttaagagtgaactcccaagtactttcaaggcctaccgtcatcaacagcacaggtggacttgtggtgctgccaacctcttcaggaaaatggccggggacattgttataagcaagggggcgactgtatggaagaagcttcaccttctgtacagcttcttcttcgtccgaagggtcatcgctcccatcctaacgttcctgttctactgcgtcgtgatcccactgtctgtcatggtccccgaagtcagcatccctgcctggggaatgttctacattcccactgccatcaccatcatgacagccatcaggaatccttggtaagtggcccatctttcccctgactgatgcgtggagcggatttccctagctagctatgcgctcgttaatctcgcgtgtctactgatgatgccactagtcatatttcgtgcacgccaggtctatccatctggtgccaatatggatcctgttcgagaacgtcatgtccatgcaccgaatgcgcgcggcgctgacggggctgctggagaccacgtacgtggacgagtgggtggtcaccgagaaggtgggcgatcatgtgaaggacaagctcgaggtccctctccttacaccggtgaagccaaccgagtgcgtcgagaggatctacttgcctgagctcctggtcgcgttctacctgttgctatgcgcgtcgtacgatgtcgtgctcggagccgggcactactacccgtacatcttcctccaggccttcgctttcctcgtgctggggtttggcttcgccggcaccgtgacgccctgctcttgttcataagccatcgcgcgcatagcgctagcgcccatggctattttgctgcattcttccctgattcgcctcctctaaagtctgtaactagaaaagagaaagcgattctttctgtaaatcgaacagaataaacgctgcacgcgtgtgcagcatttgagcagtaacttggtttttttgagctgactgcatgtcattttcacggtcgctgcaggccggtaagcaagaatagcagtagccctggctttgggtgcctgtgtgggtacgtgggtatgggcctggagtggaccagaggctatcagatcagccagtgccagcccatctgcccatgagaggtttgtctgaactctgaagtgatcgagtgaacccgtcgctgcaatggacagcacagtacggagtacggtacagttccacggagtcacggactcatctccagcgaggcgtcgccgatcgcttttcatcgac

SEQ ID NO: 84798 - DNA, 1755 bp, Zea Mays
gtggaagccagaacccagaatgtctacaagatctctattggagcggcatgtgccctcacatggccgcccgaccgtattataatccaagtattggatgattccaccgacccattcattaaggaacttgtggagtttgaatgcaaggattgggccagcaagaaaatcaacataaaatatgaaattcgggaaagtaggaagggatacaaagcaggagccctgaagaagggcatggaacatagttacgcccaagaatgtgattttgttgccatctttgatgcagattttcaacctgatcctgacttccttttaagaactataccatttcttgtgcataacccgaagattgctctagtacagacacgttgggagtttgtgaactacaatatttgcctactgacaaggatacagaagatgtcactagattatcattttaaggtagagcaggaatcagggtcatctgtgcatgccttctttggtttcaacggtacggctggcgtgtggcgggtatcagctatcggtgaagcaggaggatggaaggatcgcaccactgtggaagacatggacttggctgtgcgggcaagcctcaagggatggcagttcctgtatgttggtgatataagggttaagagtgaactcccaagtactttcaaggcctaccgtcatcaacagcacaggtggacttgtggtgctgccaacctcttcaggaaaatggccggggacattgttataagcaagggggcgactgtatggaagaagcttcaccttctgtacagcttcttcttcgtccgaagggtcatcgctcccatcctaacgttcctgttctactgcgtcgtgatcccactgtctgtcatggtccccgaagtcagcatccctgcctggggaatgttctacattcccactgccatcaccatcatgacagccatcaggaatccttggtctatccatctggtgccaatatggatcctgttcgagaacgtcatgtccatgcaccgaatgcgcgcggcgctgacggggctgctggagaccacgtacgtggacgagtgggtggtcaccgagaaggtgggcgatcatgtgaaggacaagctcgaggtccctctccttacaccggtgaagccaaccgagtgcgtcgagaggatctacttgcctgagctcctggtcgcgttctacctgttgctatgcgcgtcgtacgatgtcgtgctcggagccgggcactactacccgtacatcttcctccaggccttcgctttcctcgtgctggggtttggcttcgccggcaccgtgacgccctgctcttgttcataagccatcgcgcgcatagcgctagcgcccatggctattttgctgcattcttccctgattcgcctcctctaaagtctgtaactagaaaagagaaagcgattctttctgtaaatcgaacagaataaacgctgcacgcgtgtgcagcatttgagcagtaacttggtttttttgagctgactgcatgtcattttcacggtcgctgcaggccggtaagcaagaatagcagtagccctggctttgggtgcctgtgtgggtacgtgggtatgggcctggagtggaccagaggctatcagatcagccagtgccagcccatctgcccatgagaggtttgtctgaactctgaagtgatcgagtgaacccgtcgctgcaatggacagcacagtacggagtacggtacagttccacggagtcacggactcatctccagcgaggcgtcgccgatcgcttttcatcgac

SEQ ID NO: 84799 - DNA, 1801 bp, Zea Mays
ttcacattcaagatgcggcgacgctttaggtctacaagatctctattggagcggcatgtgccctcacatggccgcccgaccgtattataatccaagtattggatgattccaccgacccattcattaaggaacttgtggagtttgaatgcaaggattgggccagcaagaaaatcaacataaaatatgaaattcgggaaagtaggaagggatacaaagcaggagccctgaagaagggcatggaacatagttacgcccaagaatgtgattttgttgccatctttgatgcagattttcaacctgatcctgacttccttttaagaactataccatttcttgtgcataacccgaagattgctctagtacagacacgttgggagtttggatgttcctgacctggcctttgccgggcaattttgcagtgaactacaatatttgcctactgacaaggatacagaagatgtcactagattatcattttaaggtagagcaggaatcagggtcatctgtgcatgccttctttggtttcaacggtacggctggcgtgtggcgggtatcagctatcggtgaagcaggaggatggaaggatcgcaccactgtggaagacatggacttggctgtgcgggcaagcctcaagggatggcagttcctgtatgttggtgatataagggttaagagtgaactcccaagtactttcaaggcctaccgtcatcaacagcacaggtggacttgtggtgctgccaacctcttcaggaaaatggccggggacattgttataagcaagggggcgactgtatggaagaagcttcaccttctgtacagcttcttcttcgtccgaagggtcatcgctcccatcctaacgttcctgttctactgcgtcgtgatcccactgtctgtcatggtccccgaagtcagcatccctgcctggggaatgttctacattcccactgccatcaccatcatgacagccatcaggaatccttggtctatccatctggtgccaatatggatcctgttcgagaacgtcatgtccatgcaccgaatgcgcgcggcgctgacggggctgctggagaccacgtacgtggacgagtgggtggtcaccgagaaggtgggcgatcatgtgaaggacaagctcgaggtccctctccttacaccggtgaagccaaccgagtgcgtcgagaggatctacttgcctgagctcctggtcgcgttctacctgttgctatgcgcgtcgtacgatgtcgtgctcggagccgggcactactacccgtacatcttcctccaggccttcgctttcctcgtgctggggtttggcttcgccggcaccgtgacgccctgctcttgttcataagccatcgcgcgcatagcgctagcgcccatggctattttgctgcattcttccctgattcgcctcctctaaagtctgtaactagaaaagagaaagcgattctttctgtaaatcgaacagaataaacgctgcacgcgtgtgcagcatttgagcagtaacttggtttttttgagctgactgcatgtcattttcacggtcgctgcaggccggtaagcaagaatagcagtagccctggctttgggtgcctgtgtgggtacgtgggtatgggcctggagtggaccagaggctatcagatcagccagtgccagcccatctgcccatgagaggtttgtctgaactctgaagtgatcgagtgaacccgtcgctgcaatggacagcacagtacggagtacggtacagttccacggagtcacggactcatctccagcgaggcgtcgccgatcgcttttcatcgac

SEQ ID NO: 84800 - DNA, 1836 bp, Zea Mays
gaggcccccgcccgcgtgattcccattctcgttcgccacccgcttcagtatcaactatgaagacatgcatccaaccaactcacgggcttgatttttaattaggtctacaagatctctattggagcggcatgtgccctcacatggccgcccgaccgtattataatccaagtattggatgattccaccgacccattcattaaggaacttgtggagtttgaatgcaaggattgggccagcaagaaaatcaacataaaatatgaaattcgggaaagtaggaagggatacaaagcaggagccctgaagaagggcatggaacatagttacgcccaagaatgtgattttgttgccatctttgatgcagattttcaacctgatcctgacttccttttaagaactataccatttcttgtgcataacccgaagattgctctagtacagacacgttgggagtttgtgaactacaatatttgcctactgacaaggatacagaagatgtcactagattatcattttaaggtagagcaggaatcagggtcatctgtgcatgccttctttggtttcaacggtacggctggcgtgtggcgggtatcagctatcggtgaagcaggaggatggaaggatcgcaccactgtggaagacatggacttggctgtgcgggcaagcctcaagggatggcagttcctgtatgttggtgatataagggttaagagtgaactcccaagtactttcaaggcctaccgtcatcaacagcacaggtggacttgtggtgctgccaacctcttcaggaaaatggccggggacattgttataagcaagggggcgactgtatggaagaagcttcaccttctgtacagcttcttcttcgtccgaagggtcatcgctcccatcctaacgttcctgttctactgcgtcgtgatcccactgtctgtcatggtccccgaagtcagcatccctgcctggggaatgttctacattcccactgccatcaccatcatgacagccatcaggaatccttggtctatccatctggtgccaatatggatcctgttcgagaacgtcatgtccatgcaccgaatgcgcgcggcgctgacggggctgctggagaccacgtacgtggacgagtgggtggtcaccgagaaggtgggcgatcatgtgaaggacaagctcgaggtccctctccttacaccggtgaagccaaccgagtgcgtcgagaggatctacttgcctgagctcctggtcgcgttctacctgttgctatgcgcgtcgtacgatgtcgtgctcggagccgggcactactacccgtacatcttcctccaggccttcgctttcctcgtgctggggtttggcttcgccggcaccgtgacgccctgctcttgttcataagccatcgcgcgcatagcgctagcgcccatggctattttgctgcattcttccctgattcgcctcctctaaagtctgtaactagaaaagagaaagcgattctttctgtaaatcgaacagaataaacgctgcacgcgtgtgcagcatttgagcagtaacttggtttttttgagctgactgcatgtcattttcacggtcgctgcaggccggtaagcaagaatagcagtagccctggctttgggtgcctgtgtgggtacgtgggtatgggcctggagtggaccagaggctatcagatcagccagtgccagcccatctgcccatgagaggtttgtctgaactctgaagtgatcgagtgaacccgtcgctgcaatggacagcacagtacggagtacggtacagttccacggagtcacggactcatctccagcgaggcgtcgccgatcgcttttcatcgac

SEQ ID NO: 84801 - DNA, 2303 bp, Zea Mays
cgcagcttgaggctccagcagtcccagcgtgtcgcgcatccagttttggcgttcagcttacctggcaagcaaagcatccctgtcctcgatttcaaaacggagccgagaggcccaacgagagccgaagccacagcagctgcaagcttttgcttcgtccgtccgtccgcccgcccgtccccgcatcattcccgaagtcccagcatggagttggaggggccgtgggcgcgggtgctgcacctgcacgatgcgtgcgagtggggccgggcggtgcgggcgcgcgcggtggcgccggcgctggaggccgcggcgtgggcgtgcctcgccatgtcggtcatgctcgtgctcgaggtgtgctacatgagcgtctccagcttcgtcgccgtcaacctgctgcgccggaccccacagcggcggtacagctgggagcccatgccctccgggaccgcccggggggacgatgaggaggcagcggtgggcgatggaggcggcgaggcgtacccgatggtactcgtgcagatccccatgtacaacgagagggaggtctacaagatctctattggagcggcatgtgccctcacatggccgcccgaccgtattataatccaagtattggatgattccaccgacccattcattaaggaacttgtggagtttgaatgcaaggattgggccagcaagaaaatcaacataaaatatgaaattcgggaaagtaggaagggatacaaagcaggagccctgaagaagggcatggaacatagttacgcccaagaatgtgattttgttgccatctttgatgcagattttcaacctgatcctgacttccttttaagaactataccatttcttgtgcataacccgaagattgctctagtacagacacgttgggagtttgtgaactacaatatttgcctactgacaaggatacagaagatgtcactagattatcattttaaggtagagcaggaatcagggtcatctgtgcatgccttctttggtttcaacggtacggctggcgtgtggcgggtatcagctatcggtgaagcaggaggatggaaggatcgcaccactgtggaagacatggacttggctgtgcgggcaagcctcaagggatggcagttcctgtatgttggtgatataagggtgcgtctttctgcacacttgtagtaaaggttaagagtgaactcccaagtactttcaaggcctaccgtcatcaacagcacaggtggacttgtggtgctgccaacctcttcaggaaaatggccggggacattgttataagcaagggggcgactgtatggaagaagcttcaccttctgtacagcttcttcttcgtccgaagggtcatcgctcccatcctaacgttcctgttctactgcgtcgtgatcccactgtctgtcatggtccccgaagtcagcatccctgcctggggaatgttctacattcccactgccatcaccatcatgacagccatcaggaatccttggtctatccatctggtgccaatatggatcctgttcgagaacgtcatgtccatgcaccgaatgcgcgcggcgctgacggggctgctggagaccacgtacgtggacgagtgggtggtcaccgagaaggtgggcgatcatgtgaaggacaagctcgaggtccctctccttacaccggtgaagccaaccgagtgcgtcgagaggatctacttgcctgagctcctggtcgcgttctacctgttgctatgcgcgtcgtacgatgtcgtgctcggagccgggcactactacccgtacatcttcctccaggccttcgctttcctcgtgctggggtttggcttcgccggcaccgtgacgccctgctcttgttcataagccatcgcgcgcatagcgctagcgcccatggctattttgctgcattcttccctgattcgcctcctctaaagtctgtaactagaaaagagaaagcgattctttctgtaaatcgaacagaataaacgctgcacgcgtgtgcagcatttgagcagtaacttggtttttttgagctgactgcatgtcattttcacggtcgctgcaggccggtaagcaagaatagcagtagccctggctttgggtgcctgtgtgggtacgtgggtatgggcctggagtggaccagaggctatcagatcagccagtgccagcccatctgcccatgagaggtttgtctgaactctgaagtgatcgagtgaacccgtcgctgcaatggacagcacagtacggagtacggtacagttccacggagtcacggactcatctccagcgaggcgtcgccgatcgcttttcatcgac

SEQ ID NO: 84802 - DNA, 4316 bp, Zea Mays
atgggggataggagggttctgcttgttgcgtctcctgaggtagcagtctttggttatgatggggtcgtctcattggcaagcgttcaggacgctgtggatactgttccgttgaacaaccaaacgcgcaccgtcatcaggatcggtcctggtgtgcaccagcagcaggtgcgcattcctaggaccaagaacttcatcaccttgtgtggatcttcgataaaggacaccgtgatctgttgggacaacaggactacgacttgcatcaaacacactcagccatcaggagcgattggcacagggacactgagcagtgcaacagttatcgtggaaggggacgatttcatcgcagagaatgttatttttaagaactcagctccccagtctggacaagcagcagcagtccgtgtgacggctgacaggtgtgccttttacgactgcagattcctcgggtggcaggaaaccttacatttgcatggtggaaagcagctcctgaagaactgttacgttgaaggtagttatgacttcatctttggagattccgctgcccttctggagcattgccatatccactgcaaatcagcggggtatattactgctcatggccggaaatcatcttcagaaccaactggattcgtgttcttcaagtgtgttattactggcaatggagaagctgcctacatgtacctaggccggccctgggagcccttcgggagggttgtttttgcagaaactttcatggatcgctgcatagagcctgctgggtggcataattgggacaagcctgacaatgagcaaaccgcctgcttctacgagtacaggtgctccggtccaggatcaagctcatcaggacgggaacgttggtgcaaagaactgttcggtgatgaagctatgccgttccttgcacagactttcattgatccagatatcgagaatccatggttggtccacagcaaagccgttgcggtcgtaggagatctcggagatgcccaactcgttgcacaccctgacgagctcctccccgagcctccgggcagcctccttgtccagggggagccgacgaggcaatgcaaagtcaactcaagattccccgccggagtacaaagcaaatcccagacggagaagacggcggcggcggcttaccaccgtgccgcagggcgggtcgccgcagatggacttctgcagcgtgctgccgtagaagaggatctccttgttgtggtcgtcggcgagaacggcgtagagctgccggctggagcagaacaccgagagcctgggcttcgtcgccgtgccgttgaactgcagcagccagcgagagtcggcggaacggcggtttcgttacatcctgccggctgcaggccttttatcctgaaattcgaagacccaggtggagcatcggaacgttcgtactaccttcttctgcagccgacggttcctgaccttggcgctctccgtgcgagcgccgcgtctcgccgtcgcctcgatcatgggcgagaagtcgaggctggtcccggagcctatcagcgaggtcgtagggtgacggaccgggagcgcggggcgcggcgggtagcagcgccatcgccagtggggcaaatcgtcgaacagacgccgcgcggccagtgggctgctgcgctattggcctattgcctttgtttggcgtcagtttaccccaccacatcaagaggcccaaccgtcgagagaggaagcaggagtaccgagtactccgagatctggcctgtgtccacagccttctcttccctgacctcgacatcttgccgatctgcactgactccgcggcccgcgttcatggcggtgacctttccctctcccaccccgcggtccccgcgccggccggatgccattgtggctcctgacccctcgtctgctgacatgtcgccctccctcgacttcggcgacccgacctccttcaccgcgctgcgcgtcctcaccgacgggggtgccgccacccgccttctccacgagtgcgtggcctaccagcgcgccctcgacgcccgtctcgacgctctcctcgcccgccgcgccgacctcgaccgcgccgctgcttcgctcctccgctccgccccaccactgctctcgctcgcggcctccgacgccgccgcgcttaaggagtcctcctcctccaccgcggcgcttgccgacgcgctctcgtcccgcgtgcgccaccttgacgcggcgcactccagggcggacgccgcgctggcgcgcgccgaggccgcgctcgaccgttcccgcgcgctcgaagcaacgcggagggccttggccgctgacgacctcgccgctgccgccaccgccgcgcacgaattcctcgctatcgacgctcggttccccaccgacgacgatctccgccgcgatctgattgacatcaaacgtcgcctcgaggggctcgcgcgtcggaggctagcggcggtcgtcgacgcacaggaccaccctgccgtgctccgcctcgtccgcctattcccactgctcggactcgctgatgaagggctccaggtatacgtcgcctacctcaagaaggttgtcgctctgcgtgcccgtgcagactttgagcacctcgccgagctgacctccgcgacccagccgacctctgaccggccggattttgttggctgcctcactcgtctctttaaggacattgtgcttgctgttgaagagaatgatggtgtgctgcgtgagctcaggggcgatgatgttgcttatgccatcattgagctgcaggaggagtgtgattcgcggggcacccagatcctacgccgttatgctgattacaggaagcttgcacgtcttgcatcagatataaactcctacacgaagaacctcctttcagtcatgggttccatggccagtgctgctggaggcaatgaagggcctgatcccagggaaattgagctttatcttgaggagattcttgcgttgacacagcttggggaggactacactgaattcatggtgaataagatccgtgtattgagagatgtgaaacctgaacttgggccgcgggcgatgaaggccttccgtaatggtaactttaataaaatggagcaggatctgactgggttctatgttatcttcgaggaatttttcatggtggagaatgtgaggaaagccatacggattgatgagcccatatcagatggtctcacaacgtcaatggtggatgatgtattctttgtactgcagagttgctgccgccgggctacttccactgcaagcataaactccgttattgctgtgcttggtggggcaacgagccttctgagcaatgagtatcaggaggcactacagtggaggatgcgggagccaaatttgggtgcaaagctcttccttggtggtgttggggtgcagaagactggtgaggagattgcgactgcactgaacaacattgacattagctccgagtatgttctgaagctccgccatgagattgaggagctctgtgtagagcaatatatagcaagcaataccaagttaggcaagcaagacaataccggcagctcaggtctcaggcaagcaagatagtaccaacaaggaagagcagaggagtcgggacttcatcttcgtgcacagctggggcctgcaggtgctagggcagctctggtgggtggtgcgccgcagggaacgcgggcgtgcggcgcgggggcgggtggcctgaggagcgaggagctggagtggggtggccagagttgcgtttggtggcgctagcagcggtgacaacaggggaaagaaagaagaaagcacaggtacatgggcgcatagggcacaaggcatacacacatggcccattggagcccacttcagcagctaggcgacggcacgttgtcgcctgggagcctgcccagtcgctgtggcgtcgtctaagtcggccaagggccgccctagttgggttcaggccaaggagctggagtggggcggccggagttgcgtttggcagctctagtggcggtgacaacatgggaaagaaagaagagaaaacaagtacctgggcacatagggcacaagacatacacatatggcccattggaacccacttcagcagctaggcaatggtacgacgtcgcctgggagcctgcctagtcgctgtggcgtcgtctaagttggccaggcgctgccctagttgggttcaggcgaggtgacagatcatggtgttcgttgccggccactggcacctaggtgtcacctaggtgacacagtgacaacagtgagtatggaatgtatgattgatccagcattcttgtctgcgggaacctgtgatctaatgaatagacttatgtaatagagaatctcataactcacaaagaatgcatttc

SEQ ID NO: 84803 - DNA, 4469 bp, Zea Mays
atgggggataggagggttctgcttgttgcgtctcctgaggtagcagtctttggttatgatggggtcgtctcattggcaagcgttcaggacgctgtggatactgttccgttgaacaaccaaacgcgcaccgtcatcaggatcggtcctggtgtgcaccagcagcaggtgcgcattcctaggaccaagaacttcatcaccttgtgtggatcttcgataaaggacaccgtgatctgttgggacaacaggactacgacttgcatcaaacacactcagccatcaggagcgattggcacagggacactgagcagtgcaacagttatcgtggaaggggacgatttcatcgcagagaatgttatttttaagaactcagctccccagtctggacaagcagcagcagtccgtgtgacggctgacaggtgtgccttttacgactgcagattcctcgggtggcaggaaaccttacatttgcatggtggaaagcagctcctgaagaactgttacgttgaaggtagttatgacttcatctttggagattccgctgcccttctggagcattgccatatccactgcaaatcagcggggtatattactgctcatggccggaaatcatcttcagaaccaactggattcgtgttcttcaagtgtgttattactggcaatggagaagctgcctacatgtacctaggccggccctgggagcccttcgggagggttgtttttgcagaaactttcatggatcgctgcatagagcctgctgggtggcataattgggacaagcctgacaatgagcaaaccgcctgcttctacgagtacaggtgctccggtccaggatcaagctcatcaggacgggaacgttggtgcaaagaactgttcggtgatgaagctatgccgttccttgcacagactttcattgatccagatatcgagaatccatggttggtccacagcaaagccgttgcggtcgtaggagatctcggagatgcccaactcgttgcacaccctgacgagctcctccccgagcctccgggcagcctccttgtccagggggagccgacgaggcaatgcaaagtcaactcaagattccccgccggagtacaaagcaaatcccagacggagaagacggcggcggcggcttaccaccgtgccgcagggcgggtcgccgcagatggacttctgcagcgtgctgccgtagaagaggatctccttgttgtggtcgtcggcgagaacggcgtagagctgccggctggagcagaacaccgagagcctgggcttcgtcgccgtgccgttgaactgcagcagccagcgagagtcggcggaacggcggtttcgttacatcctgccggctgcaggccttttatcctgaaattcgaagacccaggtggagcatcggaacgttcgtactaccttcttctgcagccgacggttcctgaccttggcgctctccgtgcgagcgccgcgtctcgccgtcgcctcgatcatgggcgagaagtcgaggctggtcccggagcctatcagcgaggtcgtagggtgacggaccgggagcgcggggcgcggcgggtagcagcgccatcgccagtggggcaaatcgtcgaacagacgccgcgcggccagtgggctgctgcgctattggcctattgcctttgtttggcgtcagtttaccccaccacatcaagaggcccaaccgtcgagagaggaagcaggagtaccgagtactccgagatctggcctgtgtccacagccttctcttccctgacctcgacatcttgccgatctgcactgactccgcggcccgcgttcatggcggtgacctttccctctcccaccccgcggtccccgcgccggccggatgccattgtggctcctgacccctcgtctgctgacatgtcgccctccctcgacttcggcgacccgacctccttcaccgcgctgcgcgtcctcaccgacgggggtgccgccacccgccttctccacgagtgcgtggcctaccagcgcgccctcgacgcccgtctcgacgctctcctcgcccgccgcgccgacctcgaccgcgccgctgcttcgctcctccgctccgccccaccactgctctcgctcgcggcctccgacgccgccgcgcttaaggagtcctcctcctccaccgcggcgcttgccgacgcgctctcgtcccgcgtgcgccaccttgacgcggcgcactccagggcggacgccgcgctggcgcgcgccgaggccgcgctcgaccgttcccgcgcgctcgaagcaacgcggagggccttggccgctgacgacctcgccgctgccgccaccgccgcgcacgaattcctcgctatcgacgctcggttccccaccgacgacgatctccgccgcgatctgattgacatcaaacgtcgcctcgaggggctcgcgcgtcggaggctagcggcggtcgtcgacgcacaggaccaccctgccgtgctccgcctcgtccgcctattcccactgctcggactcgctgatgaagggctccaggtatacgtcgcctacctcaagaaggttgtcgctctgcgtgcccgtgcagactttgagcacctcgccgagctgacctccgcgacccagccgacctctgaccggccggattttgttggctgcctcactcgtctctttaaggacattgtgcttgctgttgaagagaatgatggtgtgctgcgtgagctcaggggcgatgatgttgcttatgccatcattgagctgcaggaggagtgtgattcgcggggcacccagatcctacgccgttatgctgattacaggaagcttgcacgtcttgcatcagatataaactcctacacgaagaacctcctttcagtcatgggttccatggccagtgctgctggaggcaatgaagggcctgatcccagggaaattgagctttatcttgaggagattcttgcgttgacacagcttggggaggactacactgaattcatggtgaataagatccgtgtattgagagatgtgaaacctgaacttgggccgcgggcgatgaaggccttccgtaatggtaactttaataaaatggagcaggatctgactgggttctatgttatcttcgaggaatttttcatggtggagaatgtgaggaaagccatacggattgatgagcccatatcagatggtctcacaacgtcaatggtggatgatgtattctttgtactgcagagttgctgccgccgggctacttccactgcaagcataaactccgttattgctgtgcttggtggggcaacgagccttctgagcaatgagtatcaggaggcactacagtggaggatgcgggagccaaatttgggtgcaaagctcttccttggtggtgttggggtgcagaagactggtgaggagattgcgactgcactgaacaacattgacattagctccgagtatgttctgaagctccgccatgagattgaggagctctgtgtagagctgcagcagcttcaccatttgtagcaagagcttggccatagtcatcctcaacatgtagatcatcaggagcaacaaaaccaaattcagcttcttcctcttctcctaatctttgttgttcttgttctaaaattgtggttgtggtggatgttgaagcaatatatagcaagcaataccaagttaggcaagcaagacaataccggcagctcaggtctcaggcaagcaagatagtaccaacaaggaagagcagaggagtcgggacttcatcttcgtgcacagctggggcctgcaggtgctagggcagctctggtgggtggtgcgccgcagggaacgcgggcgtgcggcgcgggggcgggtggcctgaggagcgaggagctggagtggggtggccagagttgcgtttggtggcgctagcagcggtgacaacaggggaaagaaagaagaaagcacaggtacatgggcgcatagggcacaaggcatacacacatggcccattggagcccacttcagcagctaggcgacggcacgttgtcgcctgggagcctgcccagtcgctgtggcgtcgtctaagtcggccaagggccgccctagttgggttcaggccaaggagctggagtggggcggccggagttgcgtttggcagctctagtggcggtgacaacatgggaaagaaagaagagaaaacaagtacctgggcacatagggcacaagacatacacatatggcccattggaacccacttcagcagctaggcaatggtacgacgtcgcctgggagcctgcctagtcgctgtggcgtcgtctaagttggccaggcgctgccctagttgggttcaggcgaggtgacagatcatggtgttcgttgccggccactggcacctaggtgtcacctaggtgacacagtgacaacagtgagtatggaatgtatgattgatccagcattcttgtctgcgggaacctgtgatctaatgaatagacttatgtaatagagaatctcataactcacaaagaatgcatttc

SEQ ID NO: 84804 - DNA, 657 bp, Zea Mays
gagctttatcgagagtcaagtaaggaaaattgcagaattgagaaggttatgtgcagagaagggagtgaacccctggattgaggttgatggtggtgttggtccgaaaaatgcctacaaggttattgaagctggggcgaatgccatcgttgctggctctgcagttttcggggctccagactacgctgaagctatcaaaggaatcaagaccagccaaaggcctgcagctgtacacgcataaggaactggacgtgtgatcgtgctctgttcaggtttagcagtgttgggattcgtatagatagatgtgtcttgttttcgagccatacgttatactggagatgaaaggagacggaggaaatatttctctacgtgggtgaatcaatcatgtggacggtaatcacatgacgacaaagcatatggacgagcgctggctcacgagacagagtaatcaacgggagaggcttctagacagctctgcatgtccattccctctataaacaggagagcagttcagtctccattgtaaaggcacccagatatagaagaaagaaataaagagctctctatttgtctctgtttctatcgtgttattctctatgcattgatagaacaatttcttatcaccacgagttctcccaaactttgtatgccagcgaacct

SEQ ID NO: 84805 - DNA, 1091 bp, Zea Mays
gcccattagcaactttttctcaacttctttcacaataaataaggcaatagagtaaaagccgtggaggtggcaggatgtgactggattcatgtcgatgtcatggacgggcgctttgtgccaaatatcacaattggacctttggttgttgatgctctgcgtcctgtgactgatcttccattggatgtacatctgatgattgtggaacctgagcagcgagtccctgattttatcaaggcaggtgctgatattgttagtgtccactgtgaacaaacatcgaccatccatttgcacagaacagtcaatcagattaaaagtctaggagcaaaggcaggagttgttttgaatccagcgactccactcaatgcaattgattacattcttgatgttgttgacctggtgttgattatgtctgtgaatcctgggtttggtggccagagctttatcgagagtcaagtaaggaaaattgcagaattgagaaggttatgtgcagagaagggagtgaacccctggattgaggttgatggtggtgttggtccgaaaaatgcctacaaggttattgaagctggggcgaatgccatcgttgctggctctgcagttttcggggctccagactacgctgaagctatcaaaggaatcaagaccagccaaaggcctgcagctgtacacgcataaggaactggacgtgtgatcgtgctctgttcaggtttagcagtgttgggattcgtatagatagatgtgtcttgttttcgagccatacgttatactggagatgaaaggagacggaggaaatatttctctacgtgggtgaatcaatcatgtggacggtaatcacatgacgacaaagcatatggacgagcgctggctcacgagacagagtaatcaacgggagaggcttctagacagctctgcatgtccattccctctataaacaggagagcagttcagtctccattgtaaaggcacccagatatagaagaaagaaataaagagctctctatttgtctctgtttctatcgtgttattctctatgcattgatagaacaatttcttatcaccacgagttctcccaaactttgtatgccagcgaacct

SEQ ID NO: 84806 - DNA, 1553 bp, Zea Mays
ctcgctcctcgtcggcagtagtttctagcgatcccgtgtcccgttgcggcgttgccgcccccgatggctccgtgtggcgctgctgcgaattgcctattgagcagaacatggattgcagctctcgtgtctctcgggggctggttgagtgcaacgtgtgccccccaagttgctggtgatgagctctgtaggctctggatcgccatattaccttgatctcgcttatggaggagtttgtctgtctggaaaagtaatggatcatgcttgcttatgcttaagttggcacttctcatgtctgtgatgctagctactggtactggaagtaatatttgctccgtgttacctgttaactagagagcagggggaaatgggcaaacggatctagtcatgccacttgatgctgctgcgaaggcgttccaagtgagggcatcagctcgggttgacaagttctcaaagagtgatatcattgtgtccccttcgattctgtctgcaaacttcgccaagcttggtgatcaggtaaaagccgtggaggtggcaggatgtgactggattcatgtcgatgtcatggacgggcgctttgtgccaaatatcacaattggacctttggttgttgatgctctgcgtcctgtgactgatcttccattggatgtacatctgatgattgtggaacctgagcagcgagtccctgattttatcaaggcaggtgctgatattgttagtgtccactgtgaacaaacatcgaccatccatttgcacagaacagtcaatcagattaaaagtctaggagcaaaggcaggagttgttttgaatccagcgactccactcaatgcaattgattacattcttgatgttgttgacctggtgttgattatgtctgtgaatcctgggtttggtggccagagctttatcgagagtcaagtaaggaaaattgcagaattgagaaggttatgtgcagagaagggagtgaacccctggattgaggttgatggtggtgttggtccgaaaaatgcctacaaggttattgaagctggggcgaatgccatcgttgctggctctgcagttttcggggctccagactacgctgaagctatcaaaggaatcaagaccagccaaaggcctgcagctgtacacgcataaggaactggacgtgtgatcgtgctctgttcaggtttagcagtgttgggattcgtatagatagatgtgtcttgttttcgagccatacgttatactggagatgaaaggagacggaggaaatatttctctacgtgggtgaatcaatcatgtggacggtaatcacatgacgacaaagcatatggacgagcgctggctcacgagacagagtaatcaacgggagaggcttctagacagctctgcatgtccattccctctataaacaggagagcagttcagtctccattgtaaaggcacccagatatagaagaaagaaataaagagctctctatttgtctctgtttctatcgtgttattctctatgcattgatagaacaatttcttatcaccacgagttctcccaaactttgtatgccagcgaacct

SEQ ID NO: 84807 - DNA, 1213 bp, Zea Mays
gttggttttcccttccctgcttcctgtttggcgtgtcccgagtagcaacgcccgggcgcgtgaggaaggcgttccaagtgagggcatcagctcgggttgacaagttctcaaagagtgatatcattgtgtccccttcgattctgtctgcaaacttcgccaagcttggtgatcaggtaaaagccgtggaggtggcaggatgtgactggattcatgtcgatgtcatggacgggcgctttgtgccaaatatcacaattggacctttggttgttgatgctctgcgtcctgtgactgatcttccattggatgtacatctgatgattgtggaacctgagcagcgagtccctgattttatcaaggcaggtgctgatattgttagtgtccactgtgaacaaacatcgaccatccatttgcacagaacagtcaatcagattaaaagtctaggagcaaaggcaggagttgttttgaatccagcgactccactcaatgcaattgattacattcttgatgttgttgacctggtgttgattatgtctgtgaatcctgggtttggtggccagagctttatcgagagtcaagtaaggaaaattgcagaattgagaaggttatgtgcagagaagggagtgaacccctggattgaggttgatggtggtgttggtccgaaaaatgcctacaaggttattgaagctggggcgaatgccatcgttgctggctctgcagttttcggggctccagactacgctgaagctatcaaaggaatcaagaccagccaaaggcctgcagctgtacacgcataaggaactggacgtgtgatcgtgctctgttcaggtttagcagtgttgggattcgtatagatagatgtgtcttgttttcgagccatacgttatactggagatgaaaggagacggaggaaatatttctctacgtgggtgaatcaatcatgtggacggtaatcacatgacgacaaagcatatggacgagcgctggctcacgagacagagtaatcaacgggagaggcttctagacagctctgcatgtccattccctctataaacaggagagcagttcagtctccattgtaaaggcacccagatatagaagaaagaaataaagagctctctatttgtctctgtttctatcgtgttattctctatgcattgatagaacaatttcttatcaccacgagttctcccaaactttgtatgccagcgaacct

SEQ ID NO: 84808 - DNA, 1408 bp, Zea Mays
ttacaacgcacggacactcccctagtaatggaagatagatggtccgaagcgtttcggttcgcgtagcagaactgctcgtgcaacaagcaaacaacccaagagccgggagagttggtgactgcgaggccgagacaggggatagattgagagagccagagaggtgggcagatggcgacaccgtcgtcgtcgctttgctccagcttcgcctccctgcggaccgcctccatcggccacccccgcggcatcgcgtcatctacgcccaggcgttccaagtgagggcatcagctcgggttgacaagttctcaaagagtgatatcattgtgtccccttcgattctgtctgcaaacttcgccaagcttggtgatcaggtaaaagccgtggaggtggcaggatgtgactggattcatgtcgatgtcatggacgggcgctttgtgccaaatatcacaattggacctttggttgttgatgctctgcgtcctgtgactgatcttccattggatgtacatctgatgattgtggaacctgagcagcgagtccctgattttatcaaggcaggtgctgatattgttagtgtccactgtgaacaaacatcgaccatccatttgcacagaacagtcaatcagattaaaagtctaggagcaaaggcaggagttgttttgaatccagcgactccactcaatgcaattgattacattcttgatgttgttgacctggtgttgattatgtctgtgaatcctgggtttggtggccagagctttatcgagagtcaagtaaggaaaattgcagaattgagaaggttatgtgcagagaagggagtgaacccctggattgaggttgatggtggtgttggtccgaaaaatgcctacaaggttattgaagctggggcgaatgccatcgttgctggctctgcagttttcggggctccagactacgctgaagctatcaaaggaatcaagaccagccaaaggcctgcagctgtacacgcataaggaactggacgtgtgatcgtgctctgttcaggtttagcagtgttgggattcgtatagatagatgtgtcttgttttcgagccatacgttatactggagatgaaaggagacggaggaaatatttctctacgtgggtgaatcaatcatgtggacggtaatcacatgacgacaaagcatatggacgagcgctggctcacgagacagagtaatcaacgggagaggcttctagacagctctgcatgtccattccctctataaacaggagagcagttcagtctccattgtaaaggcacccagatatagaagaaagaaataaagagctctctatttgtctctgtttctatcgtgttattctctatgcattgatagaacaatttcttatcaccacgagttctcccaaactttgtatgccagcgaacct

SEQ ID NO: 84809 - DNA, 365 bp, Zea Mays
aacggccagatcagcaccatccccatgccactctgagaacttcccgcacctgctcagctagtcctaacccggagccacgaaggcgatccatggcggcgacgggtttgctccgacgtgcggccgcgtcgtcgctaccccgcctcccttccggaatttccctcatacagcctcctctccctgcccctctcaccgagtcgcagtcgctcgtgatccccggcatcggcgccgctgccggaccagccatggagctcatggccgtccctaagaagaaggtctccaagtacaagaagggtttgaggaatggacccaaagccttgaagtctgtgccggtcattattcgctgcaggtagttgggcatccatctg

SEQ ID NO: 84810 - DNA, 6042 bp, Zea Mays
cgatggcagcaacaccggcctgggactgggaggaatcgcttgtattcttcctgcagccgttcttcctccacggcgtgagcgccgcggcccaccttatcctggcgctcgccgtcgcgggacgcttgctctttcgccgcctctccgccagccggaccaaggacggggaggtgggcggaggagatgctagccgcggcgttggccggtttcggtactggtacggggtctctgtctgcaccacgtgggctatgggtgcgttcgaggtcctcctcgccgtctactcatggtacgcgaacggcggcgccgggtggtcgcgcgacgcggtcgttgaacaggtggacgcggccgcgcgcgcggtgtcgtggctgctgctcgccgcgtacctgcagttcgatttctggtggcgtcggcagcgccaggagcggttccccgtggcgctcaggctttggttggcgctcttcatgctgctctccgtagtcaccgtcggcgttcacgcggcgatgatcctcgacgggtcccttgtgcccggtcgatcgtgggcgctcgacgcagtctctgttactgcagcagcggttctactctcagtctcagctgggttcttcggaaggaaggagggagagggaggcggccatgcttccgaggcgcatgaacctctgctgaacggcgcgcacgaggggtccggtgacgacgacgagaacagcagcagcgccgccgacgcatccttgttcactggcgccggctttcttagcgtgctcaccttctcttggatgacgcccctgctcggcgtgggtcacaggaagaccctcgtcccggaggatgtcccgggcctcgaaccaggcgacagcgttgctggcgtcctcccgcccttcaaggccaaccttgaggcgctcaccggcgacggcggcaggtcgagccggaaggccgtcactgcgttcaagctcaccaaggccctgttgcgcaccctacggtggcacgtcgcggtgaccgcgttctacacgctggtctactgcgtcgccgtctacgtcgggccgtacctcatagactccctggtccagtacctgtacctcaacggcgacgagaggtacgcgagcaaggggcagctcctcgtactcgccttcgtcgtggccaaggtgctcgagtgcctgtcgcagcggcacttgttcttccggttgcagcaagcggggatacgagcgcggtcggcgctcgtcgcagtcctgtaccagaagagcctcgcgctttccagccagtcgaggcggagccacacgagcggagagatgatcaacatcgtcagcgtcgacgccgaccgcgtcggcatcttctcatggtacctgcacgaggtctggcaggtaccgctgcaagtagtcatggcgatgttcatcctgtactccaccctcggggtggcctcgctcgccgcgctcggtgccaccgtggccaccggcctcgccaccgtgcccctgggaagaatgcaggagcggttccaggagaagctgatggacagcaaggacgggaggatgaaggcgacgtcggagatcctgcacagcatgaggatcctgaagctgcaggggtgggagatgaggttcctgtccaagatcatcgagctgaggaagacagaggcgaactggctaaagagatacctctacacgtcggccaccatgaccttcatcttctggggcaccccaaccttcgtcgccgtggtgaccttcggagcctgcatgctcatggggatccccttggagacggggaagatgctgtcagcactggccacgttccgcgtgctggaggaacccatatacgaacttccgggcactatcgcgatggtgatcaagaccaaggtgtctcttgacaggatagcatcgttcctgtgcctcgacgagctacccagtgacgccgtgcagaggcttccacgtggaagctctgccgacttcgcagtcagcgtcggcaacgggtgcttctcatgggaagcctcgcctgatgctccaacactgaaggacctcaacttccaagctaggccaggcatgcgcgtcgcggtctgtgggacagttggctccggcaagtccagcctgctatcctgcattctcggcgagattccgaagttgtcgggagaggtccggacctgtgggacgacagcgtacgtcagccagtcggcgtggatacagagcggcaaaattcaggagaacatactgttcggtatggagatggacagagacaagtacgacagggtgctcgagtcgtgcgcgctcaagaaagacttggagaacctgccgtttggcgaccagacagtcatcggcgagcgaggcatcaacctcagtggaggccagaagcagaggatccagatagcacgcgctctgtatcaggacgccgacgtctatctgttcgacgatccgttcagcgcagtcgatgcgcatacaggatcccacattttcaaggaatgcttgcttgcggatttggcttcaaaaacagtggtttatgttactcatcagattgaattcctacctgccgccgatctcatccttgtgagaatttcttggtcatgaaagatgggaggatagcacaggcaggaagatacgacgaaatactgggttcaggcgaagagttcatggagctggtgggtgcccacgaggagtctctaacagcactggatgtggtcgatgccatgaacgagaacgaagccaacgtgtcatcctctcccagcagcaggatagagacgccgaacctgtccagatccctgtcgttagctgagaagaaacatggcgccaccaacgaggctgaaggggacgacgacgatgctcggagcgggcagctggtgcaggaggaagaaagggagaaaggcagggtggggttctgggtctactgggagtacctcacgcaagcctacaagggcgccctcgtgccgttggtgttgctggcgcagacgctctttcagatcatgcagattgccagtaactactggatggcttgggctactccggcgtcgaaggatgccgagcctccggtgagcgcgcccacgctgctcttcgtctacgtcgtgctggctctcggaagctcgctgtgcatcctcgtaagatcgctgctccttgcgacggctgcgtacaagacagcgactctgctgttcaacaagatgcacctgtccatattcagagctcccatgtctttcttcgattccactcccagcgggcgcatcttgaacagggcttcaactgatcaaagcgaggtggacaccaacatcgctgaccagatgggcaccgttgcattctccatcatccagctcgtcggaattactgcggtgatgtctcaggtcgcatggcaggtctttgtggttttcgtccctgtatttgctgcatgtgtctggtaccagcggtactacattgacacggcaagggagctgcaaaggctagtaggagtgtgcagagctccaatcatacagcacttcgcagagtcgatagcggggtcgagcaccatcagaagtttcggcaaggaagaccagttcgtgtcgactaacagccgtctaacagatgcctactcccggcccaagttctacaacgccggagcgagggagtggctttgctttcgcttggacgtgctgtcctctcttgcgttcgccttctccctgatctttctgatcaacctaccggccggtctcatcgatccaggcattgctggccttgcgatcacgtacgggcttactctgaacacgctgcaagcacaggttgtctggagcatgtgcactttggagaacaagatcatatcagtagagagaatcctacagtacatgggcgttcctgcagagcccccgcttgtcatgccagaaaacaagttggctcagagctggccatcgaatggagaaatccagcttcagaatctccatgtgaaatatgcgccgcagctgccgttcgttctgaagggccttacggtcgcttttccgggcggcgtgaagactggcattgtcggaagaacagggagcgggaaatcaaccctaatccagtccctcttccgcatcgtcgaccctgctgtcggccagatagtgatagacggcatcgacatccgcacggttgggctgcatgatctgaggtccaggctgagcatcattccacaggagccgacgatgttcgaaggaactgtcaggagcaaccttgaccctcttggggagtactccgacgatcagatctgggaggctttggattgctgtcagctaggggacgaagtcaggaagcaggagctgaagctcgactcaccagtggtagagaacggtgagaactggagcgtgggccagcgccagctcgtgtgccttggcagggtgatcctgaaacggagcaaggttcttgttctggacgaagccactgcctcggtggacactgcaaccgacggcttgatccagagaacgctgaggcggcagttcaaggagaccaccgtcatcacgatagcgcacaggatcacgtcggttcttgacagccacatggtgctgctccttgacaacggcgtggccgtcgagcacgacaggccggacaagttgctggaggacaagtcgtctctgttctcaaagctcgtagcagaatacaccatgcggtcggtgcttacatagcagaccacagaccagcatacaagagacgactgaagatggggtcataaatatatgatgacaccttttaagttttactagaaaccaaaaaggtctcgcgaaaggccttggacccattattacgcaatgtcatctcttcgtgggccaggggaggaatgtctgacaaaatggatcgacatgagatcggatcaactcaagctcgtgcgactcactaaattcaaacgttatccacagcagtgatacgattctcccgcgtagcgccctcaaacgtcggaactgaatgatgataagtcggcaggattatagaaagataagctcagtcggttcactattacttaggcgcacattgttatcatatccacatgtaacaccccacggtcaaatatataaggcttagggggcaccccatcaaacaactcactcattagccgtctacccagctctctagcatccctcgtactagagaactcccctctaaccaaccacataaaagatccacaccaggaagtagggtgttacgcctctctaagcggcccgaacctgtataaaattatccactatctctcgtgcatctagcacgaaccatcgagctacaatcggtaacaccgtcctactccaaaaagcacctcgagccctcgtggggcaacctcaggtgtgcggtcggacccaaaacaccgacagatggagagatagaatgtcagccattcagatctgaaatcaccaaaaacaagtgacaaaaccaacatacgtggaatgaacatgctatagactctgacctgcccccagttgaaagggaaatgtgccattgggacatttccaagtattttggtgattgagtgccaacacaagtgcttaagtgctaatctatgccaattgatggacaaagtgcaaatcaagaggaaaggtatgtttctaagacttagtacattgttttggagactaatgtattgtgtctaagtgctagaaacagggaaagaccaatttggaaaagacttggctaagcagccaagactctgcgcagtctgggtgcaccggacagtgtccggtacgccaggctgcgactgtcgactggctgctctcgggaagcgatcaacggcgtacggctataaatcaccggactgttcggtggtgcaccggactgtccggtgagccattcacaggcgaagtcgtcgctctcgggaagcaattaacggcgtacggctataattcaccggactatccggtgaggcaccggactgtccggtgagccaacggtcggccggaccaacggtcggccgcgtaatccgcgcgcgacgcgtggccgagccaacggtcagaagggggcaccggactgtccggtgtgcaccggactgtccggtgtgcacaggacagtgtccggtgcgccaatggctctggatcttcaacggtcggctgcgccacagaaggaaagaaatctgcaccggacagtgtccggtgcgccaggcgacaga

SEQ ID NO: 84811 - DNA, 5986 bp, Zea Mays
cgatggcagcaacaccggcctgggactgggaggaatcgcttgtattcttcctgcagccgttcttcctccacggcgtgagcgccgcggcccaccttatcctggcgctcgccgtcgcgggacgcttgctctttcgccgcctctccgccagccggaccaaggacggggaggtgggcggaggagatgctagccgcggcgttggccggtttcggtactggtacggggtctctgtctgcaccacgtgggctatgggtgcgttcgaggtcctcctcgccgtctactcatggtacgcgaacggcggcgccgggtggtcgcgcgacgcggtcgttgaacaggtggacgcggccgcgcgcgcggtgtcgtggctgctgctcgccgcgtacctgcagttcgatttctggtggcgtcggcagcgccaggagcggttccccgtggcgctcaggctttggttggcgctcttcatgctgctctccgtagtcaccgtcggcgttcacgcggcgatgatcctcgacgggtcccttgtgcccggtcgatcgtgggcgctcgacgcagtctctgttactgcagcagcggttctactctcagtctcagctgggttcttcggaaggaaggagggagagggaggcggccatgcttccgaggcgcatgaacctctgctgaacggcgcgcacgaggggtccggtgacgacgacgagaacagcagcagcgccgccgacgcatccttgttcactggcgccggctttcttagcgtgctcaccttctcttggatgacgcccctgctcggcgtgggtcacaggaagaccctcgtcccggaggatgtcccgggcctcgaaccaggcgacagcgttgctggcgtcctcccgcccttcaaggccaaccttgaggcgctcaccggcgacggcggcaggtcgagccggaaggccgtcactgcgttcaagctcaccaaggccctgttgcgcaccctacggtggcacgtcgcggtgaccgcgttctacacgctggtctactgcgtcgccgtctacgtcgggccgtacctcatagactccctggtccagtacctgtacctcaacggcgacgagaggtacgcgagcaaggggcagctcctcgtactcgccttcgtcgtggccaaggtgctcgagtgcctgtcgcagcggcacttgttcttccggttgcagcaagcggggatacgagcgcggtcggcgctcgtcgcagtcctgtaccagaagagcctcgcgctttccagccagtcgaggcggagccacacgagcggagagatgatcaacatcgtcagcgtcgacgccgaccgcgtcggcatcttctcatggtacctgcacgaggtctggcaggtaccgctgcaagtagtcatggcgatgttcatcctgtactccaccctcggggtggcctcgctcgccgcgctcggtgccaccgtggccaccggcctcgccaccgtgcccctgggaagaatgcaggagcggttccaggagaagctgatggacagcaaggacgggaggatgaaggcgacgtcggagatcctgcacagcatgaggatcctgaagctgcaggggtgggagatgaggttcctgtccaagatcatcgagctgaggaagacagaggcgaactggctaaagagatacctctacacgtcggccaccatgaccttcatcttctggggcaccccaaccttcgtcgccgtggtgaccttcggagcctgcatgctcatggggatccccttggagacggggaagatgctgtcagcactggccacgttccgcgtgctggaggaacccatatacgaacttccgggcactatcgcgatggtgatcaagaccaaggtgtctcttgacaggatagcatcgttcctgtgcctcgacgagctacccagtgacgccgtgcagaggcttccacgtggaagctctgccgacttcgcagtcagcgtcggcaacgggtgcttctcatgggaagcctcgcctgatgctccaacactgaaggacctcaacttccaagctaggccaggcatgcgcgtcgcggtctgtgggacagttggctccggcaagtccagcctgctatcctgcattctcggcgagattccgaagttgtcgggagaggtccggacctgtgggacgacagcgtacgtcagccagtcggcgtggatacagagcggcaaaattcaggagaacatactgttcggtatggagatggacagagacaagtacgacagggtgctcgagtcgtgcgcgctcaagaaagacttggagaacctgccgtttggcgaccagacagtcatcggcgagcgaggcatcaacctcagtggaggccagaagcagaggatccagatagcacgcgctctgtatcaggacgccgacgtctatctgttcgacgatccgttcagcgcagtcgatgcgcatacaggatcccacattttcaaggaatgcttgcttgcggatttggcttcaaaaacagtggtttatgttactcatcagattgaattcctacctgccgccgatctcatccttgtgagaatttcttggtcatgaaagatgggaggatagcacaggcaggaagatacgacgaaatactgggttcaggcgaagagttcatggagctggtgggtgcccacgaggagtctctaacagcactggatgtggtcgatgccatgaacgagaacgaagccaacgtgtcatcctctcccagcagcaggatagagacgccgaacctgtccagatccctgtcgttagctgagaagaaacatggcgccaccaacgaggctgaaggggacgacgacgatgctcggagcgggcagctggtgcaggaggaagaaagggagaaaggcagggtggggttctgggtctactgggagtacctcacgcaagcctacaagggcgccctcgtgccgttggtgttgctggcgcagacgctctttcagatcatgcagattgccagtaactactggatggcttgggctactccggcgtcgaaggatgccgagcctccggtgagcgcgcccacgctgctcttcgtctacgtcgtgctggctctcggaagctcgctgtgcatcctcgtaagatcgctgctccttgcgacggctgcgtacaagacagcgactctgctgttcaacaagatgcacctgtccatattcagagctcccatgtctttcttcgattccactcccagcgggcgcatcttgaacagggcttcaactgatcaaagcgaggtggacaccaacatcgctgaccagatgggcaccgttgcattctccatcatccagctcgtcggaattactgcggtgatgtctcaggtcgcatggcaggtctttgtggttttcgtccctgtatttgctgcatgtgtctggtaccagcggtactacattgacacggcaagggagctgcaaaggctagtaggagtgtgcagagctccaatcatacagcacttcgcagagtcgatagcggggtcgagcaccatcagaagtttcggcaaggaagaccagttcgtgtcgactaacagccgtctaacagatgcctactcccggcccaagttctacaacgccggagcgagggagtggctttgctttcgcttggacgtgctgtcctctcttgcgttcgccttctccctgatctttctgatcaacctaccggccggtctcatcgatccaggttgtctggagcatgtgcactttggagaacaagatcatatcagtagagagaatcctacagtacatgggcgttcctgcagagcccccgcttgtcatgccagaaaacaagttggctcagagctggccatcgaatggagaaatccagcttcagaatctccatgtgaaatatgcgccgcagctgccgttcgttctgaagggccttacggtcgcttttccgggcggcgtgaagactggcattgtcggaagaacagggagcgggaaatcaaccctaatccagtccctcttccgcatcgtcgaccctgctgtcggccagatagtgatagacggcatcgacatccgcacggttgggctgcatgatctgaggtccaggctgagcatcattccacaggagccgacgatgttcgaaggaactgtcaggagcaaccttgaccctcttggggagtactccgacgatcagatctgggaggctttggattgctgtcagctaggggacgaagtcaggaagcaggagctgaagctcgactcaccagtggtagagaacggtgagaactggagcgtgggccagcgccagctcgtgtgccttggcagggtgatcctgaaacggagcaaggttcttgttctggacgaagccactgcctcggtggacactgcaaccgacggcttgatccagagaacgctgaggcggcagttcaaggagaccaccgtcatcacgatagcgcacaggatcacgtcggttcttgacagccacatggtgctgctccttgacaacggcgtggccgtcgagcacgacaggccggacaagttgctggaggacaagtcgtctctgttctcaaagctcgtagcagaatacaccatgcggtcggtgcttacatagcagaccacagaccagcatacaagagacgactgaagatggggtcataaatatatgatgacaccttttaagttttactagaaaccaaaaaggtctcgcgaaaggccttggacccattattacgcaatgtcatctcttcgtgggccaggggaggaatgtctgacaaaatggatcgacatgagatcggatcaactcaagctcgtgcgactcactaaattcaaacgttatccacagcagtgatacgattctcccgcgtagcgccctcaaacgtcggaactgaatgatgataagtcggcaggattatagaaagataagctcagtcggttcactattacttaggcgcacattgttatcatatccacatgtaacaccccacggtcaaatatataaggcttagggggcaccccatcaaacaactcactcattagccgtctacccagctctctagcatccctcgtactagagaactcccctctaaccaaccacataaaagatccacaccaggaagtagggtgttacgcctctctaagcggcccgaacctgtataaaattatccactatctctcgtgcatctagcacgaaccatcgagctacaatcggtaacaccgtcctactccaaaaagcacctcgagccctcgtggggcaacctcaggtgtgcggtcggacccaaaacaccgacagatggagagatagaatgtcagccattcagatctgaaatcaccaaaaacaagtgacaaaaccaacatacgtggaatgaacatgctatagactctgacctgcccccagttgaaagggaaatgtgccattgggacatttccaagtattttggtgattgagtgccaacacaagtgcttaagtgctaatctatgccaattgatggacaaagtgcaaatcaagaggaaaggtatgtttctaagacttagtacattgttttggagactaatgtattgtgtctaagtgctagaaacagggaaagaccaatttggaaaagacttggctaagcagccaagactctgcgcagtctgggtgcaccggacagtgtccggtacgccaggctgcgactgtcgactggctgctctcgggaagcgatcaacggcgtacggctataaatcaccggactgttcggtggtgcaccggactgtccggtgagccattcacaggcgaagtcgtcgctctcgggaagcaattaacggcgtacggctataattcaccggactatccggtgaggcaccggactgtccggtgagccaacggtcggccggaccaacggtcggccgcgtaatccgcgcgcgacgcgtggccgagccaacggtcagaagggggcaccggactgtccggtgtgcaccggactgtccggtgtgcacaggacagtgtccggtgcgccaatggctctggatcttcaacggtcggctgcgccacagaaggaaagaaatctgcaccggacagtgtccggtgcgccaggcgacaga

SEQ ID NO: 84812 - DNA, 6281 bp, Zea Mays
cccggataggtggaaaactggaaatgtgatggaagaagaatgatggatcagtgtgtcgtgtactcgtgtgcaagccgtaagttttggtttgtggtaggtgtaggccctgggccaaggaaggaaccgggcacccgccactcctttgaccgccatggccgcgtcgccgtcacgacgactgacgccatgtgccaccgcctttgtcgcccctgtataaaagtccgcacatgtcagtcacgggcctctgccgctgcagcgatggcagcaacaccggcctgggactgggaggaatcgcttgtattcttcctgcagccgttcttcctccacggcgtgagcgccgcggcccaccttatcctggcgctcgccgtcgcgggacgcttgctctttcgccgcctctccgccagccggaccaaggacggggaggtgggcggaggagatgctagccgcggcgttggccggtttcggtactggtacggggtctctgtctgcaccacgtgggctatgggtgcgttcgaggtcctcctcgccgtctactcatggtacgcgaacggcggcgccgggtggtcgcgcgacgcggtcgttgaacaggtggacgcggccgcgcgcgcggtgtcgtggctgctgctcgccgcgtacctgcagttcgatttctggtggcgtcggcagcgccaggagcggttccccgtggcgctcaggctttggttggcgctcttcatgctgctctccgtagtcaccgtcggcgttcacgcggcgatgatcctcgacgggtcccttgtgcccggtcgatcgtgggcgctcgacgcagtctctgttactgcagcagcggttctactctcagtctcagctgggttcttcggaaggaaggagggagagggaggcggccatgcttccgaggcgcatgaacctctgctgaacggcgcgcacgaggggtccggtgacgacgacgagaacagcagcagcgccgccgacgcatccttgttcactggcgccggctttcttagcgtgctcaccttctcttggatgacgcccctgctcggcgtgggtcacaggaagaccctcgtcccggaggatgtcccgggcctcgaaccaggcgacagcgttgctggcgtcctcccgcccttcaaggccaaccttgaggcgctcaccggcgacggcggcaggtcgagccggaaggccgtcactgcgttcaagctcaccaaggccctgttgcgcaccctacggtggcacgtcgcggtgaccgcgttctacacgctggtctactgcgtcgccgtctacgtcgggccgtacctcatagactccctggtccagtacctgtacctcaacggcgacgagaggtacgcgagcaaggggcagctcctcgtactcgccttcgtcgtggccaaggtgctcgagtgcctgtcgcagcggcacttgttcttccggttgcagcaagcggggatacgagcgcggtcggcgctcgtcgcagtcctgtaccagaagagcctcgcgctttccagccagtcgaggcggagccacacgagcggagagatgatcaacatcgtcagcgtcgacgccgaccgcgtcggcatcttctcatggtacctgcacgaggtctggcaggtaccgctgcaagtagtcatggcgatgttcatcctgtactccaccctcggggtggcctcgctcgccgcgctcggtgccaccgtggccaccggcctcgccaccgtgcccctgggaagaatgcaggagcggttccaggagaagctgatggacagcaaggacgggaggatgaaggcgacgtcggagatcctgcacagcatgaggatcctgaagctgcaggggtgggagatgaggttcctgtccaagatcatcgagctgaggaagacagaggcgaactggctaaagagatacctctacacgtcggccaccatgaccttcatcttctggggcaccccaaccttcgtcgccgtggtgaccttcggagcctgcatgctcatggggatccccttggagacggggaagatgctgtcagcactggccacgttccgcgtgctggaggaacccatatacgaacttccgggcactatcgcgatggtgatcaagaccaaggtgtctcttgacaggatagcatcgttcctgtgcctcgacgagctacccagtgacgccgtgcagaggcttccacgtggaagctctgccgacttcgcagtcagcgtcggcaacgggtgcttctcatgggaagcctcgcctgatgctccaacactgaaggacctcaacttccaagctaggccaggcatgcgcgtcgcggtctgtgggacagttggctccggcaagtccagcctgctatcctgcattctcggcgagattccgaagttgtcgggagaggtccggacctgtgggacgacagcgtacgtcagccagtcggcgtggatacagagcggcaaaattcaggagaacatactgttcggtatggagatggacagagacaagtacgacagggtgctcgagtcgtgcgcgctcaagaaagacttggagaacctgccgtttggcgaccagacagtcatcggcgagcgaggcatcaacctcagtggaggccagaagcagaggatccagatagcacgcgctctgtatcaggacgccgacgtctatctgttcgacgatccgttcagcgcagtcgatgcgcatacaggatcccacattttcaaggaatgcttgcttgcggatttggcttcaaaaacagtggtttatgttactcatcagattgaattcctacctgccgccgatctcatccttgtcatgaaagatgggaggatagcacaggcaggaagatacgacgaaatactgggttcaggcgaagagttcatggagctggtgggtgcccacgaggagtctctaacagcactggatgtggtcgatgccatgaacgagaacgaagccaacgtgtcatcctctcccagcagcaggatagagacgccgaacctgtccagatccctgtcgttagctgagaagaaacatggcgccaccaacgaggctgaaggggacgacgacgatgctcggagcgggcagctggtgcaggaggaagaaagggagaaaggcagggtggggttctgggtctactgggagtacctcacgcaagcctacaagggcgccctcgtgccgttggtgttgctggcgcagacgctctttcagatcatgcagattgccagtaactactggatggcttgggctactccggcgtcgaaggatgccgagcctccggtgagcgcgcccacgctgctcttcgtctacgtcgtgctggctctcggaagctcgctgtgcatcctcgtaagatcgctgctccttgcgacggctgcgtacaagacagcgactctgctgttcaacaagatgcacctgtccatattcagagctcccatgtctttcttcgattccactcccagcgggcgcatcttgaacagggcttcaactgatcaaagcgaggtggacaccaacatcgctgaccagatgggcaccgttgcattctccatcatccagctcgtcggaattactgcggtgatgtctcaggtcgcatggcaggtctttgtggttttcgtccctgtatttgctgcatgtgtctggtaccagcggtactacattgacacggcaagggagctgcaaaggctagtaggagtgtgcagagctccaatcatacagcacttcgcagagtcgatagcggggtcgagcaccatcagaagtttcggcaaggaagaccagttcgtgtcgactaacagccgtctaacagatgcctactcccggcccaagttctacaacgccggagcgagggagtggctttgctttcgcttggacgtgctgtcctctcttgcgttcgccttctccctgatctttctgatcaacctaccggccggtctcatcgatccaggcattgctggccttgcgatcacgtacgggcttactctgaacacgctgcaagcacaggttgtctggagcatgtgcactttggagaacaagatcatatcagtagagagaatcctacagtacatgggcgttcctgcagagcccccgcttgtcatgccagaaaacaagttggctcagagctggccatcgaatggagaaatccagcttcagaatctccatgtgaaatatgcgccgcagctgccgttcgttctgaagggccttacggtcgcttttccgggcggcgtgaagactggcattgtcggaagaacagggagcgggaaatcaaccctaatccagtccctcttccgcatcgtcgaccctgctgtcggccagatagtgatagacggcatcgacatccgcacggttgggctgcatgatctgaggtccaggctgagcatcattccacaggagccgacgatgttcgaaggaactgtcaggagcaaccttgaccctcttggggagtactccgacgatcagatctgggaggctttggattgctgtcagctaggggacgaagtcaggaagcaggagctgaagctcgactcaccagtggtagagaacggtgagaactggagcgtgggccagcgccagctcgtgtgccttggcagggtgatcctgaaacggagcaaggttcttgttctggacgaagccactgcctcggtggacactgcaaccgacggcttgatccagagaacgctgaggcggcagttcaaggagaccaccgtcatcacgatagcgcacaggatcacgtcggttcttgacagccacatggtgctgctccttgacaacggcgtggccgtcgagcacgacaggccggacaagttgctggaggacaagtcgtctctgttctcaaagctcgtagcagaatacaccatgcggtcggtgcttacatagcagaccacagaccagcatacaagagacgactgaagatggggtcataaatatatgatgacaccttttaagttttactagaaaccaaaaaggtctcgcgaaaggccttggacccattattacgcaatgtcatctcttcgtgggccaggggaggaatgtctgacaaaatggatcgacatgagatcggatcaactcaagctcgtgcgactcactaaattcaaacgttatccacagcagtgatacgattctcccgcgtagcgccctcaaacgtcggaactgaatgatgataagtcggcaggattatagaaagataagctcagtcggttcactattacttaggcgcacattgttatcatatccacatgtaacaccccacggtcaaatatataaggcttagggggcaccccatcaaacaactcactcattagccgtctacccagctctctagcatccctcgtactagagaactcccctctaaccaaccacataaaagatccacaccaggaagtagggtgttacgcctctctaagcggcccgaacctgtataaaattatccactatctctcgtgcatctagcacgaaccatcgagctacaatcggtaacaccgtcctactccaaaaagcacctcgagccctcgtggggcaacctcaggtgtgcggtcggacccaaaacaccgacagatggagagatagaatgtcagccattcagatctgaaatcaccaaaaacaagtgacaaaaccaacatacgtggaatgaacatgctatagactctgacctgcccccagttgaaagggaaatgtgccattgggacatttccaagtattttggtgattgagtgccaacacaagtgcttaagtgctaatctatgccaattgatggacaaagtgcaaatcaagaggaaaggtatgtttctaagacttagtacattgttttggagactaatgtattgtgtctaagtgctagaaacagggaaagaccaatttggaaaagacttggctaagcagccaagactctgcgcagtctgggtgcaccggacagtgtccggtacgccaggctgcgactgtcgactggctgctctcgggaagcgatcaacggcgtacggctataaatcaccggactgttcggtggtgcaccggactgtccggtgagccattcacaggcgaagtcgtcgctctcgggaagcaattaacggcgtacggctataattcaccggactatccggtgaggcaccggactgtccggtgagccaacggtcggccggaccaacggtcggccgcgtaatccgcgcgcgacgcgtggccgagccaacggtcagaagggggcaccggactgtccggtgtgcaccggactgtccggtgtgcacaggacagtgtccggtgcgccaatggctctggatcttcaacggtcggctgcgccacagaaggaaagaaatctgcaccggacagtgtccggtgcgccaggcgacaga

SEQ ID NO: 84813 - DNA, 1425 bp, Zea Mays
gtcgtataggccgaagtattcagggtttagttgtgcgcgcggcgtgttcgatgaaacacgtggtacgaatcgcccaatgatgcgatctttgtgtgcacgggaggattgcgtgctgcaatcaactgagcatcagcacctacagacctaccctgtgaagcttgtggtttgagatgtgcagtttcagtactggagacaaacccatggagagaagattccaagccagtctatgtgctagccacaagcgataaccacctatggacaatgaaaactcgcaggagccgcaatgaagtcgaaagggaacttggaaagcttttctcaaacggagggggttctggagttggaactaaatcgaagtactctggcaccaagtttaacatggttgtcgaagatatcagagatggagtactggtatttgaggatgaggatgatgctgtaaaatactgcaaccttctgcagggcggcggccaagggtgcgagggaattgcggagatagaagcatcatcagttttcagcatgtgccgtaaaatgaaagcccttgctgttcttttccgccgtggaaagactcctccattgcctcaaagcctcgagcgcgacttgagggcgagaaagaggtcactggaggactagtgctgtctgtttacgctgcatagaagtgttaattgtactcatctagctgttggaagcatgggccctaggccttgtatacatcatagtagtacatagcagtccctagctgaactggaaccgagcctgacagaaaacacagacataattgctcgagaccagaaatctctttgaaattggatggatgttcttgtaattatgagcaacatgtttacaatgaataaaatgcgatacatcaagttattgtcattatttgattgatgtcttccaactggtgaatgaacagtacatacagacataattgctccagaaatctctttgagattggatggatgctctttaattatgagcaacgtttttacaatgaataagatgcgaatacatcaagttaatatcattatttgatgtcatccaacttatgaatgaataaatagtgcaagaggttgacgaccctgcttgacgacaaggcgagtctgaagaaattcctagtcatggctacttgttgatgatacatcgatacaggccgggatgtgattgtgaaatgtgtctcagaattcagggcgatgagcgcctctctgttagcttctccctcctgtacttgttgaaatctgctgcaagtcctgtgtccatgtcctgcttcatctgctccgccatctgcctcagcacctgcgcatcgttcaccacaaacgaaagcatgcctgtcaatccggtaatggtttctctgcaagagcaggctgcaggtgaggagacgaattcattgaagcaccgaccgtctcgccgacgcctctgatgatgctcgcc

SEQ ID NO: 84814 - DNA, 2409 bp, Zea Mays
gtaaaagttgtctaattgccaaacagaaaagagagaaaaaacataggggtcccggtgacctaactctgcctccgggccatcgccggagttgcgccgccgccctagtctacagtgctaccaccacctagataggctacctgcaggttgtggcgtcggatgcttcaccgtgcactcgaaccctacgagagtcttggaagttgcaactcgcgcgacggtagcgaggggaagcgaagtcagcagacggcaacagagtccagacgagggaggggaaggcggcttccggctccagccgagaacccaaaaggagatccggaaaacgacacgagcactgcctgcctgcgcaccgcctccagttggcacttggcagccgcctataaatcccaccgcgggccggatccccatcgtcctgcccccgtgccctcgccgatcagcgatcaacaaaccactcctttcctctcctctcgtcatggtgttccggacttcccgttgcctcgaaatccacagctgtagctgacagaaggcattcttgggagtactagcgacttaccgagccgagcaagcgctagctctccatgtccatggccgatgcaaaggacgacgcggcaatggcggaggcccagcccctgggacggtggccggtgctgtcctacggcgtcggccacatgctgaacgacatcacgtcggcatgctggttcacgtacctgctcctcttcttgcagcagatcggccttgctcccagggccgccgccgttgtgatgctctcgggccaggtcgcggacgggctgatgacgatcctcgcaggcgagatgatcgacaggtttggccgcttcaagctatggcacatcggagggtcggtcctcgtcggcttctccttctcctcggtctttggtggctgcctgctgtgcaccatcctggggacggactcgtacctcgtgaggaccgtgggctacagcttcttcgcggcggtgttcaacgttggctgggcggccacacaggtctcccacatctctgctggctgatgcattttctctctcttaacgttaaggtccatggtgaactgcatgacactgaatccgacaagccgtgtagccttagcaagctgcagaaacgcatccactatggtcgcaaatcttggtttgtatgggattgcgttaggtgtctttggcgctataaaggcgaaagaatactcagacattgttactcagtaccgatggatcgcgtacctgtccattttcatcggatgctgcttcctggtggtctttcatgctggaaccaaggagcctactttgaagtctgaacctagctgtaagaaggcggctcggatttcctgggggtactggttcaagaagaccctgtactaccaagttgctctcctttatatgcttgcgaggctgatcacaaacgtatctcagtcgctcatcgctttctacgtcaccagagatttgagaatgaatgagtactcgaaagcaataataccagccatcatattctgctgcagcttcttcgtgtccatcgtactgcaggagatcaagtggaccagccggcgcctcaagtccctcctcaccgtcggcgccacgctatgggtcatctccggcgtggccgtcttcgtcctcccgagccagatgaacagcctgatgtaccctctcgccatggtcatcggcgccgccaacgcgctcgtcatggtcacgacgatcgggctggagggcgcgttggtaggggaggaccttaacggctgcgccttcgtctacggctccctcagcttcctggacaagatctcctgcggaatcgcgctgttcgcgctggaatcgtacgaagacacgatggtgagctacggcgagacgaggggcctcaacacggtgagcaggtacgggacgggcctgatcccctcctgcttcgccgtactctccctggtggtcacctccacgctgaggctgcaggacgacaccccgagagccgctgcactggatgccccgctgcttgtctgattgtgaccgaagaaaaaaaaaaccggtggtgtgatattgtcgctcgctcgggttggaagagagaagaaatgtgcagcctcttcaattaggtttgaggggggatacgtcgcctgctttcaattagttttgaaacgggccactttgtaataaaattttccattccattccgtggcgttggcatcatggcatataaacagattcatagtcttggtgttaaaaatgtatgagaacaggttgctataagtaacttttaagggctctttggaacaaagcaaatacgaaggattcctcccctataagaaaaatgactgtgtgagcctttggaacacatgattcaatcatatcgaatcctttgaaattcgtatggattgctttcctccatacaaattttagaggaaaataacaagaggtccaactttttgga

SEQ ID NO: 84815 - DNA, 3303 bp, Zea Mays
ctagctgggacttctttggcgcgttaaaacctgccttcttggcagcccagctcgcagtcgcagtcgcaggtcactcactagctagcttgggccctcgtcatctcgttccgcccaggtgaaagtttggcgcgcatgcacgttagcaggcaggaagtagcagcttcgtcttaacacccacccacctactactaccctgctgcaaaccgcaaccgcgcccgcgcgggagagcttaccctcgcgcaccaccaagcccgcacctgcatttctttgcggccgcgcgcgcgcgggccaatggggagttcctgcgtgaacctctcccgcgccgtcctccccggcttcggcgccgccgagggatcccgccgccgccgtggcctccttctcccgctgctgtcgtcgtcgtcgaggcgcctgcacggcggcggcgccgtggcgtgctgctcgtcgtcgtcctccgctactgctgccggctcatcgaggccgccgccaccgctgccgtccttcgtcgacccggcgcacggggatccgcctggagctgccggcggcgggatcggtgtcgccgagtttctcggcgccaagaacttcctcatcaccggcgggaccggtttcctggcaaaagttcttatcgagaagattttgaggacaaaccctgacgtcggcaaggtgtacgtgctcatcaaggccaaggacagcgaagcagcgttggcgagattgcgaaacgaggacatccacggggaaggctacgacggcttcatcgcaaggaagctggtccccgtcgtcggcgacgtcagggaagccaacgtcggcatcgcgcccgacctcgccgacgagatcgccgaccaggtggacgtcatcatcaactcagcggccaacaccacgttcgacgagcggtacgacgtcgccatggacatcaacaccgtggggccgttccggatcatgagcttcgcgcagcgcttccgacgcctcaagctcttcttgcaagtgtctacagcctacgtgaatggacagaggcaaggcctggtgctggagaagccgtttcgcatgggagacaccatagccaaggagctgccggggtggtcttcttctccagggcacaagatacccgtgctggacatcgaggcagagatcaagctggccttctactccacaagacaccgccccgatgattctccctcgtttgctcaagaaatgaaagatttgggcctagagagggcaaaactccatgggtggcaagacacctatgtgttcaccaaggccatgggggagatggtcatcaactccatgcgaggagagataccggtggtcaccatcaggcccagcgtcatcgagagcacctggagggacccattcccgggctggatggaagggaacaggatgatggatcctgtggtcctctattacgggaaaggccagctgacggggttcctcgcagatccagatggtgttcttgatgtggtcccggcggacatggtggtgaacgcgacgctggcgtcgatggcgaagcacggcggcggcgcggcggggcccgggatgcacgtgtaccacgtgtcgtcgtcgacggtgaaccctctggtgttcggcgacctgagccggttcctgttccagcacttcacgcggtgcccctacagcgacgcggcggggcagcccatcctggtgccgcccatgcgcctcttcgacaccatggagcagttcgccagctacgtggagacggacgcgctgctgcgcagcgcccggtcgacctcgtcctcgtcgtcgctggcgcagcgggcgcgcgacctgtgcgccaggtccgtggagcagaccgtccacctgggcagcatctaccggccctacaccttctacggcggccgcttcgacaacgccaacacggaggcgctgctcgcggccatgtcgccggcggagagggcgcggttccacttcgacgtgcggggcgtggactgggcggactacatcaccaacgtccacatccctggactccggaagcacgtcatgaagggcaggggcgtcgccgccaaccagctgctcgccagcacctccgtgtgaccgcccggcatgcgcgacggcgggcgtgtacactatctgccaggcccagaccgttgctgctgctacatgccattgccatgccgccgtcacaccacacggccggtgaccgacgaccaatcttgccgtacgttccatcctcatactactgctacgtacgtagcagcaacctaaggttgcgcttgcattgcactaaagatagatataccatgctgttcatctctcctccatgttgagctgttgattcttgcgcttgtacttcaaaacaaaatgaactctgtgatggtcgtcagtaacaaatctgacgaaacatcgtggctgtctgatagtgtcattcccgacactgtaagccgttcttttaccaaaatttactttactgatggaaggagttcaacagttccttgcaattgatgaatggtgatacagattagcacacgcctatttgtagtacaagcttacgctacacaggtgcaaatggtactccggtctttttggccagttccacgactctgtaaaaactgcataaaacagagggcggccagagttgtaggtggatggccgcccttctctgtcgcctgaaaagggtgaaactctgggcatagtgcttcggcattcccctgttatttctgtctggcccttgatccagcagacgttgacatcgattatcacgacacaggctgggaaacggtaacatcgacagctcaaaggaaataatccggtgttcttcgcgtcacatctggctcacctctcctaggggctggttcaaactatgataataggtagacaaaattggtaaatcatatgcaataggcgtgtactaagaagtctgttttggggaccgaaaaaaacatctggatgtctttttaagaaaaaaacatatagatagtaaattcatatcagggtcatgccacaaaaatgagccaactaaaatggggaagtagcagaatgatgtggccacattacctggatgaatgtgtggctgttgcagtcgtcaacttccaaaatggatgccatattgccgcatcgatagcagtaatttggagcactgaatatggtgacaaccttttgctcctgtaaatacatgcatcgtgcatgatcagaaagattgcttcactcaaagctcagctccataagcgtctaaaagtcaaatcggcttacatgagcccagttatatccctccataactaattgatgagcccgagctacgagtttgagattgtttgtgtgattaaactgctctgatatgtcctggagaaacaaaggaac

SEQ ID NO: 84816 - DNA, 3832 bp, Zea Mays
aactgagaactccaaggggacaattgagaaatttgcccgctcaccctcccgaccgacgacaccgggagaacccaaccactgggcctccctcctgcacctgcagcctcgccgcgacacgctccccagagatctcccccgcccgacttgtcagatccagcaatccgcatcaccgccgccgtgatctccctcttagatcccggagatggcggggacggaggccttcgaggcctacttccgccgcgcggatttggaccaggacggccgcatcagcggccaggaggccgttgctttcttccagggcgccaacctgccgcagcaagtcctcgcccaggtatggatgcacgccgatcggaacaagactggcttcctcggccgcccggaattcttcaacgcgctgcgcctggtcaccgtggcgcagagcgggcgtcagctcacgcccgacatagttcagtcggcgctgtatggtcccgccgctgctcgaattccagctcccaagatagccgcaggggcggttcctccacaaatgggtgctgcgggggcgcctaggcctcaggggagtgctgcgatgacgcccacaccagggcaggttggggcggctcagatgaatccggctgccacaccaaggccccagggaagcggtatggtgccgacatctacccaagtaagcgtgccgcaggtgaaccctggtgctgctccaaggccccaagggatcaattctacgatgccagctgcgagtcagggtggtgctctacaagcaactcagtttgctggaccaagggttatgcagccacagccttctaacttgggaattacgcaacagcagccttctagtaccggtttcatgcatccgccacaggttggagctccagcagcttcattacaagctcaagcacctggaatcaatcaaggtttggtcagtggaggcagcatgggaggatctgtcggttggcaaggttggcaaggcggtaatgctgcctcagtgggaggcattccacaagctataccaggagctgctccttcacaggcagcacaaggtggatttggcccaggtttacctagaacaataggtgtggcgctggtacaacaggtacaagcaatgtctccatcgccattgcctccgcagagcaacagtgccggtttgcctcaggattcaaaagctttggtaatgtctggaaatggccctgccatcagttctggatcaagcacagacatcttctctgcacttacacagcagaagccaagcatatctgcacctgcacctcagacaagctcgattccgagctcatccagttttatgcccacgccaactggctcccagaacctgactaatctcacacagtttggttctttgcaaggtagcagccaacgtcaacagactcagcctgttgtaaagcccagtcctgctccagctgcacctgttgtctctgctgggatttctaatccatctccccaatggccaaaaattactcagtctgacatccagaagtacatgaaagtctttggcgatgttgacagggatagagatggcaaaataactggcgcagaagctcgcactctgttcctcagttggaggcttccaagagaggtcctgaagcaagtatgggatttgtctgaccaagacaatgatggcatgctttctttgagagagttttgcgttgctctttatttaatggagaggcaccgagctggaactcctctgcccccagcacttcctgactctcttaggcatgatgagacactgttacgagctacaggcttgccttcaacagcatacaatgggccatcatggcaacagaatcaaggaggattatcacaaagaggccctggagcacctggggtgcctgctggtggtgtgcggccacccttgccaccacatttgcattcacaaactgatggggctagcagaccagggcagccaagatcttacatgtctgggatggataatcatgtggtagttcaaggaaacaaagatgacaaaagtggagtgaaccagtctgtgcaggaggtggcggatcctaagaaggttgaggtggagaagcaggtcctggattccagagagaagctggagtattaccgcacaaagatgcaagatcttgttctgtataaaagtcggtgcgacaataggctgaatgagattacagaaagggcgtcctctgataaacgcgaggtggaatcattggccaagaaatatgaagagaagtacaagcaagtagctgagttagcttccaaactagcagttgaagaagctgcatatcgcgatgttcaggagagaaaagttgagctgaatgatgcactgattaaaatggttcaaggtggaagtgttgatggttcgagctgatcgaatccaatatcaattagaagagatggaaaaagctcttagtgaacggtgcaaacactttggacttcaattcaaatcatccgcatcagttgaacttccttccggttgggaacctgggccacaagagggactcattgagtgggatgaagactgggataaatttgaagacgaagggtttagtattgttaaggataatggtacaatacaggaaaacccaatttctgctgaaaatggaaaagtgccatctctttgggatgatggtgatgatatgtctcctgttgcatcctctaatggtcatatcaaggaagaaaggcgttacagtgtaggtgatcaagtggctgagagtgaaatagcatatgattttggtgatgaatctgtgaggagtcctggaagtgctggaagaagtgcctcagggagtccatttaaatcttcccgctttgggatgcatgattcatctcccagtaaaagggaaagttacagtgaccatggcggttctgaatctgtttttggtgacaagtttggtgatgaaacttcctggaactttgatgatcaagatactgactctgtttggggttctactgcactgaacgctgaggcggaccaacacggtggcagtggcacacataactctttctttgggtccgaggcaggctctccaagtggcgctagtgtatttggaaagaagaggagttcgttctttgatgattctgtcccaagtacccctgcatacacatctgggttctctccaaaattcggtgaaagccgtgatgatagctcctcttatagctttgggaagtttgattccttcagatcccaagacactgggttcttcccccaggaaagtggtttctccaggtttgactccattagcagctccaaaggcgaggatgtatcaggattcgatacagggaatagctcaagaaattttggtcggtttgactctttcgatgacaccgatccgttcggttcgagcggaccttttaaagcatctggaagccggtctccacccaagttctgatacgttttctgctctgagtagggatttttgtgtcttgcgtcctgctgatttgtcaatacaaggttcagattctttgagcgaactctagcgtaacatgaatatttctcctttgctcgacatttcttccgtttgccttgtgtgcaatttttccaggccatctcacgtacaaagtggacaggtttgggttatatctttgtatttgtataaacatttttctgtatcttgtaaattacaccaagtctgtctttgtttatattagtttatacgtacgaaatcacttctcctcaacctcttatttcattcattgtatttacgttgctatggtatagcaggaaatataatattgcacttgcgtgtacacccaagtgttggttaggacgaagtttcggcatcgtgtcgtactctcgtttaccagaccttgtttgtactcctcccgctatgttagaacaccaatgtttcttctgccgtaacccgat

SEQ ID NO: 84817 - DNA, 3548 bp, Zea Mays
aactgagaactccaaggggacaattgagaaatttgcccgctcaccctcccgaccgacgacaccgggagaacccaaccactgggcctccctcctgcacctgcagcctcgccgcgacacgctccccagagatctcccccgcccgacttgtcagatccagcaatccgcatcaccgccgccgtgatctccctcttagatcccggagatggcggggacggaggccttcgaggcctacttccgccgcgcggatttggaccaggacggccgcatcagcggccaggaggccgttgctttcttccagggcgccaacctgccgcagcaagtcctcgcccaggtatggatgcacgccgatcggaacaagactggcttcctcggccgcccggaattcttcaacgcgctgcgcctggtcaccgtggcgcagagcgggcgtcagctcacgcccgacatagttcagtcggcgctgtatggtcccgccgctgctcgaattccagctcccaagatagccgcaggggcggttcctccacaaatgggtgctgcgggggcgcctaggcctcaggggagtgctgcgatgacgcccacaccagggcaggttggggcggctcagatgaatccggctgccacaccaaggccccagggaagcggtatggtgccgacatctacccaagtaagcgtgccgcaggtgaaccctggtgctgctccaaggccccaagggatcaattctacgatgccagctgcgagtcagggtggtgctctacaagcaactcagtttgctggaccaagggttatgcagccacagccttctaacttgggaattacgcaacagcagccttctagtaccggtttcatgcatccgccacaggttggagctccagcagcttcattacaagctcaagcacctggaatcaatcaagcacagacatcttctctgcacttacacagcagaagccaagcatatctgcacctgcacctcagacaagctcgattccgagctcatccagttttatgcccacgccaactggctcccagaacctgactaatctcacacagtttggttctttgcaaggtagcagccaacgtcaacagactcagcctgttgtaaagcccagtcctgctccagctgcacctgttgtctctgctgggatttctaatccatctccccaatggccaaaaattactcagtctgacatccagaagtacatgaaagtctttggcgatgttgacagggatagagatggcaaaataactggcgcagaagctcgcactctgttcctcagttggaggcttccaagagaggtcctgaagcaagtatgggatttgtctgaccaagacaatgatggcatgctttctttgagagagttttgcgttgctctttatttaatggagaggcaccgagctggaactcctctgcccccagcacttcctgactctcttaggcatgatgagacactgttacgagctacaggcttgccttcaacagcatacaatgggccatcatggcaacagaatcaaggaggattatcacaaagaggccctggagcacctggggtgcctgctggtggtgtgcggccacccttgccaccacatttgcattcacaaactgatggggctagcagaccagggcagccaagatcttacatgtctgggatggataatcatgtggtagttcaaggaaacaaagatgacaaaagtggagtgaaccagtctgtgcaggaggtggcggatcctaagaaggttgaggtggagaagcaggtcctggattccagagagaagctggagtattaccgcacaaagatgcaagatcttgttctgtataaaagtcggtgcgacaataggctgaatgagattacagaaagggcgtcctctgataaacgcgaggtggaatcattggccaagaaatatgaagagaagtacaagcaagtagctgagttagcttccaaactagcagttgaagaagctgcatatcgcgatgttcaggagagaaaagttgagctgaatgatgcactgattaaaatggttcaaggtggaagtgttgatggtctgcttcaggttcgagctgatcgaatccaatatcaattagaagagatggaaaaagctcttagtgaacggtgcaaacactttggacttcaattcaaatcatccgcatcagttgaacttccttccggttgggaacctgggccacaagagggactcattgagtgggatgaagactgggataaatttgaagacgaagggtttagtattgttaaggataatggtacaatacaggaaaacccaatttctgctgaaaatggaaaagtgccatctctttgggatgatggtgatgatatgtctcctgttgcatcctctaatggtcatatcaaggaagaaaggcgttacagtgtaggtgatcaagtggctgagagtgaaatagcatatgattttggtgatgaatctgtgaggagtcctggaagtgctggaagaagtgcctcagggagtccatttaaatcttcccgctttgggatgcatgattcatctcccagtaaaagggaaagttacagtgaccatggcggttctgaatctgtttttggtgacaagtttggtgatgaaacttcctggaactttgatgatcaagatactgactctgtttggggttctactgcactgaacgctgaggcggaccaacacggtggcagtggcacacataactctttctttgggtccgaggcaggctctccaagtggcgctagtgtatttggaaagaagaggagttcgttctttgatgattctgtcccaagtacccctgcatacacatctgggttctctccaaaattcggtgaaagccgtgatgatagctcctcttatagctttgggaagtttgattccttcagatcccaagacactgggttcttcccccaggaaagtggtttctccaggtttgactccattagcagctccaaaggcgaggatgtatcaggattcgatacagggaatagctcaagaaattttggtcggtttgactctttcgatgacaccgatccgttcggttcgagcggaccttttaaagcatctggaagccggtctccacccaagttctgatacgttttctgctctgagtagggatttttgtgtcttgcgtcctgctgatttgtcaatacaaggttcagattctttgagcgaactctagcgtaacatgaatatttctcctttgctcgacatttcttccgtttgccttgtgtgcaatttttccaggccatctcacgtacaaagtggacaggtttgggttatatctttgtatttgtataaacatttttctgtatcttgtaaattacaccaagtctgtctttgtttatattagtttatacgtacgaaatcacttctcctcaacctcttatttcattcattgtatttacgttgctatggtatagcaggaaatataatattgcacttgcgtgtacacccaagtgttggttaggacgaagtttcggcatcgtgtcgtactctcgtttaccagaccttgtttgtactcctcccgctatgttagaacaccaatgtttcttctgccgtaacccgat

SEQ ID NO: 84818 - DNA, 2031 bp, Zea Mays
atcctcgcacacggcaggcacgtgaccgacacccccagcgcacgaactccaaaatagcgagccgaagggggccacgaccacgagtcctccacctccctctccgccgcgtcgcacgcgcttgacgcgcgccgagagccgaatcggagccacgaggcagccgccccgggcggatcgatcctagggccagggcatgggcggaggggacgccgacgccggcggcgagcccgcggacgcgcaggccacgctccacatccggtgcaccaacggctccaagttcaccgtgcggaccgacctgggcgccaccgtcggggcgtttaaggcgatcgtcgcccacagctgcgacgtgccggcgccgcagcagcggctgatctacaagggccggatcttgaaggacgagcaaaccctagccagctacggtgtggagacagaccatacaatccacatggtacgtggtgctgtgctatcaccaacatctactgcacctgcagccaaccaagaacctaccactgctgctcctgccagttccccggcaacaggattgggtggcttgttgcaaagtctgggtactacaggcgctgctgctaacagtgaggggttgtttggatctgccccccctggattagaccaaatgcagcaacagctagctgaaaatccgaacttgatgagggaaatgatgaatatgccactcatgcagaatttgatgaacaatcctgaactcatacgcagtataataatgaacaatcctcaaatgcgcgagctcattgaccgcaatccggatcttgctcatgtcctcaatgatccaagcattatgcgccagacttttgaagcagttcggaatcctgaactcatgagggagatgatgcggaacacagacagagccatgagcaacatcgagtcttctccagaaggattcaacatgctccgtcgcatgtatgaaactgtccaagagccttttctgaatgcaacaacaatgggtagcgagggtgatcgaaattcgaatccattctctgctcttctaggaaatcaggggtctaaccaagcaagagactcagctgcaaatggaacaactagagcttcagaccccacatcagggtctccagctccaaatactaatccacttccgaatccttggggctcaaatgctggctctgcccaaggagcagcaaggtcctctcctgctagcaatgttaggagtactacagcaagtggcctaggagggttgggttcagcagatttgggaagtacgcatggtgccagtggtggtggctctgatgctaccttgttgactcaagttttgcaaaacccaactatgatgcagatgatgcagaacattatgtctaatcctcagtccatgaatcagctgcttaatatgaatccaaatgtacgtaacatgatggaatccaatactcaaatgagagaaatgattgagaatccagaatttcttcgccagttaacatctcctgaaacattgcagcaattaatttcgttccagcagtctttgatgtcacaacttggccaacaacaagctggacaggagcggacacaatcaggctctggtgcaggcaatgtcaacctcaacaccttgatgaacatgttcagcgggcttggtgctggtggtggcctaggtgttccaaatgctcctaatgcaccgccagaagaactgtacgccacacaattagctcagctccaagaaatgggtttctttgacacacaagagaacatccgagccttggccgctaccgctggaaatgttcatgctgcagtggagcgacttcttggaaatatgggctaatagaatatgatgatcataactgtactcagatattgtgatttttagttggcatttgtacatggacaatgtcgtattctgtacaagagggagagggaatatgtagtgcagaccatgagaactaaaaaaactgtatttcgattgctcaagaaaatatatgagatgcatccataactcagagatgtattttgttgcaatagttgggattccttcattttttaaaaaaaatcattgattttttt

SEQ ID NO: 84819 - DNA, 2144 bp, Zea Mays
atcctcgcacacggcaggcacgtgaccgacacccccagcgcacgaactccaaaatagcgagccgaagggggccacgaccacgagtcctccacctccctctccgccgcgtcgcacgcgcttgacgcgcgccgagagccgaatcggagccacgaggcagccgccccgggcggatcgatcctagggccagggcatgggcggaggggacgccgacgccggcggcgagcccgcggacgcgcaggccacgctccacatccggtgcaccaacggctccaagttcaccgtgcggaccgacctgggcgccaccgtcggggcgtttaaggcgatcgtcgcccacagctgcgacgtgccggcgccgcagcagcggctgatctacaagggccggatcttgaaggacgagcaaaccctagccagctacggtgtggagacagaccatacaatccacatggtacgtggtgctgtgctatcaccaacatctactgcacctgcagccaaccaagaacctaccactgctgctcctgccagttccccggcaacaggattgggtggcttgttgcaaagtctgggtactacaggcgctgctgctaacagtgaggggttgtttggatctgccccccctggattagaccaaatgcagcaacagctagctgaaaatccgaacttgatgagggaaatgatgaatatgccactcatgcagaatttgatgaacaatcctgaactcatacgcagtataataatgaacaatcctcaaatgcgcgagctcattgaccgcaatccggatcttgctcatgtcctcaatgatccaagcattatgcgccagacttttgaagcagttcggaatcctgaactcatgagggagatgatgcggaacacagacagagccatgagcaacatcgagtcttctccagaaggattcaacatgctccgtcgcatgtatgaaactgtccaagagccttttctgaatgcaacaacaatgggtagcgagggtgatcgaaattcgaatccattctctgctcttctaggaaatcaggggtctaaccaagcaagagactcagctgcaaatggaacaactagagcttcagaccccacatcagggtctccagctccaaatactaatccacttccgaatccttggggctcaaatgctggctctgcccaaggagcagcaaggtcctctcctgctagcaatgttaggagtactacagcaagtggcctaggagggttgggttcagcagatttgggaagtacgcatggtgccagtggtggtggctctgatgctaccttgttgactcaagttttgcaaaacccaactatgatgcagatgatgcagaacattatgtctaatcctcagtccatgaatcagctgcttaatatgaatccaaatgtacgtaacatgatggaatccaatactcaaatgagagaaatgattgagaatccagaatttcttcgccagttaacatctcctgaaacattgcagcaattaatttcgttccagcagtctttgatgtcacaacttggccaacaacaagctggacaggagcggacacaatcaggctctggtgcaggcaatgtcaacctcaacaccttgatgaacatgttcagcgggcttggtgctggtggtggcctaggtgttccaaatgctcctaatgcaccgccagaagaactgtacgccacacaattagctcagctccaagaaatgggtttctttgacacacaagagaacatccgagccttggccgctaccgctggaaatgttcatgctgcagtggagcgacttcttggaaatatgggctaatagaatatgatgatcataactgtactcagatattgtgatttttagttggcattgtgagatcatgtctggctcattggttttacacccgagggtgagaggcggcgtctagattttgtgttcaaggatgaataaagagtgtaccgggggaacctttcatatacatatgtgtacatggacaatgtcgtattctgtacaagagggagagggaatatgtagtgcagaccatgagaactaaaaaaactgtatttcgattgctcaagaaaatatatgagatgcatccataactcagagatgtattttgttgcaatagttgggattccttcattttttaaaaaaaatcattgattttttt

SEQ ID NO: 84820 - DNA, 2388 bp, Zea Mays
atcctcgcacacggcaggcacgtgaccgacacccccagcgcacgaactccaaaatagcgagccgaagggggccacgaccacgagtcctccacctccctctccgccgcgtcgcacgcgcttgacgcgcgccgagagccgaatcggagccacgaggcagccgccccgggcggatcgatcctagggccagggcatgggcggaggggacgccgacgccggcggcgagcccgcggacgcgcaggccacgctccacatccggtgcaccaacggctccaagttcaccgtgcggaccgacctgggcgccaccgtcggggcgtttaaggcgatcgtcgcccacagctgcgacgtgccggcgccgcagcagcggctgatctacaagggccggatcttgaaggacgagcaaaccctagccagctacggtgtggagacagaccatacaatccacatggtacgtggtgctgtgctatcaccaacatctactgcacctgcagccaaccaagaacctaccactgctgctcctgccagttccccggcaacaggattgggtggcttgttgcaaagtctgggtactacaggcgctgctgctaacagtgaggggttgtttggatctgccccccctggattagaccaaatgcagcaacagctagctgaaaatccgaacttgatgagggaaatgatgaatatgccactcatgcagaatttgatgaacaatcctgaactcatacgcagtataataatgaacaatcctcaaatgcgcgagctcattgaccgcaatccggatcttgctcatgtcctcaatgatccaagcattatgcgccagacttttgaagcagttcggaatcctgaactcatgagggagatgatgcggaacacagacagagccatgagcaacatcgagtcttctccagaaggattcaacatgctccgtcgcatgtatgaaactgtccaagagccttttctgaatgcaacaacaatgggtagcgagggtgatcgaaattcgaatccattctctgctcttctaggaaatcaggggtctaaccaagcaagagactcagctgcaaatggaacaactagagcttcagaccccacatcagggtctccagctccaaatactaatccacttccgaatccttggggctcaaatgcaaggtcctctcctgctagcaatgttaggagtactacagcaagtggcctaggagggttgggttcagcagatttgggaagtacgcatggtgccagtggtggtggctctgatgctaccttgttgactcaagttttgcaaaacccaactatgatgcagatgatgcagaacattatgtctaatcctcagtccatgaatcagctgcttaatatgaatccaaatgtacgtaacatgatggaatccaatactcaaatgagagaaatgattgagaatccagaatttcttcgccagttaacatctcctgaaacattgcagcaattaatttcgttccagcagtctttgatgtcacaacttggccaacaacaagctggacaggagcggacacaatcaggctctggtgcaggcaatgtcaacctcaacaccttgatgaacatgttcagcgggcttggtgctggtggtggcctaggtgttccaaatgctcctaatgcaccgccagaagaactgtacgccacacaattagctcagctccaagaaatgggtttctttgacacacaagagaacatccgagccttggccgctaccgctggaaatgttcatgctgcagtggagcgacttcttggaaatatgggctaatagaatatgatgatcataactgtactcagatattgtgatttttagttggcattgtgagatcatgtctggctcattggttttacacccgagggtgagaggcggcgtctagattttgtgttcaaggatgaataaagagtgtaccgggggaacctttcatatacatatggtctggtgtcatggttaaggccccgtttcaatctcatgagataaactttagcttcctgctaaactttagctatatgaattaaagtgctaaagtttagtttcaattatcaccattagctctcctgtttagattataaatggctaaaagtagctaaaaattagctgctaaagtttatctcgcgagattggaacagggccttaattgttgttgttggtacatttggttgctgtacatacatattgatcttttgctatcttatttgcagtgtacatggacaatgtcgtattctgtacaagagggagagggaatatgtagtgcagaccatgagaactaaaaaaactgtatttcgattgctcaagaaaatatatgagatgcatccataactcagagatgtattttgttgcaatagttgggattccttcattttttaaaaaaaatcattgattttttt

SEQ ID NO: 84821 - DNA, 2205 bp, Zea Mays
cagcacgcaaggaatcacggccatccatcactgtcgcgcagttatcgtccgtctccccaccaacgtcattattcatccgtcccgtcccgtcccgtgtggcctgtccttgtgtggtgccgggtgcgttgccttcttcatcctcgcacacggcaggcacgtgaccgacacccccagcgcacgaactccaaaatagcgagccgaagggggccacgaccacgagtcctccacctccctctccgccgcgtcgcacgcgcttgacgcgcgccgagagccgaatcggagccacgaggcagccgccccgggcggatcgatcctagggccagggcatgggcggaggggacgccgacgccggcggcgagcccgcggacgcgcaggccacgctccacatccggtgcaccaacggctccaagttcaccgtgcggaccgacctgggcgccaccgtcggggcgtttaaggcgatcgtcgcccacagctgcgacgtgccggcgccgcagcagcggctgatctacaagggccggatcttgaaggacgagcaaaccctagccagctacggtgtggagacagaccatacaatccacatggtacgtggtgctgtgctatcaccaacatctactgcacctgcagccaaccaagaacctaccactgctgctcctgccagttccccggcaacaggattgggtggcttgttgcaaagtctgggtactacaggcgctgctgctaacagtgaggggttgtttggatctgccccccctggattagaccaaatgcagcaacagctagctgaaaatccgaacttgatgagggaaatgatgaatatgccactcatgcagaatttgatgaacaatcctgaactcatacgcagtataataatgaacaatcctcaaatgcgcgagctcattgaccgcaatccggatcttgctcatgtcctcaatgatccaagcattatgcgccagacttttgaagcagttcggaatcctgaactcatgagggagatgatgcggaacacagacagagccatgagcaacatcgagtcttctccagaaggattcaacatgctccgtcgcatgtatgaaactgtccaagagccttttctgaatgcaacaacaatgggtagcgagggtgatcgaaattcgaatccattctctgctcttctaggaaatcaggggtctaaccaagcaagagactcagctgcaaatggaacaactagagcttcagaccccacatcagggtctccagctccaaatactaatccacttccgaatccttggggctcaaatgctggctctgcccaaggagcagcaaggtcctctcctgctagcaatgttaggagtactacagcaagtggcctaggagggttgggttcagcagatttgggaagtacgcatggtgccagtggtggtggctctgatgctaccttgttgactcaagttttgcaaaacccaactatgatgcagatgatgcagaacattatgtctaatcctcagtccatgaatcagctgcttaatatgaatccaaatgtacgtaacatgatggaatccaatactcaaatgagagaaatgattgagaatccagaatttcttcgccagttaacatctcctgaaacattgcagcaattaatttcgttccagcagtctttgatgtcacaacttggccaacaacaagctggacaggagcggacacaatcaggctctggtgcaggcaatgtcaacctcaacaccttgatgaacatgttcagcgggcttggtgctggtggtggcctaggtgttccaaatgctcctaatgcaccgccagaagaactgtacgccacacaattagctcagctccaagaaatgggtttctttgacacacaagagaacatccgagccttggccgctaccgctggaaatgttcatgctgcagtggagcgacttcttggaaatatgggctaatagaatatgatgatcataactgtactcagatattgtgatttttagttggcattgtgagatcatgtctggctcattggttttacacccgaggtgtacatggacaatgtcgtattctgtacaagagggagagggaatatgtagtgcagaccatgagaactaaaaaaactgtatttcgattgctcaagaaaatatatgagatgcatccataactcagagatgtattttgttgcaatagttgggattccttcattttttaaaaaaaatcattgattttttt

SEQ ID NO: 84822 - DNA, 1702 bp, Zea Mays
tgccttcttcatcctcgcacacggcaggcacgtgaccgacacccccagcgcacgaactccaaaatagcgagccgaagggggccacgaccacgagtcctccacctccctctccgccgcgtcgcacgcgcttgacgcgcgccgagagccgaatcggagccacgaggcagccgccccgggcggatcgatcctagggccagggcatgggcggaggggacgccgacgccggcggcgagcccgcggacgcgcaggccacgctccacatccggtgcaccaacggctccaagttcaccgtgcggaccgacctgggcgccaccgtcggggcgtttaaggcgatcgtcgcccacagctgcgacgtgccggcgccgcagcagcggctgatctacaagggccggatcttgaaggacgagcaaaccctagccagctacggtgtggagacagaccatacaatccacatggtacgtggtgctgtgctatcaccaacatctactgcacctgcagccaaccaagaacctaccactgctgctcctgccagttccccggcaacaggattgggtggcttgttgcaaagtctgggtactacaggcgctgctgctaacagtgaggggttgtttggatctgccccccctggattagaccaaatgcagcaacagctagctgaaaatccgaacttgatgagggaaatgatgaatatgccactcatgcagaatttgatgaacaatcctgaactcatacgcagtataataatgaacaatcctcaaatgcgcgagctcattgaccgcaatccggatcttgctcatgtcctcaatgatccaagcattatgcgccagacttttgaagcagttcggaatcctgaactcatgagggagatgatgcggaacacagacagagccatgagcaacatcgagtcttctccagaaggattcaacatgctccgtcgcatgtatgaaactgtccaagagccttttctgaatgcaacaacaatgggtagcgagggtgatcgaaattcgaatccattctctgctcttctaggaaatcaggggtctaaccaagcaagagactcagctgcaaatggaacaactagagcttcagaccccacatcagggtctccagctccaaatactaatccacttccgaatccttggggctcaaatgctggctctgcccaaggagcagcaaggtcctctcctgctagcaatgttaggagtactacagcaagtggcctaggagggttgggttcagcagatttgggaagtacgcatggtgccagtggtggtggctctgatgctaccttgttgactcaagttttgcaaaacccaactatgatgcagatgatgcagaacattatgtctaatcctcagtccatgaatcagctgcttaatatgaatccaaatgtacgtaacatgatggaatccaatactcaaatgagagaaatgattgagaatccagaatttcttcgccagttaacatctcctgaaacattgcagcaattaatttcgttccagcagtctttgatgtcacaacttggccaacaacaagctggacaggagcggacacaatcaggctctggtgcaggcaatgtcaacctcaacaccttgatgaacatgttcagcgggcttggtgctggtggtggcctaggtgttccaaatgctcctaatgatgtttttttgaagttttctcatcaacaaagtaatgtcaaaatttg

SEQ ID NO: 84823 - DNA, 1647 bp, Zea Mays
acggcccaacgcacgtctttgcagttgcagaagtttcctagggttttcgaggcgtcgcagataagagatccctcccgcacctccgagccgccactcccaagacacagagcgtcagagcccgatcccgatccagcgaggcgcggtgcgtgcgctgtcccagaaggagcaggacatacagatgatgctcgccgccgacgtccaccttggcaccaagaactgcgatttccagatggagcgctatgcctttaagcgccgcaccgacggcatctacatcatcaaccttggcaagacatgggagaaactgcagcttgcagcgagggttatcgttgccatcgagaacccgcaggacatcatcgtccagtccgcccgcccctatggccagcgtgctgtcctcaagttcgctcagtacactggcgctcatgccatcgctgggaggcacacccctggtaccttcactaaccagctccagacctccttcagcgagcctcggctgctcatccttaccgacccaaggactgaccatcagccaattaaggagtctgctctggggaacatccccaccattgccttctgtgatactgactctcccatgcggtatgtcgatatcggcatcccagcgaacaacaaggggaggaacagcattggatgcctgttctggcttttggccaggatggttctgcagatgaggggcactatcctccctgggcacaagtgggaggtcatggtggatttgttcttctacagggacccagaggaagcaaaggagcaggaggaggaagctgctgttgcccctgagtttgccgcaatcactgattaccaaggagctgatcagtggggtggtgaccagtggacctctgatgtgactgcgccgcctgttgctcctactggtgctgattggggtgctgctccagctccggttcctaccggtgatggctgggatcaagctggggcccctgcacctgtggtggacggcactgtacctcctctggttgctcctactggttgggaccaagcagccccgccaccgactgcccaaggctgggagtaggcgttgtccactctgagacctgtcttctgcggctgaagttcagtatttttctgtggtctgaatgtccaaattccggtggcatcttctatagctatgctttgctttgctttgaacacttgtgttttagggctttctagctgaacccgttgtccaatattgctgacgttgaaatttttggttaatcttaaaactggaaatgatgcttgcggttctctgagaggtcctgatacctgatcattgctaggaatgaattgcagcgctgctactactgttttgactgagtgtgcccagctgctagcagttatggcagtgtgctatctgcatctgttcaaactagtgtcaaacctcacttttgtcgtgatgtgacagtgaagcgaaatagcaacttgtatcggttccaaatttctctgctattggatcactgttacaattgctccgactcttgcaaacctcattttggtctatgttggggcttgggagtgcttgatgatgtcctgatctcggaatggtggcatagaatacttgaatgtcgatcatactagtgggaatgtaaatttctatgatcaatgtactccatccaatccaaaaagattgccgta

SEQ ID NO: 84824 - DNA, 2672 bp, Zea Mays
accgccccacctcgctacgcacctccatctcccctatccccaccaacgccacgacgcagcaatcccatcaggccaccaccaccatgcccccgcctctcccgccagatccgatcgagccgtgcgcgccggcgccggcgatggacgtggcgttgccagcagccgtcgtcgccacaatcctctcccgcctcgacgtccgctccctcctcctcgccgccgccgcctgccgcggactccgtgcctgcgcctcccacgcgctcgtattcctcccctccttccacctcctcgaggtggctcttacgcacgaactgctgcgcccgctgctgccgccgaacccgagcctgcggagcctgcgcctcgactgcgctcgcctcgaggacgctgccatcgcctgcctcgcgcgcgccggcctgcacgagctcctcctcctcaactgcgacaacatcagcggccgcctgctctgcgaactgggcaccacctgcagagatctcagggtgctttctctcaactctcttggtgcacgtaggggactggtggtaaatttctctgatctacaggaattgctcaatggatgttctcagctagaggtaggtaaacaacttacatttggttagatttcattcactagtgtgcccacagtttggcacagtcatttggtttctttattacgtgaatcgaggaaagcatgctggtcaactcctagcgtttgtaattgtgcaattaataaactgaagtcaactgatatagaaagttgaaggccaggcctgtgcagttctcacttaggcaccaggccatggattcgaagcagcctctccatatatgtggggaagactttcggtttatcccatctccagagtccagaccccattcatgtgggagcctctgacatgggtttgaccaactgatatataaagtcgctgaatctgagattggcacttgatttctcaacttttgatgaccccaactttggtcgtgtatgggcatctgcttctgaaaggctatcatctcttgagattggttatattcctatgacaatgttacttgaacttctggtagcagttacagaaggacaacaatgcatggattatgttaagacaccagttttctttcctagccttcaaaagttatgcctggctgtggatttcataaccgaccatctaattggttccatatcagtcgcacttccatcactgacacatctggacctgcaagatgcaccaattgtagagcctaattcgtcatcagatctcaccaatgctggtcttcagcaaatcaatccgcatggtaaactgaagcatatttctctcatgcgcagccaggaattcttagtaacatctttccgccgggtgaatgatctcggaatcctgttgatggccgacaggtgttcaaatcttgaaagtgtatgtcttggtggcttctcccgtgttacagacactggttttagggcaatcattcactcctgttctggtcttcataagcttcgggtttcccatggaagccatctaactgatttggttttccatgacattatagccacttctctttgcctaacccatgtgagtctgaggtggtgcaaactcctaactaatgttgggattgagagattatcatgcaacaaggatctcaatgtactggatctcagggactgccgcagtttgggtgatgaagctgttagggctctgagctgccttcccaagttgcagactttgacattggatgccactgatattagcgaccaatcattgaaatatctaggacttggaacatgccctctaacttccttgtctctgaggggttgtcggaagcttacaaacgattgtatcaccttattatttgctggtcatgtgaaacagagcctacagatgttggatctctccagaattccaagtatcacggatgatggtatcatgttattagcaaggagcagaactcctcttattgagctcagaatgcgagaaaatccgaaaatcggggatgcctctgtgatggctcttgcttccatgcaaatagatggtggaacctacggtagtaccttgcagctgctggatctttttgactgtggtgggattacaccccttgcagcacgttggtttaagaaaccttacttccctagattgcggtggctgggaattacaggtagcttgaatagggttatggtggatgcactgtctcgaagccggccattcttacatatggcttgccgtggtgaagaattagggactatgctctgggacacctcctctgactggtatcggcataatgacgacgatctcgacgagcttgaacagtggctcttggaaggtgaaccggtttcagatgatgacaccatcatggaagaatgaggaaactgtttggtaagctggtgtcatgttcctgccatagttgcttgaccaaatacgatgtcaccaagctcgaattagctatgcgatgatctgttgtactagtagtgaagatattctcaatatatatgtatcattccttgggcagccattctgtgtgcatatggcaacctgacgttatgtatgtttgattcagatttttgttctggtccagttctcacgtgacattgacacattgaggagtcgtgctggccattccaagcataaagctagtgtgctgttttatgattttaacatattgatatttctactcatacttggcaaaattatttcaga

SEQ ID NO: 84825 - DNA, 2267 bp, Zea Mays
aaaaaaccgccttctctctctctctccctctcttcccccaccgccccacctcgctacgcacctccatctcccctatccccaccaacgccacgacgcagcaatcccatcaggccaccaccaccatgcccccgcctctcccgccagatccgatcgagccgtgcgcgccggcgccggcgatggacgtggcgttgccagcagccgtcgtcgccacaatcctctcccgcctcgacgtccgctccctcctcctcgccgccgccgcctgccgcggactccgtgcctgcgcctcccacgcgctcgtattcctcccctccttccacctcctcgaggtggctcttacgcacgaactgctgcgcccgctgctgccgccgaacccgagcctgcggagcctgcgcctcgactgcgctcgcctcgaggacgctgccatcgcctgcctcgcgcgcgccggcctgcacgagctcctcctcctcaactgcgacaacatcagcggccgcctgctctgcgaactgggcaccacctgcagagatctcagggtgctttctctcaactctcttggtgcacgtaggggactggtggtaaatttctctgatctacaggaattgctcaatggatgttctcagctagagaatctgagattggcacttgatttctcaacttttgatgaccccaactttggtcgtgtatgggcatctgcttctgaaaggctatcatctcttgagattggttatattcctatgacaatgttacttgaacttctggtagcagttacagaaggacaacaatgcatggattatgttaagacaccagttttctttcctagccttcaaaagttatgcctggctgtggatttcataaccgaccatctaattggttccatatcagtcgcacttccatcactgacacatctggacctgcaagatgcaccaattgtagagcctaattcgtcatcagatctcaccaatgctggtcttcagcaaatcaatccgcatggtaaactgaagcatatttctctcatgcgcagccaggaattcttagtaacatctttccgccgggtgaatgatctcggaatcctgttgatggccgacaggtgttcaaatcttgaaagtgtatgtcttggtggcttctcccgtgttacagacactggttttagggcaatcattcactcctgttctggtcttcataagcttcgggtttcccatggaagccatctaactgatttggttttccatgacattatagccacttctctttgcctaacccatgtgagtctgaggtggtgcaaactcctaactaatgttgggattgagagattatcatgcaacaaggatctcaatgtactggatctcagggactgccgcagtttgggtgatgaagctgttagggctctgagctgccttcccaagttgcagactttgacattggatgccactgatattagcgaccaatcattgaaatatctaggacttggaacatgccctctaacttccttgtctctgaggggttgtcggaagcttacaaacgattgtatcaccttattatttgctggtcatgtgaaacagagcctacagatgttggatctctccagaattccaagtatcacggatgatggtatcatgttattagcaaggagcagaactcctcttattgagctcagaatgcgagaaaatccgaaaatcggggatgcctctgtgatggctcttgcttccatgcaaatagatggtggaacctacggtagcttgaatagggttatggtggatgcactgtctcgaagccggccattcttacatatggcttgccgtggtgaagaattagggactatgctctgggacacctcctctgactggtatcggcataatgacgacgatctcgacgagcttgaacagtggctcttggaaggtgaaccggtttcagatgatgacaccatcatggaagaatgaggaaactgtttggtaagctggtgtcatgttcctgccatagttgcttgaccaaatacgatgtcaccaagctcgaattagctatgcgatgatctgttgtactagtagtgaagatattctcaatatatatgtatcattccttgggcagccattctgtgtgcatatggcaacctgacgttatgtatgtttgattcagatttttgttctggtccagttctcacgtgacattgacacattgaggagtcgtgctggccattccaagcataaagctagtgtgctgttttatgattttaacatattgatatttctactcatacttggcaaaattatttcaga

SEQ ID NO: 84826 - DNA, 2418 bp, Zea Mays
gaagcttccgcgaagcagcaacggctctgcctcctaaaaaaaccgccttctctctctctctccctctcttcccccaccgccccacctcgctacgcacctccatctcccctatccccaccaacgccacgacgcagcaatcccatcaggccaccaccaccatgcccccgcctctcccgccagatccgatcgagccgtgcgcgccggcgccggcgatggacgtggcgttgccagcagccgtcgtcgccacaatcctctcccgcctcgacgtccgctccctcctcctcgccgccgccgcctgccgcggactccgtgcctgcgcctcccacgcgctcgtattcctcccctccttccacctcctcgaggtggctcttacgcacgaactgctgcgcccgctgctgccgccgaacccgagcctgcggagcctgcgcctcgactgcgctcgcctcgaggacgctgccatcgcctgcctcgcgcgcgccggcctgcacgagctcctcctcctcaactgcgacaacatcagcggccgcctgctctgcgaactgggcaccacctgcagagatctcagggtgctttctctcaactctcttggtgcacgtaggggactggtggtaaatttctctgatctacaggaattgctcaatggatgttctcagctagaggtagaatctgagattggcacttgatttctcaacttttgatgaccccaactttggtcgtgtatgggcatctgcttctgaaaggctatcatctcttgagattggttatattcctatgacaatgttacttgaacttctggtagcagttacagaaggacaacaatgcatggattatgttaagacaccagttttctttcctagccttcaaaagttatgcctggctgtggatttcataaccgaccatctaattggttccatatcagtcgcacttccatcactgacacatctggacctgcaagatgcaccaattgtagagcctaattcgtcatcagatctcaccaatgctggtcttcagcaaatcaatccgcatggtaaactgaagcatatttctctcatgcgcagccaggaattcttagtaacatctttccgccgggtgaatgatctcggaatcctgttgatggccgacaggtgttcaaatcttgaaagtgtatgtcttggtggcttctcccgtgttacagacactggttttagggcaatcattcactcctgttctggtcttcataagcttcgggtttcccatggaagccatctaactgatttggttttccatgacattatagccacttctctttgcctaacccatgtgagtctgaggtggtgcaaactcctaactaatgttgggattgagagattatcatgcaacaaggatctcaatgtactggatctcagggactgccgcagtttgggtgatgaagctgttagggctctgagctgccttcccaagttgcagactttgacattggatgccactgatattagcgaccaatcattgaaatatctaggacttggaacatgccctctaacttccttgtctctgaggggttgtcggaagcttacaaacgattgtatcaccttattatttgctggtcatgtgaaacagagcctacagatgttggatctctccagaattccaagtatcacggatgatggtatcatgttattagcaaggagcagaactcctcttattgagctcagaatgcgagaaaatccgaaaatcggggatgcctctgtgatggctcttgcttccatgcaaatagatggtggaacctacggtagtaccttgcagctgctggatctttttgactgtggtgggattacaccccttgcagcacgttggtttaagaaaccttacttccctagattgcggtggctgggaattacaggtagcttgaatagggttatggtggatgcactgtctcgaagccggccattcttacatatggcttgccgtggtgaagaattagggactatgctctgggacacctcctctgactggtatcggcataatgacgacgatctcgacgagcttgaacagtggctcttggaaggtgaaccggtttcagatgatgacaccatcatggaagaatgaggaaactgtttggtaagctggtgtcatgttcctgccatagttgcttgaccaaatacgatgtcaccaagctcgaattagctatgcgatgatctgttgtactagtagtgaagatattctcaatatatatgtatcattccttgggcagccattctgtgtgcatatggcaacctgacgttatgtatgtttgattcagatttttgttctggtccagttctcacgtgacattgacacattgaggagtcgtgctggccattccaagcataaagctagtgtgctgttttatgattttaacatattgatatttctactcatacttggcaaaattatttcaga

SEQ ID NO: 84827 - DNA, 2784 bp, Zea Mays
cttcagttgataaattctaggtacctgtagaccttgttattgaccattcagtacaagtcgacgtggcaagatcagcaaatgctgctcaggcaaatatggagcttgagttctatcgtaacaaggaacggtttgggttcttgaaatgggggtcctctgcattccgcaacatgcttgttgttccacctggatctggcattgttcaccaggtattttgatgatatggttgttttttaaaataacttaatctagtcaaggttattttatctatcaaaaacttataatcctctatttcactttgttaggtgaatcttgaatatctggcaagggttgtgtttaataatggtgggatcctttaccctgacagcgtcgtaggcactgactcccacacaactatgatagatggtcttggagttgctgggtggggagttggtggtatagaggcggaagctgcaatgcttggccagccaatgagcatggtcttgccaggggttgttggcttcaagttatcaggcaagctgaggaatggagttacagccactgacttggttctaacagtaacccaaatgcttcggaaacatggtgttgtcgggaaatttgttgagttctatgggcaaggcatgagtgaattgtcacttgctgatcgggcgaccatcgcaaatatgtctcccgaatatggcgcaactatgggtttcttcccagttgatggaaagacgctggactatttgaagcttactggccgaagtgatgatacagtaagctaactgtagtgtatatgttcaatttgactcttgaccacttaattcttttttttttcctgtttaattattaggtggccatggttgagtcctacctgcgtgcgaataagatgttcgttgatcacagccaggtgctatatgtggagcagaagctgataattcagtataaccatattgttttacctaaagtttgtcttggatgtaggctgaagctgaaagagtatattcttcttatctagaactgaacctggaagaggtagaaccatgtctatcgggaccaaaacggcctcacgatcgagtgacattgaagaatatgaagtctgactggctttcttgcttggatagcgatgtaggattcaagggttttgctgtccccaaagagtcacaaggcaaagttgcagaatttttgttccacgggactcctgcaaagataaagcatggtgatgttgtaattgcagcaataaccagttgcacaaacacatcaaatcctaatgtaatgctgggagctgctttggttgccaagaaggcttgtgagttaggcctggaggtaaagccatggattaagacgagccttgcacctggttctggtgttgtgaagcagtacttggataagagcgggttgcagaaatatcttgaccagcttggcttcaatattgttggctatggttgcacaacctgcattggaaattccggggagcttgatgaatccgtatctgctgcaattactgagaatgatattgtttctgctgctgtattgtccggaaacaggaattttgaaggacgtgtgcatcccttaactagagcaaattaccttgcttcccctccattagttgttgcttatgccttggctggcacggttaatattgattttgagaaagaacctattggaatctcgaaagatgggaaagaggtttacttccgggatgtttggccatcaacagaagagatagccgagacagcgcagctgcaacatatctgaaggagcgtggtgttgaaaggaaggacttcaactcatatggtagccgaagaggaaatgatgagatcatggctaggggaacctttgccaacattcgtctcgtgaataagttcttgaagggtgaggttggacccaagacaatccatgttccatctggggataagctttcagtttttgatgctgctatgaaatacaagaatgaagggcatgatactattatcctggctggtgccgagtacgggagtggtagctctcgggattgggctgcaaagggcccaatgcttcagggagtgaaggctgtgatagcaaagagctttgagaggattcaccgcagcaatcttgctggcatgggaatcatccctctatgcttcaaagcaggggaggatgcagacaccctgggcctaaccggccatgagcgctacacggtccaccttccaaccaatgtgagtgagataaagcctggccaagatgttaccgtgacaactgataatgggaagtcgttcacttgcacactcagattcgacactgaggtggagcttgcttactacgaccatggtggcattctaccatatgtcatcagaaagattgcggaacagtagattgagatgattgcgatgcggtgaatcgtaattggtgtaaacgacccatttttgagtacttataataacctctgagtttctcagagtgagctgtctgaacttttagtaaccttttgctttctttaagacactgttaataatatgttaactcctgcaatatctgaatatacatttggcagatgattccctatgttgtaaatgacactagttcataacactgacgcagttcaaagcggttcttgttatctggtggtactcaaattagtactgcaaacaatcgattagctgattttattttgagttttgtattacgaacctttttgactggtgaaacggttattccatttgcttcaagcgatttggaaatgattgttacagaaagctgtttgttacagtgagtgtattttgcctcttaccagctaacgtttcactttcacgagcgactggcaatgac

SEQ ID NO: 84828 - DNA, 3191 bp, Zea Mays
ctcaggcccgctgtctttgatctctcctaatgttgggatgcgtggataaactgatcggctcccatattctatcaggattcttctcgagtcggcgatcaggaactgcgatgatttccaggtcaccgggaaggatgttgagaagatcttggactgggagagaagtgcaccgaagcaagttgaaatcccgttcaagcccgcccgtgtcctcctccaggattttactggtgtcccggctgttgtcgaccttgcgtgcatgagggatgctatgagcaaactcggcagcgacccgaacaaaattaatcctctggtacctgtagaccttgttattgaccattcagtacaagtcgacgtggcaagatcagcaaatgctgctcaggcaaatatggagcttgagttctatcgtaacaaggaacggtttgggttcttgaaatgggggtcctctgcattccgcaacatgcttgttgttccacctggatctggcattgttcaccaggtattttgatgatatggttgttttttaaaataacttaatctagtcaaggttattttatctatcaaaaacttataatcctctatttcactttgttaggtgaatcttgaatatctggcaagggttgtgtttaataatggtgggatcctttaccctgacagcgtcgtaggcactgactcccacacaactatgatagatggtcttggagttgctgggtggggagttggtggtatagaggcggaagctgcaatgcttggccagccaatgagcatggtcttgccaggggttgttggcttcaagttatcaggcaagctgaggaatggagttacagccactgacttggttctaacagtaacccaaatgcttcggaaacatggtgttgtcgggaaatttgttgagttctatgggcaaggcatgagtgaattgtcacttgctgatcgggcgaccatcgcaaatatgtctcccgaatatggcgcaactatgggtttcttcccagttgatggaaagacgctggactatttgaagcttactggccgaagtgatgatacagtggccatggttgagtcctacctgcgtgcgaataagatgttcgttgatcacagccaggctgaagctgaaagagtatattcttcttatctagaactgaacctggaagaggtagaaccatgtctatcgggaccaaaacggcctcacgatcgagtgacattgaagaatatgaagtctgactggctttcttgcttggatagcgatgtaggattcaagggttttgctgtccccaaagagtcacaaggcaaagttgcagaatttttgttccacgggactcctgcaaagataaagcatggtgatgttgtaattgcagcaataaccagttgcacaaacacatcaaatcctaatgtaatgctgggagctgctttggttgccaagaaggcttgtgagttaggcctggaggtaaagccatggattaagacgagccttgcacctggttctggtgttgtgaagcagtacttggataagagcgggttgcagaaatatcttgaccagcttggcttcaatattgttggctatggttgcacaacctgcattggaaattccggggagcttgatgaatccgtatctgctgcaattactgagaatgatattgtttctgctgctgtattgtccggaaacaggaattttgaaggacgtgtgcatcccttaactagagcaaattaccttgcttcccctccattagttgttgcttatgccttggctggcacggttaatattgattttgagaaagaacctattggaatctcgaaagatgggaaagaggtttacttccgggatgtttggccatcaacagaagagatagccgaggttgtcaagtcaagtgtgcttcctgacatgttcaagagcacatatgagtccatcacccaaggaaatcctatgtggaatgagctgccagtctcaacaagcactctctatccctgggatccatcatctacatacatccatgagcctccttacttcaaggatatgacaatgactcctcctggcccgcgaccagtgaaggatgcatattgccttctgaactttggtgacagtatcacaactgaccacatctcgcctgccggaaacattcacccagacagcgcagctgcaacatatctgaaggagcgtggtgttgaaaggaaggacttcaactcatatggtagccgaagaggaaatgatgagatcatggctaggggaacctttgccaacattcgtctcgtgaataagttcttgaagggtgaggttggacccaagacaatccatgttccatctggggataagctttcagtttttgatgctgctatgaaatacaagaatgaagggcatgatactattatcctggctggtgccgagtacgggagtggtagctctcgggattgggctgcaaagggcccaatgcttcagggagtgaaggctgtgatagcaaagagctttgagaggattcaccgcagcaatcttgctggcatgggaatcatccctctatgcttcaaagcaggggaggatgcagacaccctgggcctaaccggccatgagcgctacacggtccaccttccaaccaatgtgagtgagataaagcctggccaagatgttaccgtgacaactgataatgggaagtcgttcacttgcacactcagattcgacactgaggtggagcttgcttactacgaccatggtggcattctaccatatgtcatcagaaagattgcggaacagtagattgagatgattgcgatgcggtgaatcgtaattggtgtaaacgacccatttttgagtacttataataacctctgagtttctcagagtgagctgtctgaacttttagtaaccttttgctttctttaagacactgttaataatatgttaactcctgcaatatctgaatatacatttggcagatgattccctatgttgtaaatgacactagttcataacactgacgcagttcaaagcggttcttgttatctggtggtactcaaattagtactgcaaacaatcgattagctgattttattttgagttttgtattacgaacctttttgactggtgaaacggttattccatttgcttcaagcgatttggaaatgattgttacagaaagctgtttgttacagtgagtgtattttgcctcttaccagctaacgtttcactttcacgagcgactggcaatgac

SEQ ID NO: 84829 - DNA, 3923 bp, Zea Mays
cgaaacgaaacccatctccgcaagggcagcaaccctaccgggaccggcagctcgctcgccttgcgccgcgcattcccaccacgcgtctccccaaattcgcggccgtctatatatataaagaccccgcccaccaccacttttgccatcgcaacccctcgtccttttttgcacagcggccatgcctcccctcacgagctccctcctctcccgctccaccaccggcggctcctccgcccgcggcgtggcggtggccgcagcgatctccaggcccgccgcggacgccgccccttcctcctcgtccccgcctgcccgtccgaccccgaggccgcgcccaagcccggcgtcgcccttcgcgtccggcctcgcgggccgcctcttcggcggccaccgcgccgccacccgctccgcgtcgtctgcggccgccgtcttcgagcgccggtttgcctcagccgcgaccaggaactcgtacgatgaaatactgacgggcctcgggaggccaggaggcggagaggagtttggcaagtactacagcctgcctgctctctccgatccgcggattgatcggctcccatattctatcaggattcttctcgagtcggcgatcaggaactgcgatgatttccaggtcaccgggaaggatgttgagaagatcttggactgggagagaagtgcaccgaagcaagttgaaatcccgttcaagcccgcccgtgtcctcctccaggattttactggtgtcccggctgttgtcgaccttgcgtgcatgagggatgctatgagcaaactcggcagcgacccgaacaaaattaatcctctggtacctgtagaccttgttattgaccattcagtacaagtcgacgtggcaagatcagcaaatgctgctcaggcaaatatggagcttgagttctatcgtaacaaggaacggtttgggttcttgaaatgggggtcctctgcattccgcaacatgcttgttgttccacctggatctggcattgttcaccaggtattttgatgatatggttgttttttaaaataacttaatctagtcaaggttattttatctatcaaaaacttataatcctctatttcactttgttaggtgaatcttgaatatctggcaagggttgtgtttaataatggtgggatcctttaccctgacagcgtcgtaggcactgactcccacacaactatgatagatggtcttggagttgctgggtggggagttggtggtatagaggcggaagctgcaatgcttggccaggtgaagtacattttgatatctaaaaagtctggttcgggtactgtggaacatttgttttcttcatgtttatttaatgataagaacaaatgttcgcaaacttgagcttcagagatattatgcacaagtactgttctctatgctatggcctattttttggttgatctgcttcactgcttcagtaacatacatacatacacatcgattgttctttgtttctttatgcagccaatgagcatggtcttgccaggggttgttggcttcaagttatcaggcaagctgaggaatggagttacagccactgacttggttctaacagtaacccaaatgcttcggaaacatggtgttgtcgggaaatttgttgagttctatgggcaaggcatgagtgaattgtcacttgctgatcgggcgaccatcgcaaatatgtctcccgaatatggcgcaactatgggtttcttcccagttgatggaaagacgctggactatttgaagcttactggccgaagtgatgatacagtggccatggttgagtcctacctgcgtgcgaataagatgttcgttgatcacagccaggctgaagctgaaagagtatattcttcttatctagaactgaacctggaagaggtagaaccatgtctatcgggaccaaaacggcctcacgatcgagtgacattgaagaatatgaagtctgactggctttcttgcttggatagcgatgtaggattcaagggttttgctgtccccaaagagtcacaaggcaaagttgcagaatttttgttccacgggactcctgcaaagataaagcatggtgatgttgtaattgcagcaataaccagttgcacaaacacatcaaatcctaatgtaatgctgggagctgctttggttgccaagaaggcttgtgagttaggcctggaggtaaagccatggattaagacgagccttgcacctggttctggtgttgtgaagcagtacttggataagagcgggttgcagaaatatcttgaccagcttggcttcaatattgttggctatggttgcacaacctgcattggaaattccggggagcttgatgaatccgtatctgctgcaattactgagaatgatattgtttctgctgctgtattgtccggaaacaggaattttgaaggacgtgtgcatcccttaactagagcaaattaccttgcttcccctccattagttgttgcttatgccttggctggcacggttaatattgattttgagaaagaacctattggaatctcgaaagatgggaaagaggtttacttccgggatgtttggccatcaacagaagagatagccgaggttgtcaagtcaagtgtgcttcctgacatgttcaagagcacatatgagtccatcacccaaggaaatcctatgtggaatgagctgccagtctcaacaagcactctctatccctgggatccatcatctacatacatccatgagcctccttacttcaaggatatgacaatgactcctcctggcccgcgaccagtgaaggatgcatattgccttctgaactttggtgacagtatcacaactgaccacatctcgcctgccggaaacattcacccagacagcgcagctgcaacatatctgaaggagcgtggtgttgaaaggaaggacttcaactcatatggtagccgaagaggaaatgatgagatcatggctaggggaacctttgccaacattcgtctcgtgaataagttcttgaagggtgaggttggacccaagacaatccatgttccatctggggataagctttcagtttttgatgctgctatgaaatacaagaatgaagggcatgatactattatcctggctggtgccgagtacgggagtggtagctctcgggattgggctgcaaagggcccaatgcttcagggagtgaaggctgtgatagcaaagagctttgagaggattcaccgcagcaatcttgctggcatgggaatcatccctctatgcttcaaagcaggggaggatgcagacaccctgggcctaaccggccatgagcgctacacggtccaccttccaaccaatgtgagtgagataaagcctggccaagatgttaccgtgacaactgataatgggaagtcgttcacttgcacactcagattcgacactgaggtggagcttgcttactacgaccatggtggcattctaccatatgtcatcagaaagattgcggaacagtagattgagatgattgcgatgcggtgaatcgtaattggtgtaaacgacccatttttgagtacttataataacctctgagtttctcagagtgagctgtctgaacttttagtaaccttttgctttctttaagacactgttaataatatgttaactcctgcaatatctgaatatacatttggcagatgattccctatgttgtaaatgacactagttcataacactgacgcagttcaaagcggttcttgttatctggtggtactcaaattagtactgcaaacaatcgattagctgattttattttgagttttgtattacgaacctttttgactggtgaaacggttattccatttgcttcaagcgatttggaaatgattgttacagaaagctgtttgttacagtgagtgtattttgcctcttaccagctaacgtttcactttcacgagcgactggcaatgac

SEQ ID NO: 84830 - DNA, 3610 bp, Zea Mays
atcgcagcgaagcttcagctcggctgtccaccgcggcggcggcggggaacggcgtgagcgcaggacgaaacgaaacgaaacccatctccgcaagggcagcaaccctaccgggaccggcagctcgctcgccttgcgccgcgcattcccaccacgcgtctccccaaattcgcggccgtctatatatataaagaccccgcccaccaccacttttgccatcgcaacccctcgtccttttttgcacagcggccatgcctcccctcacgagctccctcctctcccgctccaccaccggcggctcctccgcccgcggcgtggcggtggccgcagcgatctccaggcccgccgcggacgccgccccttcctcctcgtccccgcctgcccgtccgaccccgaggccgcgcccaagcccggcgtcgcccttcgcgtccggcctcgcgggccgcctcttcggcggccaccgcgccgccacccgctccgcgtcgtctgcggccgccgtcttcgagcgccggtttgcctcagccgcgaccaggaactcgtacgatgaaatactgacgggcctcgggaggccaggaggcggagaggagtttggcaagtactacagcctgcctgctctctccgatccgcggattgatcggctcccatattctatcaggattcttctcgagtcggcgatcaggaactgcgatgatttccaggtcaccgggaaggatgttgagaagatcttggactgggagagaagtgcaccgaagcaagttgaaatcccgttcaagcccgcccgtgtcctcctccaggattttactggtgtcccggctgttgtcgaccttgcgtgcatgagggatgctatgagcaaactcggcagcgacccgaacaaaattaatcctctggtacctgtagaccttgttattgaccattcagtacaagtcgacgtggcaagatcagcaaatgctgctcaggcaaatatggagcttgagttctatcgtaacaaggaacggtttgggttcttgaaatgggggtcctctgcattccgcaacatgcttgttgttccacctggatctggcattgttcaccagcgtcgtaggcactgactcccacacaactatgatagatggtcttggagttgctgggtggggagttggtggtatagaggcggaagctgcaatgcttggccagccaatgagcatggtcttgccaggggttgttggcttcaagttatcaggcaagctgaggaatggagttacagccactgacttggttctaacagtaacccaaatgcttcggaaacatggtgttgtcgggaaatttgttgagttctatgggcaaggcatgagtgaattgtcacttgctgatcgggcgaccatcgcaaatatgtctcccgaatatggcgcaactatgggtttcttcccagttgatggaaagacgctggactatttgaagcttactggccgaagtgatgatacagtggccatggttgagtcctacctgcgtgcgaataagatgttcgttgatcacagccaggctgaagctgaaagagtatattcttcttatctagaactgaacctggaagaggtagaaccatgtctatcgggaccaaaacggcctcacgatcgagtgacattgaagaatatgaagtctgactggctttcttgcttggatagcgatgtaggattcaagggttttgctgtccccaaagagtcacaaggcaaagttgcagaatttttgttccacgggactcctgcaaagataaagcatggtgatgttgtaattgcagcaataaccagttgcacaaacacatcaaatcctaatgtaatgctgggagctgctttggttgccaagaaggcttgtgagttaggcctggaggtaaagccatggattaagacgagccttgcacctggttctggtgttgtgaagcagtacttggataagagcgggttgcagaaatatcttgaccagcttggcttcaatattgttggctatggttgcacaacctgcattggaaattccggggagcttgatgaatccgtatctgctgcaattactgagaatgatattgtttctgctgctgtattgtccggaaacaggaattttgaaggacgtgtgcatcccttaactagagcaaattaccttgcttcccctccattagttgttgcttatgccttggctggcacggttaatattgattttgagaaagaacctattggaatctcgaaagatgggaaagaggtttacttccgggatgtttggccatcaacagaagagatagccgaggttgtcaagtcaagtgtgcttcctgacatgttcaagagcacatatgagtccatcacccaaggaaatcctatgtggaatgagctgccagtctcaacaagcactctctatccctgggatccatcatctacatacatccatgagcctccttacttcaaggatatgacaatgactcctcctggcccgcgaccagtgaaggatgcatattgccttctgaactttggtgacagtatcacaactgaccacatctcgcctgccggaaacattcacccagacagcgcagctgcaacatatctgaaggagcgtggtgttgaaaggaaggacttcaactcatatggtagccgaagaggaaatgatgagatcatggctaggggaacctttgccaacattcgtctcgtgaataagttcttgaagggtgaggttggacccaagacaatccatgttccatctggggataagctttcagtttttgatgctgctatgaaatacaagaatgaagggcatgatactattatcctggctggtgccgagtacgggagtggtagctctcgggattgggctgcaaagggcccaatgcttcagggagtgaaggctgtgatagcaaagagctttgagaggattcaccgcagcaatcttgctggcatgggaatcatccctctatgcttcaaagcaggggaggatgcagacaccctgggcctaaccggccatgagcgctacacggtccaccttccaaccaatgtgagtgagataaagcctggccaagatgttaccgtgacaactgataatgggaagtcgttcacttgcacactcagattcgacactgaggtggagcttgcttactacgaccatggtggcattctaccatatgtcatcagaaagattgcggaacagtagattgagatgattgcgatgcggtgaatcgtaattggtgtaaacgacccatttttgagtacttataataacctctgagtttctcagagtgagctgtctgaacttttagtaaccttttgctttctttaagacactgttaataatatgttaactcctgcaatatctgaatatacatttggcagatgattccctatgttgtaaatgacactagttcataacactgacgcagttcaaagcggttcttgttatctggtggtactcaaattagtactgcaaacaatcgattagctgattttattttgagttttgtattacgaacctttttgactggtgaaacggttattccatttgcttcaagcgatttggaaatgattgttacagaaagctgtttgttacagtgagtgtattttgcctcttaccagctaacgtttcactttcacgagcgactggcaatgac

SEQ ID NO: 84831 - DNA, 3784 bp, Zea Mays
cgccctgcgtggctgcgtctgtggcctttgccatgcggacatatgggattcgcccactcagaattatattcccaccttcacactcggctattggccccgtctccaagaaaacatcgcagcgaagcttcagctcggctgtccaccgcggcggcggcggggaacggcgtgagcgcaggacgaaacgaaacgaaacccatctccgcaagggcagcaaccctaccgggaccggcagctcgctcgccttgcgccgcgcattcccaccacgcgtctccccaaattcgcggccgtctatatatataaagaccccgcccaccaccacttttgccatcgcaacccctcgtccttttttgcacagcggccatgcctcccctcacgagctccctcctctcccgctccaccaccggcggctcctccgcccgcggcgtggcggtggccgcagcgatctccaggcccgccgcggacgccgccccttcctcctcgtccccgcctgcccgtccgaccccgaggccgcgcccaagcccggcgtcgcccttcgcgtccggcctcgcgggccgcctcttcggcggccaccgcgccgccacccgctccgcgtcgtctgcggccgccgtcttcgagcgccggtttgcctcagccgcgaccaggaactcgtacgatgaaatactgacgggcctcgggaggccaggaggcggagaggagtttggcaagtactacagcctgcctgctctctccgatccgcggattgatcggctcccatattctatcaggattcttctcgagtcggcgatcaggaactgcgatgatttccaggtcaccgggaaggatgttgagaagatcttggactgggagagaagtgcaccgaagcaagttgaaatcccgttcaagcccgcccgtgtcctcctccaggattttactggtgtcccggctgttgtcgaccttgcgtgcatgagggatgctatgagcaaactcggcagcgacccgaacaaaattaatcctctggtacctgtagaccttgttattgaccattcagtacaagtcgacgtggcaagatcagcaaatgctgctcaggcaaatatggagcttgagttctatcgtaacaaggaacggtttgggttcttgaaatgggggtcctctgcattccgcaacatgcttgttgttccacctggatctggcattgttcaccaggtgaatcttgaatatctggcaagggttgtgtttaataatggtgggatcctttaccctgacagcgtcgtaggcactgactcccacacaactatgatagatggtcttggagttgctgggtggggagttggtggtatagaggcggaagctgcaatgcttggccagccaatgagcatggtcttgccaggggttgttggcttcaagttatcaggcaagctgaggaatggagttacagccactgacttggttctaacagtaacccaaatgcttcggaaacatggtgttgtcgggaaatttgttgagttctatgggcaaggcatgagtgaattgtcacttgctgatcgggcgaccatcgcaaatatgtctcccgaatatggcgcaactatgggtttcttcccagttgatggaaagacgctggactatttgaagcttactggccgaagtgatgatacagtggccatggttgagtcctacctgcgtgcgaataagatgttcgttgatcacagccaggctgaagctgaaagagtatattcttcttatctagaactgaacctggaagaggtagaaccatgtctatcgggaccaaaacggcctcacgatcgagtgacattgaagaatatgaagtctgactggctttcttgcttggatagcgatgtaggattcaagggttttgctgtccccaaagagtcacaaggcaaagttgcagaatttttgttccacgggactcctgcaaagataaagcatggtgatgttgtaattgcagcaataaccagttgcacaaacacatcaaatcctaatgtaatgctgggagctgctttggttgccaagaaggcttgtgagttaggcctggaggtaaagccatggattaagacgagccttgcacctggttctggtgttgtgaagcagtacttggataagagcgggttgcagaaatatcttgaccagcttggcttcaatattgttggctatggttgcacaacctgcattggaaattccggggagcttgatgaatccgtatctgctgcaattactgagaatgatattgtttctgctgctgtattgtccggaaacaggaattttgaaggacgtgtgcatcccttaactagagcaaattaccttgcttcccctccattagttgttgcttatgccttggctggcacggttaatattgattttgagaaagaacctattggaatctcgaaagatgggaaagaggtttacttccgggatgtttggccatcaacagaagagatagccgaggttgtcaagtcaagtgtgcttcctgacatgttcaagagcacatatgagtccatcacccaaggaaatcctatgtggaatgagctgccagtctcaacaagcactctctatccctgggatccatcatctacatacatccatgagcctccttacttcaaggatatgacaatgactcctcctggcccgcgaccagtgaaggatgcatattgccttctgaactttggtgacagtatcacaactgaccacatctcgcctgccggaaacattcacccagacagcgcagctgcaacatatctgaaggagcgtggtgttgaaaggaaggacttcaactcatatggtagccgaagaggaaatgatgagatcatggctaggggaacctttgccaacattcgtctcgtgaataagttcttgaagggtgaggttggacccaagacaatccatgttccatctggggataagctttcagtttttgatgctgctatgaaatacaagaatgaagggcatgatactattatcctggctggtgccgagtacgggagtggtagctctcgggattgggctgcaaagggcccaatgcttcagggagtgaaggctgtgatagcaaagagctttgagaggattcaccgcagcaatcttgctggcatgggaatcatccctctatgcttcaaagcaggggaggatgcagacaccctgggcctaaccggccatgagcgctacacggtccaccttccaaccaatgtgagtgagataaagcctggccaagatgttaccgtgacaactgataatgggaagtcgttcacttgcacactcagattcgacactgaggtggagcttgcttactacgaccatggtggcattctaccatatgtcatcagaaagattgcggaacagtagattgagatgattgcgatgcggtgaatcgtaattggtgtaaacgacccatttttgagtacttataataacctctgagtttctcagagtgagctgtctgaacttttagtaaccttttgctttctttaagacactgttaataatatgttaactcctgcaatatctgaatatacatttggcagatgattccctatgttgtaaatgacactagttcataacactgacgcagttcaaagcggttcttgttatctggtggtactcaaattagtactgcaaacaatcgattagctgattttattttgagttttgtattacgaacctttttgactggtgaaacggttattccatttgcttcaagcgatttggaaatgattgttacagaaagctgtttgttacagtgagtgtattttgcctcttaccagctaacgtttcactttcacgagcgactggcaatgac

SEQ ID NO: 84832 - DNA, 311 bp, Zea Mays
cgagttaagaagcaaaaaaaaaaaaacgcgtgaactggtgggtcgtgtgcgtgtgcaaacaaaacttgcggccaactcgttgtcccgtgtgcatcaagcgtcgtcctccagtgtaggcggcagaaacagaccgagaggcaaacatccgaagattagcaatcggagcttaagacaggcgcaggcgcgagcgcgagcacgagcacgactactccagtccagcggcggacggacagagtcttggcaacggtggacggatgaggagggggagaaggaaaagggagctcacctttaccctgagaactcccctgtcg

SEQ ID NO: 84833 - DNA, 723 bp, Zea Mays
ctccctcgggcctcagacgaggaatagaagcaatcatcagttatttatttaactacactaactaggatttgaactgaagacctttatctttgataccatattaagttgtgtacaatgactagttcaaccccaaaacttaaggtgatagggagtggtgagcaattcactcatactccaacaagtaaaaggagattactcacatcaggttataattgataaaagggtgctatttaatcataattcaatgctagtctgtcccatgcagtgtcagccttttggataaggtgcatgtgtttcccaagatatttttgggtaaccaagtcaaactggcgccatcatagtgagatttagttgaaggaggtaaggcggcattggtcactgtcgggggacttgcagctggtgcgactgtcggatctgcactggagaatttcctgcaggtaggatctgaaaccaagctgtcatcctggcatgtaattaactgaaacggatcgtgttcgatcttcaaagggtcagggaaatgcttgttttccgcacaaggtggaagcagcagctgtgtatagcaaaacaatacgtgggcatctctgtcccttataaagaccacctgtatctagtctagttctctcaagctcaatctcaagtctttcagatagaagcttgtatggattgcagaatgtggaatgtaaattcttggatcaatattctggaatataccgatccctctac

SEQ ID NO: 84834 - DNA, 2695 bp, Zea Mays
cttatccaaacttctcttacaaaaaaggcccagatttgttgcgaaataccacactccgagggccttgtgtgagggggaaaatcatccgcgcagagggacagggcacacgcactccgagggagcgcagccgaggagaaataatggccacggcgacgaccctctctttcagcggcggcggcggcggcactaccctgctccgcgggcacgtggccttgacgtcggggcggtgctgcacgttcccgagctcgcggtggaggccgccgcgcttgtcggcctcccgcgcggatgactcctcgccggctccgttcgagatgacggtggaggacgcgctgaagctgctcggcgtcgcagagggcgcgtcgttcgacgaaatcctgcgcgccaagaacgccgtcctcgcctcctgcaaggacgaccaggacgccgtcgcccaggtcgaagcagcctatgacatgttgcttatgcagagcttatcacagcggagggctggaaaggttgctaataaccgcatccgctttgctgatgttaaacctgtaaagagtgcaggagctgggacagtcccacagtggatgcaggcaaccatgaagaatgcacccattacatttgagactccatcttcgagcagcttgggcatccagtcatgtgtttatggtgcactaatggttttcacctatgctagtggaagctcgacatctttgccgtctgcgtacagtagccctgatgtgccaggttttatcctagcaacaggatttggtgcatcactgtattttctggcaaagaaaaatatgaacttaggtaaattgattgatccaccacctttatcctatagctatgttatccagtgctttatgttggtacatttggccatctgttttgcaacctatatgccactgtttttaaacctgaacaattcctaatgtagaggcataagaatgttcctctaaagttgaagatgcaatgattcctaattcatatcaaccgtgacactgtccgtcacatcattcaccattttgccaataccctaatgcaatagttgtgtagcctgtcatatacgaaacctgtattacctcttgctttttgaagcagttttgtcacggtagttttcgtgcaaactaatacagcctatcaaccattttatttattggagacattttgttctgatataacgaaacacggagattctaccacagcactactaagaaaggtgccacttagatccaccacttaattcttgtcggctatagtggtgaataatattaagttgcatgcactggtcagttgaacccataagcgatggactattcacttatactccagcactcctccctcgggcctcagacgaggaatagaagcaatcatcagttatttatttaactacactaactaggatttgaactgaagacctttatctttgataccatattaagttgtgtacaatgactagttcaaccccaaaacttaaggtgatagggagtggtgagcaattcactcatactccaacaagtaaaaggagattactcacatcaggttataattgataaaagggtgctatttaatcataattcaatgctagtctgtcccatgcagtgtcagccttttggataaggtgcatgtgtttcccaagatatttttgggtaaccaagtcaaactggcgccatcatagtgagatttagttgaaggaggtaagggctcctgatgaaaatagaagttagctaatcttaattgtgtgcatagtgttagccgtcagaaacatatacagatattcagttaagatagtagaaagtatgtgagatttctggtatgcagagccacacatatctgcaataatcctttgccatgggttatagcctatcatttgttcctactttgcaggacgtgcacaaatggatgctcacaatcctttagcaccttggcactatagtcatttgaacatttgatctcacggccatttaattaagggtcagttggaaacatgccactcaaaattttgaaaaattggaaactatttcattttcatgccactccatgacatcaaaatgaactagccgtccaattttataaaagttgagtggcatgtatacaattaatcatttaattaattggaccatgtagttgattattaattgcatttgtatagtgctgacagtgggtgagcatgtgggttttgctggcatagaattccagaagccccgtacctgcttttgtgcttatcatgccattgtttgcttataggaggaaacctggtccaacatttaggttaacggtgctcttacaccaatcttcatgtgtggatttagcatgccatcaacactctctgtggtcctgtatccaggtaaggcggcattggtcactgtcgggggacttgcagctggtgcgactgtcggatctgcactggagaatttcctgcaggtaggatctgaaaccaagctgtcatcctggcatgtaattaactgaaacggatcgtgttcgatcttcaaagggtcagggaaatgcttgttttccgcacaaggtggaagcagcagctgtgtatagcaaaacaatacgtgggcatctctgtcccttataaagaccacctgtatctagtctagttctctcaagctcaatctcaagtctttcagatagaagcttgtatggattgcagaatgtggaatgtaaattcttggatcaatattctggaatataccgatccctctac

SEQ ID NO: 84835 - DNA, 3533 bp, Zea Mays
  misc_feature (1)..(2): n is a, c, g, or t
nnagatagaaatgctggaaggaatgagtatgcaacaccataccatggagaatcagagttgaaaaggagaaggtccagaagcagggatcatgatcgagaaagatacagtaggtctatctcaccgccactaagggaacaaaggtataattaccgtggacgtgattttggcaatcctccttactactctatggagaaatcaagggggaagtatgctgaagttgataaacaaagatcgtcggggagtggtggatacattggtgggttgcaccagagatatgaaagccggcttggtggatactcaccaaggaaaaagaaaacatcactgcaagctgagcaggcaactaccaagactccttccaaggtcattcagtccccagaaaaaaaatcagccacatgggatcagcctcctgttaaagcaaaccaatctaactttcctaccactttcctgccaactgttggccagatggctcctactccattcagtttcagcgtgataaaggacccttcaactacagctgtgacaatgttggcaggtaatagtttgactgcagattctgtccagcttacacaagcaacgcgcccactcaggaggttgcacattgaaaatttgcctgattcagctacagaggataagttgattgactgcttgaatgacttcttattgtctactggcagtaaactccagcggtctaaaccatgcctcagttgtacgataaacagagaaaaacgtcaggcttttgtggaatttcttacaccagaggatgctacagcagctatttcttttgatggaaggtctctaaatggatctgtgttgagaattcgacgccccaaagaatatgttgaaacggtgggtattttaattgggtgtgtcataattcacgttcagcagcatcgtgaagcaaaggaattgtaaagcaggcttcctggtgtagtgcaaatactatgtgattgctgctacttcagattttcattggctgattacagtactgcagacaggcagagtccttatggtgttcagttcatggaaacattaggaagacagcttgtacagcatggttcaagtaaatgtaatattagcaaagatttgagtatgatggttgctaagtgctaaccttaattgtgcaaatatctacagccgagtgcaatttggcagcaagggctgtcatttagacattgataaacttcaaagttattctgcatttagtttaacaaactttgactttactttttctcttgtttgtgttcaatctctaacattttcctgttcagcttatttcatggatattgccttacatcttagttcctctatttttgtctctggcctcaacttggtctctttacttctaaaaagacaagattagttcctttacttgtataggtagatatggttagtcgttccacccatagccaataatggaatatatatcacagaaaataccagtgagatagaatcatagaaggagataggttattagtctggtccagtttggtttgcttgactagattgctttgttttgtgctgtatcactataccaacatgaatagctaaacactaggatcatgcaaatatgtgatatgtctcctcaaggaccaggctttcctctacacataacgatggtccacaatgattattttccatcactattagctgtccataatatctgggatagtcaacagcagaaggaaccacactgattttgctgtattatattgagagtgttacaacattgtttttttgagacctctcacctctgttttaaatgtggcggcatctagatttttagatattttattttaaatatcagttcattttttcttgcagaatgtaaatcctgttgatttttctgtattatatttagagtggtacgatattgtttttttggagatctacgttttaaatgcgaggatattcagatttttagatattttattttaaatgtcagttcatatttttttccttgcagaatgttacccctaagaaggcagaagagactgctttgatatctgatgttgttgcagattcaccatacaagattttcatagcgggcattgctggagtgatctcatctaagatgctaatggagattgttagtgcatttggcccattggctgcataccgctttctttttaacaatgagctcggtggaccctgtgcatttcttgagtacgccgaccgctccgttacttctaaggcatgtgctggcctcaatgggatgatgcttggtggacgtgtactgactgctgtgcatgtgtttcctaatcctcatgtggaggctgctaatgaggcttccccattttatggtattcctgacaatgctaaattgcttctgaaagaaccaacaaaggtcctgcagctaaaaaatgtgtttgaacgagaagagtatatgctactttcaaaatctgagctggaagaaacattggaagatgtacgtgttgaatgtacgaggtttggagcagtcaaatctgtaaatgtagttgagtatcctgctgctggtgtcagtgctgcagaggagaacatagttgagctcaagattgaatgcactgaattttctgatacggaaaacattgcaaaggctgtatcagaatattctgtaccgattattccgagcatagatgttctaaatcattctgtcgcttcggatactaaagatgtggatcttattccagagagtcaggatcagaaggacaaacacctcccttcaaatgcagcactttgtgagagtgaggcacctgtagcagatgaggacgcagagcttgatgaaactcagtctagagctgctctccccacaccgcaacatgctgaagctgatcatacggaagcagctgtggatgagaataaacatacaggagcagggaaggttactgctactgcaacggacgacgatgcagtagaaaagagtcatggagacccaagaacctcagagacctgcaatcctgctggacctacagacaaagcggagaaacctggaaggtactccgaacaaggcgctggtgatgtgactgaagatcgtccagaaaaagaagcccaagctgttgggaccagcgacactggtttcgtgtttgaacctggttctgtgcttgtggagtttttgcgggaggaggctgcttgcatggccgcacattccttacatgggcgtcgcttcgggaacagaactgtgcatgctggatatgctccgtatgatctctacttgcagaaataccccaggtgattctgcgtttgcgactgcatgagttgcgatacgagctttgcctatgtgccagtatttcacagaaacttcagacttgtagttttggcttttgagcctttggatggttcttccggtccagatagtggtaccattagttgaacgaaatatttggaaatgttgttccacagtagatatcggatggacaataggatataagtactggatagagacacaagttgtcgttaacatcgttctttacttcgctattaatgtttttgatgacgtcagacattagtgtggatggatggatggaatggatttattgcaagattttgactgctataat

SEQ ID NO: 84836 - DNA, 3312 bp, Zea Mays
  misc_feature (1)..(2): n is a, c, g, or t
nnagatagaaatgctggaaggaatgagtatgcaacaccataccatggagaatcagagttgaaaaggagaaggtccagaagcagggatcatgatcgagaaagatacagtaggtctatctcaccgccactaagggaacaaaggtataattaccgtggacgtgattttggcaatcctccttactactctatggagaaatcaagggggaagtatgctgaagttgataaacaaagatcgtcggggagtggtggatacattggtgggttgcaccagagatatgaaagccggcttggtggatactcaccaaggaaaaagaaaacatcactgcaagctgagcaggcaactaccaagactccttccaaggtcattcagtccccagaaaaaaaatcagccacatgggatcagcctcctgttaaagcaaaccaatctaactttcctaccactttcctgccaactgttggccagatggctcctactccattcagtttcagcgtgataaaggacccttcaactacagctgtgacaatgttggcaggtaatagtttgactgcagattctgtccagcttacacaagcaacgcgcccactcaggaggttgcacattgaaaatttgcctgattcagctacagaggataagttgattgactgcttgaatgacttcttattgtctactggcagtaaactccagcggtctaaaccatgcctcagttgtacgataaacagagaaaaacgtcaggcttttgtggaatttcttacaccagaggatgctacagcagctatttcttttgatggaaggtctctaaatggatctgtgttgagaattcgacgccccaaagaatatgttgaaacggtgggtattttaattgggtgtgtcataattcacgttcagcagcatcgtgaagcaaaggaattgtaaagcaggcttcctggtgtagtgcaaatactatgtgattgctgctacttcagattttcattggctgattacagtactgcagacaggcagagtccttatggtgttcagttcatggaaacattaggaagacagcttgtacagcatggttcaagtaaatgtaatattagcaaagatttgagtatgatggttgctaagtgctaaccttaattgtgcaaatatctacagccgagtgcaatttggcagcaagggctgtcatttagacattgataaacttcaaagttattctgcatttagtttaacaaactttgactttactttttctcttgtttgtgttcaatctctaacattttcctgttcagcttatttcatggatattgccttacatcttagttcctctatttttgtctctggcctcaacttggtctctttacttctaaaaagacaagattagttcctttacttgtataggtagatatggttagtcgttccacccatagccaataatggaatatatatcacagaaaataccagtgagatagaatcatagaaggagataggttattagtctggtccagtttggtttgcttgactagattgctttgttttgtgctgtatcactataccaacatgaatagctaaacactaggatcatgcaaatatgtgatatgtctcctcaaggaccaggctttcctctacacataacgatggtccacaatgattattttccatcactattagctgtccataatatctgggatagtcaacagcagaaggaaccacactgattttgctgtattatattgagagtgttacaacattgtttttttgagacctctcacctctgttttaaatgtggcggcatctagatttttagatattttattttaaatatcagttcattttttcttgcagaatgtaaatcctgttgatttttctgtattatatttagagtggtacgatattgtttttttggagatctacgttttaaatgcgaggatattcagatttttagatattttattttaaatgtcagttcatatttttttccttgcagaatgttacccctaagaaggcagaagagactgctttgatatctgatgttgttgcagattcaccatacaagattttcatagcgggcattgctggagtgatctcatctaagatgctaatggagattgttagtgcatttggcccattggctgcataccgctttctttttaacaatgagctcggtggaccctgtgcatttcttgagtacgccgaccgctccgttacttctaaggcatgtgctggcctcaatgggatgatgcttggtggacgtgtactgactgctgtgcatgtgtttcctaatcctcatgtggaggctgctaatgaggcttccccattttatggtattcctgacaatgctaaattgcttctgaaagaaccaacaaaggtcctgcagctaaaaaatgtgtttgaacgagaagagtatatgctactttcaaaatctgagctggaagaaacattggaagatgtacgtgttgaatgtacgagagagtcaggatcagaaggacaaacacctcccttcaaatgcagcactttgtgagagtgaggcacctgtagcagatgaggacgcagagcttgatgaaactcagtctagagctgctctccccacaccgcaacatgctgaagctgatcatacggaagcagctgtggatgagaataaacatacaggagcagggaaggttactgctactgcaacggacgacgatgcagtagaaaagagtcatggagacccaagaacctcagagacctgcaatcctgctggacctacagacaaagcggagaaacctggaaggtactccgaacaaggcgctggtgatgtgactgaagatcgtccagaaaaagaagcccaagctgttgggaccagcgacactggtttcgtgtttgaacctggttctgtgcttgtggagtttttgcgggaggaggctgcttgcatggccgcacattccttacatgggcgtcgcttcgggaacagaactgtgcatgctggatatgctccgtatgatctctacttgcagaaataccccaggtgattctgcgtttgcgactgcatgagttgcgatacgagctttgcctatgtgccagtatttcacagaaacttcagacttgtagttttggcttttgagcctttggatggttcttccggtccagatagtggtaccattagttgaacgaaatatttggaaatgttgttccacagtagatatcggatggacaataggatataagtactggatagagacacaagttgtcgttaacatcgttctttacttcgctattaatgtttttgatgacgtcagacattagtgtggatggatggatggaatggatttattgcaagattttgactgctataat

SEQ ID NO: 84837 - DNA, 2416 bp, Zea Mays
  misc_feature (1)..(2): n is a, c, g, or t
nnagatagaaatgctggaaggaatgagtatgcaacaccataccatggagaatcagagttgaaaaggagaaggtccagaagcagggatcatgatcgagaaagatacagtaggtctatctcaccgccactaagggaacaaaggtataattaccgtggacgtgattttggcaatcctccttactactctatggagaaatcaagggggaagtatgctgaagttgataaacaaagatcgtcggggagtggtggatacattggtgggttgcaccagagatatgaaagccggcttggtggatactcaccaaggaaaaagaaaacatcactgcaagctgagcaggcaactaccaagactccttccaaggtcattcagtccccagaaaaaaaatcagccacatgggatcagcctcctgttaaagcaaaccaatctaactttcctaccactttcctgccaactgttggccagatggctcctactccattcagtttcagcgtgataaaggacccttcaactacagctgtgacaatgttggcaggtaatagtttgactgcagattctgtccagcttacacaagcaacgcgcccactcaggaggttgcacattgaaaatttgcctgattcagctacagaggataagttgattgactgcttgaatgacttcttattgtctactggcagtaaactccagcggtctaaaccatgcctcagttgtacgataaacagagaaaaacgtcaggcttttgtggaatttcttacaccagaggatgctacagcagctatttcttttgatggaaggtctctaaatggatctgtgttgagaattcgacgccccaaagaatatgttgaaacgaatgttacccctaagaaggcagaagagactgctttgatatctgatgttgttgcagattcaccatacaagattttcatagcgggcattgctggagtgatctcatctaagatgctaatggagattgttagtgcatttggcccattggctgcataccgctttctttttaacaatgagctcggtggaccctgtgcatttcttgagtacgccgaccgctccgttacttctaaggcatgtgctggcctcaatgggatgatgcttggtggacgtgtactgactgctgtgcatgtgtttcctaatcctcatgtggaggctgctaatgaggcttccccattttatggtattcctgacaatgctaaattgcttctgaaagaaccaacaaaggtcctgcagctaaaaaatgtgtttgaacgagaagagtatatgctactttcaaaatctgagctggaagaaacattggaagatgtacgtgttgaatgtacgaggtttggagcagtcaaatctgtaaatgtagttgagtatcctgctgctggtgtcagtgctgcagaggagaacatagttgagctcaagattgaatgcactgaattttctgatacggaaaacattgcaaaggctgtatcagaatattctgtaccgattattccgagcatagatgttctaaatcattctgtcgcttcggatactaaagatgtggatcttattccagagagtcaggatcagaaggacaaacacctcccttcaaatgcagcactttgtgagagtgaggcacctgtagcagatgaggacgcagagcttgatgaaactcagtctagagctgctctccccacaccgcaacatgctgaagctgatcatacggaagcagctgtggatgagaataaacatacaggagcagggaaggttactgctactgcaacggacgacgatgcagtagaaaagagtcatggagacccaagaacctcagagacctgcaatcctgctggacctacagacaaagcggagaaacctggaaggtactccgaacaaggcgctggtgatgtgactgaagatcgtccagaaaaagaagcccaagctgttgggaccagcgacactggtttcgtgtttgaacctggttctgtgcttgtggagtttttgcgggaggaggctgcttgcatggccgcacattccttacatgggcgtcgcttcgggaacagaactgtgcatgctggatatgctccgtatgatctctacttgcagaaataccccaggtgattctgcgtttgcgactgcatgagttgcgatacgagctttgcctatgtgccagtatttcacagaaacttcagacttgtagttttggcttttgagcctttggatggttcttccggtccagatagtggtaccattagttgaacgaaatatttggaaatgttgttccacagtagatatcggatggacaataggatataagtactggatagagacacaagttgtcgttaacatcgttctttacttcgctattaatgtttttgatgacgtcagacattagtgtggatggatggatggaatggatttattgcaagattttgactgctataat

SEQ ID NO: 84838 - DNA, 2636 bp, Zea Mays
  misc_feature (1)..(2): n is a, c, g, or t
nnagatagaaatgctggaaggaatgagtatgcaacaccataccatggagaatcagagttgaaaaggagaaggtccagaagcagggatcatgatcgagaaagatacagtaggtctatctcaccgccactaagggaacaaaggtataattaccgtggacgtgattttggcaatcctccttactactctatggagaaatcaagggggaagtatgctgaagttgataaacaaagatcgtcggggagtggtggatacattggtgggttgcaccagagatatgaaagccggcttggtggatactcaccaaggaaaaagaaaacatcactgcaagctgagcaggcaactaccaagactccttccaaggtcattcagtccccagaaaaaaaatcagccacatgggatcagcctcctgttaaagcaaaccaatctaactttcctaccactttcctgccaactgttggccagatggctcctactccattcagtttcagcgtgataaaggacccttcaactacagctgtgacaatgttggcaggtaatagtttgactgcagattctgtccagcttacacaagcaacgcgcccactcaggaggttgcacattgaaaatttgcctgattcagctacagaggataagttgattgactgcttgaatgacttcttattgtctactggcagtaaactccagcggtctaaaccatgcctcagttgtacgataaacagagaaaaacgtcaggcttttgtggaatttcttacaccagaggatgctacagcagctatttcttttgatggaaggtctctaaatggatctgtgttgagaattcgacgccccaaagaatatgttgaaacggtgggtattttaattgggtgtgtcataattcacgttcagcagcatcgtgaagcaaaggaattgtaaagcaggcttcctggtgtagtgcaaatactatgtgattgctgctacttcagattttcattggctgattacagtactgcagacaggcagagtccttatggtgttcagttcatggaaacattaggaagacagcttgtacagcatggttcaagtaaataatgttacccctaagaaggcagaagagactgctttgatatctgatgttgttgcagattcaccatacaagattttcatagcgggcattgctggagtgatctcatctaagatgctaatggagattgttagtgcatttggcccattggctgcataccgctttctttttaacaatgagctcggtggaccctgtgcatttcttgagtacgccgaccgctccgttacttctaaggcatgtgctggcctcaatgggatgatgcttggtggacgtgtactgactgctgtgcatgtgtttcctaatcctcatgtggaggctgctaatgaggcttccccattttatggtattcctgacaatgctaaattgcttctgaaagaaccaacaaaggtcctgcagctaaaaaatgtgtttgaacgagaagagtatatgctactttcaaaatctgagctggaagaaacattggaagatgtacgtgttgaatgtacgaggtttggagcagtcaaatctgtaaatgtagttgagtatcctgctgctggtgtcagtgctgcagaggagaacatagttgagctcaagattgaatgcactgaattttctgatacggaaaacattgcaaaggctgtatcagaatattctgtaccgattattccgagcatagatgttctaaatcattctgtcgcttcggatactaaagatgtggatcttattccagagagtcaggatcagaaggacaaacacctcccttcaaatgcagcactttgtgagagtgaggcacctgtagcagatgaggacgcagagcttgatgaaactcagtctagagctgctctccccacaccgcaacatgctgaagctgatcatacggaagcagctgtggatgagaataaacatacaggagcagggaaggttactgctactgcaacggacgacgatgcagtagaaaagagtcatggagacccaagaacctcagagacctgcaatcctgctggacctacagacaaagcggagaaacctggaaggtactccgaacaaggcgctggtgatgtgactgaagatcgtccagaaaaagaagcccaagctgttgggaccagcgacactggtttcgtgtttgaacctggttctgtgcttgtggagtttttgcgggaggaggctgcttgcatggccgcacattccttacatgggcgtcgcttcgggaacagaactgtgcatgctggatatgctccgtatgatctctacttgcagaaataccccaggtgattctgcgtttgcgactgcatgagttgcgatacgagctttgcctatgtgccagtatttcacagaaacttcagacttgtagttttggcttttgagcctttggatggttcttccggtccagatagtggtaccattagttgaacgaaatatttggaaatgttgttccacagtagatatcggatggacaataggatataagtactggatagagacacaagttgtcgttaacatcgttctttacttcgctattaatgtttttgatgacgtcagacattagtgtggatggatggatggaatggatttattgcaagattttgactgctataat

SEQ ID NO: 84839 - DNA, 2277 bp, Zea Mays
  misc_feature (1)..(2): n is a, c, g, or t
nnagatagaaatgctggaaggaatgagtatgcaacaccataccatggagaatcagagttgaaaaggagaaggtccagaagcagggatcatgatcgagaaagatacagtaggtctatctcaccgccactaagggaacaaaggtataattaccgtggacgtgattttggcaatcctccttactactctatggagaaatcaagggggaagtatgctgaagttgataaacaaagatcgtcggggagtggtggatacattggtgggttgcaccagagatatgaaagccggcttggtggatactcaccaaggaaaaagaaaacatcactgcaagctgagcaggcaactaccaagactccttccaaggtcattcagtccccagaaaaaaaatcagccacatgggatcagcctcctgttaaagcaaaccaatctaactttcctaccactttcctgccaactgttggccagatggctcctactccattcagtttcagcgtgataaaggacccttcaactacagctgtgacaatgttggcagtaaactccagcggtctaaaccatgcctcagttgtacgataaacagagaaaaacgtcaggcttttgtggaatttcttacaccagaggatgctacagcagctatttcttttgatggaaggtctctaaatggatctgtgttgagaattcgacgccccaaagaatatgttgaaacggtgaatgttacccctaagaaggcagaagagactgctttgatatctgatgttgttgcagattcaccatacaagattttcatagcgggcattgctggagtgatctcatctaagatgctaatggagattgttagtgcatttggcccattggctgcataccgctttctttttaacaatgagctcggtggaccctgtgcatttcttgagtacgccgaccgctccgttacttctaaggcatgtgctggcctcaatgggatgatgcttggtggacgtgtactgactgctgtgcatgtgtttcctaatcctcatgtggaggctgctaatgaggcttccccattttatggtattcctgacaatgctaaattgcttctgaaagaaccaacaaaggtcctgcagctaaaaaatgtgtttgaacgagaagagtatatgctactttcaaaatctgagctggaagaaacattggaagatgtacgtgttgaatgtacgaggtttggagcagtcaaatctgtaaatgtagttgagtatcctgctgctggtgtcagtgctgcagaggagaacatagttgagctcaagattgaatgcactgaattttctgatacggaaaacattgcaaaggctgtatcagaatattctgtaccgattattccgagcatagatgttctaaatcattctgtcgcttcggatactaaagatgtggatcttattccagagagtcaggatcagaaggacaaacacctcccttcaaatgcagcactttgtgagagtgaggcacctgtagcagatgaggacgcagagcttgatgaaactcagtctagagctgctctccccacaccgcaacatgctgaagctgatcatacggaagcagctgtggatgagaataaacatacaggagcagggaaggttactgctactgcaacggacgacgatgcagtagaaaagagtcatggagacccaagaacctcagagacctgcaatcctgctggacctacagacaaagcggagaaacctggaaggtactccgaacaaggcgctggtgatgtgactgaagatcgtccagaaaaagaagcccaagctgttgggaccagcgacactggtttcgtgtttgaacctggttctgtgcttgtggagtttttgcgggaggaggctgcttgcatggccgcacattccttacatgggcgtcgcttcgggaacagaactgtgcatgctggatatgctccgtatgatctctacttgcagaaataccccaggtgattctgcgtttgcgactgcatgagttgcgatacgagctttgcctatgtgccagtatttcacagaaacttcagacttgtagttttggcttttgagcctttggatggttcttccggtccagatagtggtaccattagttgaacgaaatatttggaaatgttgttccacagtagatatcggatggacaataggatataagtactggatagagacacaagttgtcgttaacatcgttctttacttcgctattaatgtttttgatgacgtcagacattagtgtggatggatggatggaatggatttattgcaagattttgactgctataat

SEQ ID NO: 84840 - DNA, 3440 bp, Zea Mays
  misc_feature (1)..(2): n is a, c, g, or t
nnagatagaaatgctggaaggaatgagtatgcaacaccataccatggagaatcagagttgaaaaggagaaggtccagaagcagggatcatgatcgagaaagatacagtaggtctatctcaccgccactaagggaacaaaggtataattaccgtggacgtgattttggcaatcctccttactactctatggagaaatcaagggggaagtatgctgaagttgataaacaaagatcgtcggggagtggtggatacattggtgggttgcaccagagatatgaaagccggcttggtggatactcaccaaggaaaaagaaaacatcactgcaagctgagcaggcaactaccaagactccttccaaggtcattcagtccccagaaaaaaaatcagccacatgggatcagcctcctgttaaagcaaaccaatctaactttcctaccactttcctgccaactgttggccagatggctcctactccattcagtttcagcgtgataaaggacccttcaactacagctgtgacaatgttggcaggtaatagtttgactgcagattctgtccagcttacacaagcaacgcgcccactcaggaggttgcacattgaaaatttgcctgattcagctacagaggataagttgattgactgcttgaatgacttcttattgtctactggcagtaaactccagcggtctaaaccatgcctcagttgtacgataaacagagaaaaacgtcaggcttttgtggaatttcttacaccagaggatgctacagcagctatttcttttgatggaaggtctctaaatggatctgtgttgagaattcgacgccccaaagaatatgttgaaacggtgggtattttaattgggtgtgtcataattcacgttcagcagcatcgtgaagcaaaggaattgtaaagcaggcttcctggtgtagtgcaaatactatgtgattgctgctacttcagattttcattggctgattacagtactgcagacaggcagagtccttatggtgttcagttcatggaaacattaggaagacagcttgtacagcatggttcaagtaaatgtaatattagcaaagatttgagtatgatggttgctaagtgctaaccttaattgtgcaaatatctacagccgagtgcaatttggcagcaagggctgtcatttagacattgataaacttcaaagttattctgcatttagtttaacaaactttgactttactttttctcttgtttgtgttcaatctctaacattttcctgttcagcttatttcatggatattgccttacatcttagttcctctatttttgtctctggcctcaacttggtctctttacttctaaaaagacaagattagttcctttacttgtataggtagatatggttagtcgttccacccatagccaataatggaatatatatcacagaaaataccagtgagatagaatcatagaaggagataggttattagtctggtccagtttggtttgcttgactagattgctttgttttgtgctgtatcactataccaacatgaatagctaaacactaggatcatgcaaatatgtgatatgtctcctcaaggaccaggctttcctctacacataacgatggtccacaatgattattttccatcactattagctgtccataatatctgggatagtcaacagcagaaggaaccacactgattttgctgtattatattgagagtgttacaacattgtttttttgagacctctcacctctgttttaaatgtggcggcatctagatttttagatattttattttaaatatcagttcattttttcttgcagaatgtaaatcctgttgatttttctgtattatatttagagtggtacgatattgtttttttggagatctacgttttaaatgcgaggatattcagatttttagatattttattttaaatgtcagttcatatttttttccttgcagaatgttacccctaagaaggcagaagagactgctttgatatctgatgttgttgcagattcaccatacaagattttcatagcgggcattgctggagtgatctcatctaagatgctaatggagattgttagtgcatttggcccattggctgcataccgctttctttttaacaatgagctcggtggaccctgtgcatttcttgagtacgccgaccgctccgttacttctaaggcatgtgctggcctcaatgggatgatgcttggtggacgtgtactgactgctgtgcatgtgtttcctaatcctcatgtggagtttgaacgagaagagtatatgctactttcaaaatctgagctggaagaaacattggaagatgtacgtgttgaatgtacgaggtttggagcagtcaaatctgtaaatgtagttgagtatcctgctgctggtgtcagtgctgcagaggagaacatagttgagctcaagattgaatgcactgaattttctgatacggaaaacattgcaaaggctgtatcagaatattctgtaccgattattccgagcatagatgttctaaatcattctgtcgcttcggatactaaagatgtggatcttattccagagagtcaggatcagaaggacaaacacctcccttcaaatgcagcactttgtgagagtgaggcacctgtagcagatgaggacgcagagcttgatgaaactcagtctagagctgctctccccacaccgcaacatgctgaagctgatcatacggaagcagctgtggatgagaataaacatacaggagcagggaaggttactgctactgcaacggacgacgatgcagtagaaaagagtcatggagacccaagaacctcagagacctgcaatcctgctggacctacagacaaagcggagaaacctggaaggtactccgaacaaggcgctggtgatgtgactgaagatcgtccagaaaaagaagcccaagctgttgggaccagcgacactggtttcgtgtttgaacctggttctgtgcttgtggagtttttgcgggaggaggctgcttgcatggccgcacattccttacatgggcgtcgcttcgggaacagaactgtgcatgctggatatgctccgtatgatctctacttgcagaaataccccaggtgattctgcgtttgcgactgcatgagttgcgatacgagctttgcctatgtgccagtatttcacagaaacttcagacttgtagttttggcttttgagcctttggatggttcttccggtccagatagtggtaccattagttgaacgaaatatttggaaatgttgttccacagtagatatcggatggacaataggatataagtactggatagagacacaagttgtcgttaacatcgttctttacttcgctattaatgtttttgatgacgtcagacattagtgtggatggatggatggaatggatttattgcaagattttgactgctataat

SEQ ID NO: 84841 - DNA, 2230 bp, Zea Mays
  misc_feature (1)..(2): n is a, c, g, or t
nnagatagaaatgctggaaggaatgagtatgcaacaccataccatggagaatcagagttgaaaaggagaaggtccagaagcagggatcatgatcgagaaagatacagtaggtctatctcaccgccactaagggaacaaaggtataattaccgtggacgtgattttggcaatcctccttactactctatggagaaatcaagggggaagtatgctgaagttgataaacaaagatcgtcggggagtggtggatacattggtgggttgcaccagagatatgaaagccggcttggtggatactcaccaaggaaaaagaaaacatcactgcaagctgagcaggcaactaccaagactccttccaagatggctcctactccattcagtttcagcgtgataaaggacccttcaactacagctgtgacaatgttggcagctacagaggataagttgattgactgcttgaatgacttcttattgtctactggcagtaaactccagcggtctaaaccatgcctcagttgtacgataaacagagaaaaacgtcaggcttttgtggaatttcttacaccagaggatgctacagcagctatttcttttgatggaaggtctctaaatggatctgtgttgagaattcgacgccccaaagaatatgttgaaacggtgaatgttacccctaagaaggcagaagagactgctttgatatctgatgttgttgcagattcaccatacaagattttcatagcgggcattgctggagtgatctcatctaagatgctaatggagattgttagtgcatttggcccattggctgcataccgctttctttttaacaatgagctcggtggaccctgtgcatttcttgagtacgccgaccgctccgttacttctaaggcatgtgctggcctcaatgggatgatgcttggtggacgtgtactgactgctgtgcatgtgtttcctaatcctcatgtggaggctgctaatgaggcttccccattttatggtattcctgacaatgctaaattgcttctgaaagaaccaacaaaggtcctgcagctaaaaaatgtgtttgaacgagaagagtatatgctactttcaaaatctgagctggaagaaacattggaagatgtacgtgttgaatgtacgaggtttggagcagtcaaatctgtaaatgtagttgagtatcctgctgctggtgtcagtgctgcagaggagaacatagttgagctcaagattgaatgcactgaattttctgatacggaaaacattgcaaaggctgtatcagaatattctgtaccgattattccgagcatagatgttctaaatcattctgtcgcttcggatactaaagatgtggatcttattccagagagtcaggatcagaaggacaaacacctcccttcaaatgcagcactttgtgagagtgaggcacctgtagcagatgaggacgcagagcttgatgaaactcagtctagagctgctctccccacaccgcaacatgctgaagctgatcatacggaagcagctgtggatgagaataaacatacaggagcagggaaggttactgctactgcaacggacgacgatgcagtagaaaagagtcatggagacccaagaacctcagagacctgcaatcctgctggacctacagacaaagcggagaaacctggaaggtactccgaacaaggcgctggtgatgtgactgaagatcgtccagaaaaagaagcccaagctgttgggaccagcgacactggtttcgtgtttgaacctggttctgtgcttgtggagtttttgcgggaggaggctgcttgcatggccgcacattccttacatgggcgtcgcttcgggaacagaactgtgcatgctggatatgctccgtatgatctctacttgcagaaataccccaggtgattctgcgtttgcgactgcatgagttgcgatacgagctttgcctatgtgccagtatttcacagaaacttcagacttgtagttttggcttttgagcctttggatggttcttccggtccagatagtggtaccattagttgaacgaaatatttggaaatgttgttccacagtagatatcggatggacaataggatataagtactggatagagacacaagttgtcgttaacatcgttctttacttcgctattaatgtttttgatgacgtcagacattagtgtggatggatggatggaatggatttattgcaagattttgactgctataat

SEQ ID NO: 84842 - DNA, 1094 bp, Zea Mays
  misc_feature (1)..(2): n is a, c, g, or t
nnagatagaaatgctggaaggaatgagtatgcaacaccataccatggagaatcagagttgaaaaggagaaggtccagaagcagggatcatgatcgagaaagatacagtaggtctatctcaccgccactaagggaacaaaggtataattaccgtggacgtgattttggcaatcctccttactactctatggagaaatcaagggggaagtatgctgaagttgataaacaaagatcgtcggggagtggtggatacattggtgggttgcaccagagatatgaaagccggcttggtggatactcaccaaggaaaaagaaaacatcactgcaagctgagcaggcaactaccaagactccttccaaggtcattcagtccccagaaaaaaaatcagccacatgggatcagcctcctgttaaagcaaaccaatctaactttcctaccactttcctgccaactgttggccagatggctcctactccattcagtttcagcgtgataaaggacccttcaactacagctgtgacaatgttggcaggtaatagtttgactgcagattctgtccagcttacacaagcaacgcgcccactcaggaggttgcacattgaaaatttgcctgattcagctacagaggataagttgattgactgcttgaatgacttcttattgtctactggcagtaaactccagcggtctaaaccatgcctcagttgtacgataaacagagaaaaacgtcaggcttttgtggaatttcttacaccagaggatgctacagcagctatttcttttgatggaaggtctctaaatggatctgtgttgagaattcgacgccccaaagaatatgttgaaacggtgaatgttacccctaagaaggcagaagagactgctttgatatctgatgttgttgcagattcaccatacaagtttcttggttgttctgtgagaactcagttggagtagaattggctgttgacagctatgaagttactctgatgtcatgtcagaatttcttcaaccgctatttttacctagggacaatcttgtatatccagcgaagccatctcacatctcattgtggaaaaaagagttaactgattcag

SEQ ID NO: 84843 - DNA, 988 bp, Zea Mays
  misc_feature (1)..(2): n is a, c, g, or t
nnagatagaaatgctggaaggaatgagtatgcaacaccataccatggagaatcagagttgaaaaggagaaggtccagaagcagggatcatgatcgagaaagatacagtaggtctatctcaccgccactaagggaacaaaggtataattaccgtggacgtgattttggcaatcctccttactactctatggagaaatcaagggggaagtatgctgaagttgataaacaaagatcgtcggggagtggtggatacattggtgggttgcaccagagatatgaaagccggcttggtggatactcaccaaggaaaaagaaaacatcactgcaagctgagcaggcaactaccaagactccttccaaggtcattcagtccccagaaaaaaaatcagccacatgggatcagcctcctgttaaagcaaaccaatctaactttcctaccactttcctgccaactgttggccagatggctcctactccattcagtttcagcgtgataaaggacccttcaactacagctgtgacaatgttggcaggtaatagtttgactgcagattctgtccagcttacacaagcaacgcgcccactcaggaggttgcacattgaaaatttgcctgattcagctacagaggataagttgattgactgcttgaatgacttcttattgtctactggcagtaaactccagcggtctaaaccatgcctcagttgtacgataaacagagaaaaacgtcaggcttttgtggaatttcttacaccagaggatgctacagcagctatttcttttgatggaaggtctctaaatggatctgtgttgagaattcgacgccccaaagaatatgttgaaacggtgtttgaagtttgcgtatttgcataaaatatgccatgttttgctgtggacctgatgctctagtcagttggaagtgagaatcctgacattgattggttagctattggtgccttttttttgcatggtgaaccttgaaatatat

SEQ ID NO: 84844 - DNA, 2992 bp, Zea Mays
ctcccgccctagcttgataatgtgtccaaccctgccatactgatgtactacctgaattattgtcagatcataatgtagagagataacatatacatacatagaatgatgtgcttacactatattttttccagcttatcagcaaattaagagatcttctacagtagcaagggctaagacagacacgatacgatatattccatatatatattcagtaaaaacacaataatttaatgccctctactgtcaaatgactaaaaagagatcgtcattgcaaaatatattgttccataccagccagctaagacgtccccgttcatcggggtccgaggagtgaccgaattctttcaggacttcttcccaggccggaataagcagtctctgcgccaaaatagcatccttgcattagaccatgcaccgtaccaccagcagcagcatttataggacgtccaattttatgttcgctgcctttattgttggttcaatcctgtcttcgcttctatcccgtacctctcccgaccgcaattgtagcagagaaacttctgggagctgactagcttccttgctcctcggtgttgtcatccgagaagctgcgccgcgcgccaatctgatcatctccatgcgctgaagatcgttggtgcccgccatgcttcccgatgattgctgccacatcgtcgctgaggaaatttcaagccccatagctgcacatatactcgacttctactacggcgacggcctgggcgatgacctctttgccgcggtgactgccacctctggcccattccctgccactgacgatgatgtttcttcgtctaccgctaccacccctcctatctgcggctacagtgaagacaccgcagctgctggtggagccacagcctacaccccgttgacatccttcgacaccactctcacagccctcctggaggaagagcagcaccatggccttgacgccgggttcctcccgcagatcgatggcctatcagaggtagcagcatactatccaactgccaccgatgaggccagcatagggcagttcgaccagatgggacttccagagaccttagacgagcaggtgcctcctccagtgcagatgagcagcagtgcatctgccttgatgccgctcgctacagactatgatgagtgcttcatggcagccgtagcagctggagggttcatgggtctggatggagccatgtatcagcaaactggagcagttcttccaggctgcagtgcagatgcatcacaacaggaattcttcagcagtgccggcagcaacagtatggtgatgattggcgagtatcagaagatgatggaaggtgaagggctgacaacaacatatgacgacacagattccatgcaagggacatttaacactaatgcagagatgcaggtaggaggaaataatcagcacctgataaacggatgcaacgggaacccagcaacgttacctccgacggaactatcagtactggaagactccacgtttaaggtcgtccgcttgtcgcctgaagagagaaaggaaaagatccataggtacataaagaaacggaacgagagaaatttccgcaaaaaaataaagtacgcatgtagaaaaaccttggcggatagcaggccccgtgtccgtggaaggtttgccaagaatgatgaactctgtgaagcagcgcaatcaggctcccagagtcatgaacattatgaacaaactgaccatatgaaagaagaggacatgctggacacatctgacattcttgcgcaactaaatggattaaatccctacaactacaagtataaatccaccattgaatcatggatatgattctcaagtctcaaccacacaaaaactaagacccaatgtcttatttgaagttgtgcgacgtcgagcacagtttttttatttccattaaaataaacttacatcattagaagctcaagaatttagttcaactaatgtagatttaatgtatgtgtcaatctgctgtcacttgtttaccattgtcacaagtgaatgtggtagtgagtctccagaagagtcatttgtgtatataactatgtcatctatagaaataaaagttctgaggatctcttaagtatttcttcgtagcagagtctagatttgatctgctcatcagagaatttcaaggatagaatgtagcaatggtacatcagagaatcaaaaaacatggcaacagagcacagtaataagtaaacttaatatattgggcctttttagcctgtgcccttatgtgcagaaggatcaagagttggaactaacaagaacaatatgaataagcatagcaaaaatgttcaacattatactctttgagtttagtaaggttaatgatcttgctgataaatcataggcccatgaaattccagatatccaattctgttgattttctgtttaatttgagttatccaagaacaaactacagatctatagagagtaatgtatccacagttgcattacggcaaagagtaaaatcttaatgaactaaaaggtttgacgctacggggtaagtaggcaatgtaccaggttgcaaatctccattacagctaagctacaatgagtggtcaaatttacaaactatgcttcacccaaaccagcattctacagaattggaactccgactggatggcaatctagaaaacaacactcagaattccatgtcagaatttactctggcaaaaaagatttgatcgatgaaatcaatacgattggatccttaatgaggtgtttggtttgatgaatcactctatccaaaatgaagtggtgcataataggttcattcctcaaatttggtgggatgactctattccacatattagtactaaacaactaactttgaggaatgaggtggtgatggattaactcactccatttcacaaaccaaacaaaaaagtgaagtgtgagaagatgatggactacatcattcctcaaaccaaacactctataaattgatgtacagtttcttgaaccacacttgtctattcgtac

SEQ ID NO: 84845 - DNA, 2407 bp, Zea Mays
cgagcggctctggtaccatcgtatacaaataatgatgatgttgttcgaggaggacgcagccgccatggccatcccagatgccttgtgcattgaggaaatttcaagccccatagctgcacatatactcgacttctactacggcgacggcctgggcgatgacctctttgccgcggtgactgccacctctggcccattccctgccactgacgatgatgtttcttcgtctaccgctaccacccctcctatctgcggctacagtgaagacaccgcagctgctggtggagccacagcctacaccccgttgacatccttcgacaccactctcacagccctcctggaggaagagcagcaccatggccttgacgccgggttcctcccgcagatcgatggcctatcagaggtagcagcatactatccaactgccaccgatgaggccagcatagggcagttcgaccagatgggacttccagagaccttagacgagcaggtgcctcctccagtgcagatgagcagcagtgcatctgccttgatgccgctcgctacagactatgatgagtgcttcatggcagccgtagcagctggagggttcatgggtctggatggagccatgtatcagcaaactggagcagttcttccaggctgcagtgcagatgcatcacaacaggaattcttcagcagtgccggcagcaacagtatggtgatgattggcgagtatcagaagatgatggaaggtgaagggctgacaacaacatatgacgacacagattccatgcaagggacatttaacactaatgcagagatgcaggtaggaggaaataatcagcacctgataaacggatgcaacgggaacccagcaacgttacctccgacggaactatcagtactggaagactccacgtttaaggtcgtccgcttgtcgcctgaagagagaaaggaaaagatccataggtacataaagaaacggaacgagagaaatttccgcaaaaaaataaagtacgcatgtagaaaaaccttggcggatagcaggccccgtgtccgtggaaggtttgccaagaatgatgaactctgtgaagcagcgcaatcaggctcccagagtcatgaacattatgaacaaactgaccatatgaaagaagaggacatgctggacacatctgacattcttgcgcaactaaatggattaaatccctacaactacaagtataaatccaccattgaatcatggatatgattctcaagtctcaaccacacaaaaactaagacccaatgtcttatttgaagttgtgcgacgtcgagcacagtttttttatttccattaaaataaacttacatcattagaagctcaagaatttagttcaactaatgtagatttaatgtatgtgtcaatctgctgtcacttgtttaccattgtcacaagtgaatgtggtagtgagtctccagaagagtcatttgtgtatataactatgtcatctatagaaataaaagttctgaggatctcttaagtatttcttcgtagcagagtctagatttgatctgctcatcagagaatttcaaggatagaatgtagcaatggtacatcagagaatcaaaaaacatggcaacagagcacagtaataagtaaacttaatatattgggcctttttagcctgtgcccttatgtgcagaaggatcaagagttggaactaacaagaacaatatgaataagcatagcaaaaatgttcaacattatactctttgagtttagtaaggttaatgatcttgctgataaatcataggcccatgaaattccagatatccaattctgttgattttctgtttaatttgagttatccaagaacaaactacagatctatagagagtaatgtatccacagttgcattacggcaaagagtaaaatcttaatgaactaaaaggtttgacgctacggggtaagtaggcaatgtaccaggttgcaaatctccattacagctaagctacaatgagtggtcaaatttacaaactatgcttcacccaaaccagcattctacagaattggaactccgactggatggcaatctagaaaacaacactcagaattccatgtcagaatttactctggcaaaaaagatttgatcgatgaaatcaatacgattggatccttaatgaggtgtttggtttgatgaatcactctatccaaaatgaagtggtgcataataggttcattcctcaaatttggtgggatgactctattccacatattagtactaaacaactaactttgaggaatgaggtggtgatggattaactcactccatttcacaaaccaaacaaaaaagtgaagtgtgagaagatgatggactacatcattcctcaaaccaaacactctataaattgatgtacagtttcttgaaccacacttgtctattcgtac

SEQ ID NO: 84846 - DNA, 2551 bp, Zea Mays
cgtaactttaccagtccgcgccggcggcaacctaccctgctttggctccgggcctccggctgggtggctagcgtgcctctttttgttgtcgtaaaccctctctctctctctcgcgcagtctcgctccctctgtctctctcttagcgacgactgggcggccgtcgctgctggcctgctgccctacgccaggtgcccaagtcttcttcgggctcgtcgtcgtcggcgacgaccaccaccaggtccctgttgtttttaagaaaaacaaaacaatggaggcaacattagcattctcccaggacagcccaccaatttcgataatttgtgcagcaaagtttgtgggtctacccctaaccattgatcctagccttgcttctggcttggcacccaccctacgttttgcttctggagaatcactccatggtgtcaacccaatcctcctgtacattgccagcggtgcaacaattccctgcttctctgggaagaatgatattgagtttgggcatgttgttgaatggcttgaatatgtccccatctttctttcaggctctgaatttgaaaatgcctgcttatttgttgatggattcttggcctcccggacctttctggttggtcatggcctcacaattgctgacattgtagtttggtcaaatcttgctggaattggtcaacgatgggagagtctaaggaaatcaaagaaataccaaaatcttgtccgctggttcaacagcatagattcagaatacagtgacacactgaacgaagttttggctgcatatgttgggaaaagaggaattggaaaatctcctgcaccaagccttaaggaaaaggtacatgtttcaaaggatccatcagctccagaagttgatctccctggtgcaaaagttgggaaagtctgcgttcgttttgccccagaacctagcggttacctccatatcgggcatgcaaaggctgggctattgaacaaatactttgctgaaagatatcaagggcgcctaatagttcgatttgatgatacaaacccttcaaaagaaagtaatgagtttgtcgagaacgttttgaaagatattgagacgttggggatcaaatatgatgctgtcacatacacatctgattatttcccaaagttaatggaaatggctggaagcttgattaaacagggtaaagcatatattgatgacacaccgaaggagcaaatgaggaaagagaggatggatggtattgagtcaaggtgcagaaatagtaccgtggaggaaaatctgtcattatggaacgagatggttaatggaactgaaaggggtatgcagtgctgtgtacggggtaaacttgacatgcaggatcctaacaagtcactcagggatcctgtttactaccgctgtaatattgatcctcaccatcgtgttggttcaaagtacaaggtctatccaacatatgactttgcttgcccatttgttgatgcattggagggggtgacgcatgcccttcggtccagtgaatatcatgacaggaatgcacaatattatcgaatccttcaagacatggggttgaggagagtagaaatttatgaattcagccgattgaatatggtttacactcttctaagcaagcggaagcttctctggtttgtacaaaacaagaaggtcgaagattggactgatccacgttttcctactgtccaagggatagtacgtcgtggcttgaagattgaggcattgatacaatttatactccaacagggtgcttcaaaaaatctgaatctcatggagtgggataaactctggacaatcaacaagaagataattgatccattgtgcgcaaggcatactgctgtgctaaaagaccagcgtgtcatctttactcttacaaatggtccagagaagccatttgttcgaattttaccaaggcataagaaatttgtgggtgctggaaagaaggctacaaccttcgccaacagaatttggttagattatgctgatgcagcagccattagcaagggtgaggaagtaacccttatggattgggggaatgctatcgttaaagagatcaaggtggagagtggagtaattactgaactagttggagaattacatcttgaggggtctgtgaagacaacaaaattgaagatcacatggctagcagatatagaggagctagtccccctctcattggttgaatttgattatctcatcagcaagaaaaagctagaggaagatgatgacttcctcgagaatctcaacccttgcactcgacgagaaaacccagcccttggagatgcaaacatgatgaacctcaagcgtggagagatcatacagctcgagaggaaaggctactataggtcttggcctagagatctttggaaaagatctttttttcaatttcttcaagagacatggttggatgagtttttttgtgatggatgcgtagtgtgtgcactgtggcgcttacaacgacccaaacaaatatcgctaagcgcgcgtaatattgtactatgatcatttggcagttgattgtattaaccaaacaaggaaacggatatcgtagacctctgtccaac

SEQ ID NO: 84847 - DNA, 2632 bp, Zea Mays
tgggtggctagcgtgcctctttttgttgtcgtaaaccctctctctctctctcgcgcagtctcgctccctctgtctctctcttagcgacgactgggcggccgtcgctgctggcctgctgccctacgccaggtgcccaagtcttcttcgggctcgtcgtcgtcggcgacgaccaccaccaggtccctgttgtttttaagaaaaacaaaacaatggaggcaacattagcattctcccaggacagcccaccaatttcgataatttgtgcagcaaagtttgtgggtctacccctaaccattgatcctagccttgcttctggcttggcacccaccctacgttttgcttctggagaatcactccatggtgtcaacccaatcctcctgtacattgccagcggtgcaacaattccctgcttctctgggaagaatgatattgagtttgggcatgttgttgaatggcttgaatatgtccccatctttctttcaggctctgaatttgaaaatgcctgcttatttgttgatggattcttggcctcccggacctttctggttggtcatggcctcacaattgctgacattgtagtttggtcaaatcttgctggaattggtcaacgatgggagagtctaaggaaatcaaagaaataccaaaatcttgtccgctggttcaacagcatagattcagaatacagtgacacactgaacgaagttttggctgcatatgttgggaaaagaggaattggaaaatctcctgcaccaagccttaaggaaaaggtacatgtttcaaaggatccatcagctccagaagttgatctccctggtgcaaaagttgggaaagtctgcgttcgttttgccccagaacctagcggttacctccatatcgggcatgcaaaggctgggctattgaacaaatactttgctgaaagatatcaagggcgcctaatagttcgatttgatgatacaaacccttcaaaagaaagtaatgagtttgtcgagaacgttttgaaagatattgagacgttggggatcaaatatgatgctgtcacatacacatctgattatttcccaaagttaatggaaatggctggaagcttgattaaacagggtaaagcatatattgatgacacaccgaaggagcaaatgaggaaagagaggatggatggtattgagtcaaggtgcagaaatagtaccgtggaggaaaatctgtcattatggaacgagatggttaatggaactgaaaggggtatgcagtgctgtgtacggggtaaacttgacatgcaggatcctaacaagtcactcagggatcctgtttactaccgctgtaatattgatcctcaccatcgtgttggttcaaagtacaaggtctatccaacatatgactttgcttgcccatttgttgatgcattggagggggtgacgcatgcccttcggtccagtgaatatcatgacaggaatgcacaatattatcgaatccttcaagacatggggttgaggagagtagaaatttatgaattcagccgattgaatatggtttacactcttctaagcaagcggaagcttctctggtttgtacaaaacaagaaggtcgaagattggactgatccacgttttcctactgtccaagggatagtacgtcgtggcttgaagattgaggcattgatacaatttatactccaacagggtgcttcaaaaaatctgaatctcatggagtgggataaactctggacaatcaacaagaagataattgatccattgtgcgcaaggcatactgctgtgctaaaagaccagcgtgtcatctttactcttacaaatggtccagagaagccatttgttcgaattttaccaaggcataagaaatttgtgggtgctggaaagaaggctacaaccttcgccaacagaatttggttagattatgctgatgcagcagccattagcaagggtgaggaagtaacccttatggattgggggaatgctatcgttaaagagatcaaggtggagagtggagtaattactgaactagttggagaattacatcttgaggggtctgtgaagacaacaaaattgaagatcacatggctagcagatatagaggagctagtccccctctcattggttgaatttgattatctcatcagcaagaaaaagctagaggaagatgatgacttcctcgagaatctcaacccttgcactcgacgagaaaacccagcccttggagatgcaaacatgatgaacctcaagcgtggagagatcatacagctcgagaggaaaggctactataggtgtgatgccccttttatcagatcgttgaaaccggtggttctgtttgcgatcccagatggccggcagcaggccttgcttaactaggtcttggcctagagatctttggaaaaggtattacaaagaataagttgttttatgaatggacaatgagaatggttatcacacatgtttttttttgtttctagatctttttttcaatttcttcaagagacatggttggatgagtttttttgtgatggatgcgtagtgtgtgcactgtggcgcttacaacgacccaaacaaatatcgctaagcgcgcgtaatattgtactgtaagtaccaacttagcttattagaacatttgtcagtttttagttaat

SEQ ID NO: 84848 - DNA, 2507 bp, Zea Mays
tgggtggctagcgtgcctctttttgttgtcgtaaaccctctctctctctctcgcgcagtctcgctccctctgtctctctcttagcgacgactgggcggccgtcgctgctggcctgctgccctacgccaggtgcccaagtcttcttcgggctcgtcgtcgtcggcgacgaccaccaccaggtccctgttgtttttaagaaaaacaaaacaatggaggcaacattagcattctcccaggacagcccaccaatttcgataatttgtgcagcaaagtttgtgggtctacccctaaccattgatcctagccttgcttctggcttggcacccaccctacgttttgcttctggagaatcactccatggtgtcaacccaatcctcctgtacattgccagcggtgcaacaattccctgcttctctgggaagaatgatattgagtttgggcatgctctgaatttgaaaatgcctgcttatttgttgatggattcttggcctcccggacctttctggttggtcatggcctcacaattgctgacattgtagtttggtcaaatcttgctggaattggtcaacgatgggagagtctaaggaaatcaaagaaataccaaaatcttgtccgctggttcaacagcatagattcagaatacagtgacacactgaacgaagttttggctgcatatgttgggaaaagaggaattggaaaatctcctgcaccaagccttaaggaaaaggtacatgtttcaaaggatccatcagctccagaagttgatctccctggtgcaaaagttgggaaagtctgcgttcgttttgccccagaacctagcggttacctccatatcgggcatgcaaaggctgggctattgaacaaatactttgctgaaagatatcaagggcgcctaatagttcgatttgatgatacaaacccttcaaaagaaagtaatgagtttgtcgagaacgttttgaaagatattgagacgttggggatcaaatatgatgctgtcacatacacatctgattatttcccaaagttaatggaaatggctggaagcttgattaaacagggtaaagcatatattgatgacacaccgaaggagcaaatgaggaaagagaggatggatggtattgagtcaaggtgcagaaatagtaccgtggaggaaaatctgtcattatggaacgagatggttaatggaactgaaaggggtatgcagtgctgtgtacggggtaaacttgacatgcaggatcctaacaagtcactcagggatcctgtttactaccgctgtaatattgatcctcaccatcgtgttggttcaaagtacaaggtctatccaacatatgactttgcttgcccatttgttgatgcattggagggggtgacgcatgcccttcggtccagtgaatatcatgacaggaatgcacaatattatcgaatccttcaagacatggggttgaggagagtagaaatttatgaattcagccgattgaatatggtttacactcttctaagcaagcggaagcttctctggtttgtacaaaacaagaaggtcgaagattggactgatccacgttttcctactgtccaagggatagtacgtcgtggcttgaagattgaggcattgatacaatttatactccaacagggtgcttcaaaaaatctgaatctcatggagtgggataaactctggacaatcaacaagaagataattgatccattgtgcgcaaggcatactgctgtgctaaaagaccagcgtgtcatctttactcttacaaatggtccagagaagccatttgttcgaattttaccaaggcataagaaatttgtgggtgctggaaagaaggctacaaccttcgccaacagaatttggttagattatgctgatgcagcagccattagcaagggtgaggaagtaacccttatggattgggggaatgctatcgttaaagagatcaaggtggagagtggagtaattactgaactagttggagaattacatcttgaggggtctgtgaagacaacaaaattgaagatcacatggctagcagatatagaggagctagtccccctctcattggttgaatttgattatctcatcagcaagaaaaagctagaggaagatgatgacttcctcgagaatctcaacccttgcactcgacgagaaaacccagcccttggagatgcaaacatgatgaacctcaagcgtggagagatcatacagctcgagaggaaaggctactataggtcttggcctagagatctttggaaaaggtattacaaagaataagttgttttatgaatggacaatgagaatggttatcacacatgtttttttttgtttctagatctttttttcaatttcttcaagagacatggttggatgagtttttttgtgatggatgcgtagtgtgtgcactgtggcgcttacaacgacccaaacaaatatcgctaagcgcgcgtaatattgtactgtaagtaccaacttagcttattagaacatttgtcagtttttagttaat

SEQ ID NO: 84849 - DNA, 2808 bp, Zea Mays
tgggtggctagcgtgcctctttttgttgtcgtaaaccctctctctctctctcgcgcagtctcgctccctctgtctctctcttagcgacgactgggcggccgtcgctgctggcctgctgccctacgccaggtgcccaagtcttcttcgggctcgtcgtcgtcggcgacgaccaccaccaggtccctgttgtttttaagaaaaacaaaacaatggaggcaacattagcattctcccaggacagcccaccaatttcgataatttgtgcagcaaagtttgtgggtctacccctaaccattgatcctagccttgcttctggcttggcacccaccctacgttttgcttctggagaatcactccatggtgtcaacccaatcctcctgtacattgccagcggtgcaacaattccctgcttctctgggaagaatgatattgagtttgggcatgttgttgaatggcttgaatatgtccccatctttctttcaggctctgaatttgaaaatgcctgcttatttgttgatggattcttggcctcccggacctttctggttggtcatggcctcacaattgctgacattgtagtttggtcaaatcttgctggaattggtcaacgatgggagagtctaaggaaatcaaagaaataccaaaatcttgtccgctggttcaacagcatagattcagaatacagtgacacactgaacgaagttttggctgcatatgttgggaaaagaggaattggaaaatctcctgcaccaagccttaaggaaaaggtacatgtttcaaaggatccatcagctccagaagttgatctccctggtgcaaaagttgggaaagtctgcgttcgttttgccccagaacctagcggttacctccatatcgggcatgcaaaggctgggctattgaacaaatactttgctgaaagatatcaagggcgcctaatagttcgatttgatgatacaaacccttcaaaagaaagtaatgagtttgtcgagaacgttttgaaagatattgagacgttggggatcaaatatgatgctgtcacatacacatctgattatttcccaaagttaatggaaatggctggaagcttgattaaacagggtaaagcatatattgatgacacaccgaaggagcaaatgaggaaagagaggatggatggtattgagtcaaggtgcagaaatagtaccgtggaggaaaatctgtcattatggaacgagatggttaatggaactgaaaggggtatgcagtgctgtgtacggggtaaacttgacatgcaggatcctaacaagtcactcagggatcctgtttactaccgctgtaatattgatcctcaccatcgtgttggttcaaagtacaaggtctatccaacatatgactttgcttgcccatttgttgatgcattggagggggtgacgcatgcccttcggtccagtgaatatcatgacaggaatgcacaatattatcgaatccttcaagacatggggttgaggagagtagaaatttatgaattcagccgattgaatatggtttacactcttctaagcaagcggaagcttctctggtttgtacaaaacaagaaggtcgaagattggactgatccacgttttcctactgtccaagggatagtacgtcgtggcttgaagattgaggcattgatacaatttatactccaacagggtgcttcaaaaaatctgaatctcatggagtgggataaactctggacaatcaacaagaagataattgatccattgtgcgcaaggcatactgctgtgctaaaagaccagcgtgtcatctttactcttacaaatggtccagagaagccatttgttcgaattttaccaaggcataagaaatttgtgggtgctggaaagaaggctacaaccttcgccaacagaatttggttagattatgctgatgcagcagccattagcaagggtgaggaagtaacccttatggattgggggaatgctatcgttaaagagatcaaggtggagagtggagtaattactgaactagttggagaattacatcttgaggggtctgtgaagacaacaaaattgaagatcacatggctagcagatatagaggagctagtccccctctcattggttgaatttgattatctcatcagcaagaaaaagaggaagatgatgacttcctcgagaatctcaacccttgcactcgacgagaaaacccagcccttggagatgcaaacatgatgaacctcaagcgtggagagatcatacagctcgagaggaaaggctactataggtgtgatgccccttttatcagatcgttgaaaccggtggttctgtttgcgatcccagatggccggcagcaggccttgcttaactaggcatgatgaccacttttggcacatggaattcctgagatatcggagtccgcaatcaatattgttgcattatacactttgatattgtactgtgactgggcttactcatggtgcgctagatggccaggcctatcctgtcaaccaagcagcacagccattttgattttggtctattatacttttacccgagcttaaaagtttcttatacttttctggcagtgcctttgctatttttattgcattgtctttttttcttttgctcatgtgttaattagcctagtgcctgtttggatatacatgactagttactgattagggctaaaaaatagtccaagttagctatggttggctgaaaaactagttgtaggctcggctgtagcccatctattagtcctcctgttttgatgcactagagctaattttgactaatttttagctagctagcaattagctcagct

SEQ ID NO: 84850 - DNA, 2772 bp, Zea Mays
tgggtggctagcgtgcctctttttgttgtcgtaaaccctctctctctctctcgcgcagtctcgctccctctgtctctctcttagcgacgactgggcggccgtcgctgctggcctgctgccctacgccaggtgcccaagtcttcttcgggctcgtcgtcgtcggcgacgaccaccaccaggtccctgttgtttttaagaaaaacaaaacaatggaggcaacattagcattctcccaggacagcccaccaatttcgataatttgtgcagcaaagtttgtgggtctacccctaaccattgatcctagccttgcttctggcttggcacccaccctacgttttgcttctggagaatcactccatggtgtcaacccaatcctcctgtacattgccagcggtgcaacaattccctgcttctctgggaagaatgatattgagtttgggcatgctctgaatttgaaaatgcctgcttatttgttgatggattcttggcctcccggacctttctggttggtcatggcctcacaattgctgacattgtagtttggtcaaatcttgctggaattggtcaacgatgggagagtctaaggaaatcaaagaaataccaaaatcttgtccgctggttcaacagcatagattcagaatacagtgacacactgaacgaagttttggctgcatatgttgggaaaagaggaattggaaaatctcctgcaccaagccttaaggaaaaggtacatgtttcaaaggatccatcagctccagaagttgatctccctggtgcaaaagttgggaaagtctgcgttcgttttgccccagaacctagcggttacctccatatcgggcatgcaaaggctgggctattgaacaaatactttgctgaaagatatcaagggcgcctaatagttcgatttgatgatacaaacccttcaaaagaaagtaatgagtttgtcgagaacgttttgaaagatattgagacgttggggatcaaatatgatgctgtcacatacacatctgattatttcccaaagttaatggaaatggctggaagcttgattaaacagggtaaagcatatattgatgacacaccgaaggagcaaatgaggaaagagaggatggatggtattgagtcaaggtgcagaaatagtaccgtggaggaaaatctgtcattatggaacgagatggttaatggaactgaaaggggtatgcagtgctgtgtacggggtaaacttgacatgcaggatcctaacaagtcactcagggatcctgtttactaccgctgtaatattgatcctcaccatcgtgttggttcaaagtacaaggtctatccaacatatgactttgcttgcccatttgttgatgcattggagggggtgacgcatgcccttcggtccagtgaatatcatgacaggaatgcacaatattatcgaatccttcaagacatggggttgaggagagtagaaatttatgaattcagccgattgaatatggtttacactcttctaagcaagcggaagcttctctggtttgtacaaaacaagaaggtcgaagattggactgatccacgttttcctactgtccaagggatagtacgtcgtggcttgaagattgaggcattgatacaatttatactccaacagggtgcttcaaaaaatctgaatctcatggagtgggataaactctggacaatcaacaagaagataattgatccattgtgcgcaaggcatactgctgtgctaaaagaccagcgtgtcatctttactcttacaaatggtccagagaagccatttgttcgaattttaccaaggcataagaaatttgtgggtgctggaaagaaggctacaaccttcgccaacagaatttggttagattatgctgatgcagcagccattagcaagggtgaggaagtaacccttatggattgggggaatgctatcgttaaagagatcaaggtggagagtggagtaattactgaactagttggagaattacatcttgaggggtctgtgaagacaacaaaattgaagatcacatggctagcagatatagaggagctagtccccctctcattggttgaatttgattatctcatcagcaagaaaaagctagaggaagatgatgacttcctcgagaatctcaacccttgcactcgacgagaaaacccagcccttggagatgcaaacatgatgaacctcaagcgtggagagatcatacagctcgagaggaaaggctactataggtgtgatgccccttttatcagatcgttgaaaccggtggttctgtttgcgatcccagatggccggcagcaggccttgcttaactaggcatgatgaccacttttggcacatggaattcctgagatatcggagtccgcaatcaatattgttgcattatacactttgatattgtactgtgactgggcttactcatggtgcgctagatggccaggcctatcctgtcaaccaagcagcacagccattttgattttggtctattatacttttacccgagcttaaaagtttcttatacttttctggcagtgcctttgctatttttattgcattgtctttttttcttttgctcatgtgttaattagcctagtgcctgtttggatatacatgactagttactgattagggctaaaaaatagtccaagttagctatggttggctgaaaaactagttgtaggctcggctgtagcccatctattagtcctcctgttttgatgcactagagctaattttgactaatttttagctagctagcaattagctcagct

SEQ ID NO: 84851 - DNA, 652 bp, Zea Mays
cacgcttactgtcaattccatttaaaaaaaatcctttgtgaaagcagcggtatgtctactgcactatacttgacagcattgcgaaggtgactggcatcataaagtttgatctgcatgctgaaccggaaagtggtgtgaaagaacttgaagtgggaggaaatgtacaaggcatatatgacctgggacctggtagatttggttcagaggcgatttttgttcccaagcatccaggtgtgtccggagaagaagatgacggctatttgatattctttgtacacgacgagaatacagggaaatctgaagtaaatgttatcgatgcaaagacaatgtctgctgatccagttgcggtggttgagcttcctaatagggttccttatggattccatgccttctttgtaactgaggaccaactggctcgacaggcggaggggcagtgaagatacggcacctgcagattctgcacacgcgggtacatgttggaagttattgcaggacatgtatatgtataggacaagtttattacacatgtattcgaaccacacattacacaagtttattgcaggacgtgtattcgaaccacacattacacatgtatatgtgtaggacaagtttattacagtcctgattgattgcaaattactcagtctgttgc

SEQ ID NO: 84852 - DNA, 1973 bp, Zea Mays
ccgacgagtggcgttgaggacagaagacgacgagtggagtggagtaggacacgaggtggttccggccggcccactcgcagaatcttctgccactgcccttccatctcgtcccttagctacaagtcatctcgccgcaaccggaacccgcagccatggggacggaggcggagcagccggacatggacagccaccgaaacgacggcgtcgtggtggtgccagcgccgcgcccgcgtaaggggctcgcctcctgggcgcttgacctgctcgagtccctcgccgtgcgcctcggccacgacaagaccaagccgctccactggctctccggcaacttcgcccccgtcgtcgaggagaccccgccggccccaaaccttagcgtccgcggacacctcccggagtgcttgaatggagagtttgtcagggttgggcctaatccgaagtttgctcctgttgcggggtatcactggtttgatggagacgggatgattcatgccatgcgtattaaggatggaaaagctacctatgtatcaagatatgtgaagactgcccgcctcaaacaagaggagtattttggtggagcaaagtttatgaagattggagaccttaagggattttttggattgtttatggtccaaatgcagcaacttcggaaaaaattcaaagtcttggattttacctatggatttgggacagctaatactgcacttatatatcatcatggtaaactcatggccttgtcagaagcagataagccatatgttgttaaggtccttgaagatggagacttgcagactcttggcttgttggattatgacaaaaggttgaaacattcttttactgcccatccaaaggttgacccttttacagatgaaatgttcacattcggatattcacatgaacctccatactgtacataccgtgtgattaacaaagaaggagctatgcttgatcctgtgccaataacaataccggaatctgtaatgatgcatgattttgccatcacagagaattactctatttttatggacctccctttattgttccgaccaaaggaaatggtgaagaacggtgagtttatctacaagtttgatcctacaaagaaaggtcgttttggtattctcccccgctatgcaaaggatgacaaactcatcagatggtttcaactccctaattgtttcatattccataatgctaatgcttgggaagagggtgatgaagttgttctcattacctgccgccttgagaatccagatttggacaaggtacgagatgagattcaacatgaaaacgggtgctgcttcacaaaagcaattgtctgtttctgctgtggattttcctcgtgttaatgagagctatactggcagaaagcagcggtatgtctactgcactatacttgacagcattgcgaaggtgactggcatcataaagtttgatctgcatgctgaaccggaaagtggtgtgaaagaacttgaagtgggaggaaatgtacaaggcatatatgacctgggacctggtagatttggttcagaggcgatttttgttcccaagcatccaggtgtgtccggagaagaagatgacggctatttgatattctttgtacacgacgagaatacagggaaatctgaagtaaatgttatcgatgcaaagacaatgtctgctgatccagttgcggtggttgagcttcctaatagggttccttatggattccatgccttctttgtaactgaggaccaactggctcgacaggcggaggggcagtgaagatacggcacctgcagattctgcacacgcgggtacatgttggaagttattgcaggacatgtatatgtataggacaagtttattacacatgtattcgaaccacacattacacaagtttattgcaggacgtgtattcgaaccacacattacacatgtatatgtgtaggacaagtttattacagtcctgattgattgcaaattactcagtctgttgc

SEQ ID NO: 84853 - DNA, 2030 bp, Zea Mays
ccgacgagtggcgttgaggacagaagacgacgagtggagtggagtaggacacgaggtggttccggccggcccactcgcagaatcttctgccactgcccttccatctcgtcccttagctacaagtcatctcgccgcaaccggaacccgcagccatggggacggaggcggagcagccggacatggacagccaccgaaacgacggcgtcgtggtggtgccagcgccgcgcccgcgtaaggggctcgcctcctgggcgcttgacctgctcgagtccctcgccgtgcgcctcggccacgacaagaccaagccgctccactggctctccggcaacttcgcccccgtcgtcgaggagaccccgccggccccaaaccttagcgtccgcggacacctcccgttatctacaggagtgcttgaatggagagtttgtcagggttgggcctaatccgaagtttgctcctgttgcggggtatcactggtttgatggagacgggatgattcatgccatgcgtattaaggatggaaaagctacctatgtatcaagatatgtgaagactgcccgcctcaaacaagaggagtattttggtggagcaaagtttatgaagattggagaccttaagggattttttggattgtttatggtccaaatgcagcaacttcggaaaaaattcaaagtcttggattttacctatggatttgggacagctaatactgcacttatatatcatcatggtaaactcatggccttgtcagaagcagataagccatatgttgttaaggtccttgaagatggagacttgcagactcttggcttgttggattatgacaaaaggttgaaacattcttttactgcccatccaaaggttgacccttttacagatgaaatgttcacattcggatattcacatgaacctccatactgtacataccgtgtgattaacaaagaaggagctatgcttgatcctgtgccaataacaataccggaatctgtaatgatgcatgattttgccatcacagagaattactctatttttatggacctccctttattgttccgaccaaaggaaatggtgaagaacggtgagtttatctacaagtttgatcctacaaagaaaggtcgttttggtattctcccccgctatgcaaaggatgacaaactcatcagatggtttcaactccctaattgtttcatattccataatgctaatgcttgggaagagggtgatgaagttgttctcattacctgccgccttgagaatccagatttggacaaggtgaatggatatcaaagtgacaagctcgaaaacttcgggaatgagctgtacgagatgagattcaacatgaaaacgggtgctgcttcacaaaagcaattgtctgtttctgctgtggattttcctcgtgttaatgagagctatactggcagaaagcagcggtatgtctactgcactatacttgacagcattgcgaaggtgactggcatcataaagtttgatctgcatgctgaaccggaaagtggtgtgaaagaacttgaagtgggaggaaatgtacaaggcatatatgacctgggacctggtagatttggttcagaggcgatttttgttcccaagcatccaggtgtgtccggagaagaagatgacggctatttgatattctttgtacacgacgagaatacagggaaatctgaagtaaatgttatcgatgcaaagacaatgtctgctgatccagttgcggtggttgagcttcctaatagggttccttatggattccatgccttctttgtaactgaggaccaactggctcgacaggcggaggggcagtgaagatacggcacctgcagattctgcacacgcgggtacatgttggaagttattgcaggacatgtatatgtataggacaagtttattacacatgtattcgaaccacacattacacaagtttattgcaggacgtgtattcgaaccacacattacacatgtatatgtgtaggacaagtttattacagtcctgattgattgcaaattactcagtctgttgc

SEQ ID NO: 84854 - DNA, 280 bp, Zea Mays
tacggaacgaacgacagcatggtagctggtgcgggagttatacctgcttgttgatctcgacgccgatggcgcgcttggtgacgttccagacgctcccggtgcggccgtggtagaacttgtgcggcatgcccttgtgcacggcgccgttaaccttgacgtcgacgtagtcgccgatcttgtaggtgcgcaggtacgtggtgagtgggatgtaccccttcttgcggaagggccgcgcgaacaggtcgcgggtccgcgaccgcagcccgtgccccgccggcat

SEQ ID NO: 84855 - DNA, 1299 bp, Zea Mays
ccagttttgcagtttataaaaacagtgctaggcttattcactggagttttgctggagaagcaaattgtggtaatatgcccaaatctgggtgttctgtcagcaattcttttgtctattataccgatgataaggccgttccagtggcaaagtctgttgcttccgattcttccgaggaaattgattgattttcttgatgcccctgtacctttcattgctggtgtacaacataaaccccctgatatcaagatgaaaggatctagtcttgtcagggtcaatgtccagaaagatcaggtccaaggcatgttcactgcctcgacttccacattacaaggagctcgtttctaatctcggtccacttcatgccagactatcgtgtgagaattctttggctaagagacatcccatctataaatgcaatgaagttcaggctgatgtagcttggaagttcttaaatataatgagaacctacttggaatcactttgctctgacctgcgctttcataccattacaaatgtacagtcaaataatgacagggtttctttgcttctgaaagacagtttcattgattcgttcccctcaaatgatagaccatttataaagctctttgtggagacgcagatgttttctgttctatcagattctcgactgtccagtttcgaaaatgaacggacataaaggcattgttccagtggagatcaaacacagtgatactctctgctttggttttggcgtctgcttcctggtgctacctttacatgtcatttccaatgcgcaggggattgggaagataaaaacaaggcacgtcgcgtggagtgcggaggatttcgattttgccgaagccacatcactaattagaagtgttctgaaaagtatctaggctcgtctgcaatgtaagaagaatacgacggactctcaggttataggaaatagatgcaacccgatcttctaaatgggaccgagctacatgtggcgcacaaggaaaacaaatgatgatgaatatagttgggtttctgcttgcgatcttgttttgctatgtaacactagtgtgtagtgacttagctatatttcatatagggaaaagaagaaccctgtatataggtgaagttattcattggagttacgcgtccccggtttgatcatgtaaatcatgacctggtgcgcaagaaaccggcatcagttttgaatagggaacgttttgcaatttagtgcatttaaggccatggagtggaacaacttcgacgtatgttcgattggacctgctatatcatcactattcacagcagctactgttttgctaa

SEQ ID NO: 84856 - DNA, 2484 bp, Zea Mays
aaaaacttaaaatttcaggctcgcctaatagagaggactccatccatgagtgacctgaatgaagtgatatttgggcaggaacatctgtctcgagatgatctgtcttttatcttctccctcaaggtatcagacaatgcgccactatatggtgtttgtctgcatgttcaggaaatagttcaaaaggcacctggtatactaggtgctgtctcacccttaaaccctacttcctataagcccagtcgtttcttggtttctgcaccacgttgttactgtctacttacaaaggtacctttttttgagctacactatgagatgctaaacagcattattgcacaggagaggcttgacagaataacacagtttgctagtgaaattactctagctgagccagttcctcgtcctattaaagaacaagatggagtagacggtgattttgattcctcaaatgggattccatatattgactggacagaatatgctgtacctgtcaacagtatatcaggtctcatttcttcatccagtattccatcagaaagggacatgtcttcatatttgttcaggagctgggagcctaattcttctcaaagtatatctggtagtgagatttcagattctagttatgtaagagaagttgaggaggcaaggcatagtttccagcattatgaagattgtatagtagagaacttggaaccacgttgtgatagctttgggagagcaagttacatgtatgataatgggcatacttccccagatcttctgtccatgcattctcctgcctctagcagattagagcgtgcacaaagtgtggagtctttagaaagttcagtcaaaggtgcaacatcagatgaagaatatgaagtaaatgtgaagcatgaagtgattgttgatgatgaaaaagttgtaggatgggctaaggcacacaataacgaacctctacagattgtgtgtggttaccatgctcttcatctgccacctcgtggtggtgaacttgtattccgcccccttgaacatctccaacctgtgaaatactcccggcctggattacccttgttgggttttggagaggagattttggacaatgctttgactagggcagaaaaaaataagatcaatttacatttggtggctgcagaagaagctcttgcattgtcgatatggactatggctacagtttgtcgttctctgtctttggaaagtgtgctaggcttattcactggagttttgctggagaagcaaattgtggtaatatgcccaaatctgggtgttctgtcagcaattcttttgtctattataccgatgataaggccgttccagtggcaaagtctgttgcttccgattcttccgaggaaattgattgattttcttgatgcccctgtacctttcatttttattttataggctggtgtacaacataaaccccctgatatcaagatgaaaggatctagtcttgtcagggtcaatgtccagaaagatcaggtccaaggcatgttcactgcctcgacttccacattacaaggagctcgtttctaatctcggtccacttcatgccagactatcgtgtgagaattctttggctaagagacatcccatctataaatgcaatgaagttcaggctgatgtagcttggaagttcttaaatataatgagaacctacttggaatcactttgctctgacctgcgctttcataccattacaaatgtacagtcaaataatgacagggtttctttgcttctgaaagacagtttcattgattcgttcccctcaaatgatagaccatttataaagctctttgtggagacgcagatgttttctgttctatcagattctcgactgtccagtttcgaaaatgaacggacataaaggcattgttccagtggagatcaaacacagtgatactctctgctttggttttggcgtctgcttcctggtgctacctttacatgtcatttccaatgcgcaggggattgggaagataaaaacaaggcacgtcgcgtggagtgcggaggatttcgattttgccgaagccacatcactaattagaagtgttctgaaaagtatctaggctcgtctgcaatgtaagaagaatacgacggactctcaggttataggaaatagatgcaacccgatcttctaaatgggaccgagctacatgtggcgcacaaggaaaacaaatgatgatgaatatagttgggtttctgcttgcgatcttgttttgctatgtaacactagtgtgtagtgacttagctatatttcatatagggaaaagaagaaccctgtatataggtgaagttattcattggagttacgcgtccccggtttgatcatgtaaatcatgacctggtgcgcaagaaaccggcatcagttttgaatagggaacgttttgcaatttagtgcatttaaggccatggagtggaacaacttcgacgtatgttcgattggacctgctatatcatcactattcacagcagctactgttttgctaa

SEQ ID NO: 84857 - DNA, 2421 bp, Zea Mays
aaaaacttaaaatttcaggctcgcctaatagagaggactccatccatgagtgacctgaatgaagtgatatttgggcaggaacatctgtctcgagatgatctgtcttttatcttctccctcaaggtatcagacaatgcgccactatatggtgtttgtctgcatgttcaggaaatagttcaaaaggcacctggtatactaggtgctgtctcacccttaaaccctacttcctataagcccagtcgtttcttggtttctgcaccacgttgttactgtctacttacaaaggtacctttttttgagctacactatgagatgctaaacagcattattgcacaggagaggcttgacagaataacacagtttgctagtgaaattactctagctgagccagttcctcgtcctattaaagaacaagatggagtagacggtgattttgattcctcaaatgggattccatatattgactggacagaatatgctgtacctgtcaacagtatatcaggtctcatttcttcatccagtattccatcagaaagggacatgtcttcatatttgttcaggagctgggagcctaattcttctcaaagtatatctggtagtgagatttcagattctagttatgtaagagaagttgaggaggcaaggcatagtttccagcattatgaagattgtatagtagagaacttggaaccacgttgtgatagctttgggagagcaagttacatgtatgataatgggcatacttccccagatcttctgtccatgcattctcctgcctctagcagattagagcgtgcacaaagtgtggagtctttagaaagttcagtcaaaggtgcaacatcagatgaagaatatgaagtaaatgtgaagcatgaagtgattgttgatgatgaaaaagttgtaggatgggctaaggcacacaataacgaacctctacagattgtgtgtggttaccatgctcttcatctgccacctcgtggtggtgaacttgtattccgcccccttgaacatctccaacctgtgaaatactcccggcctggattacccttgttgggttttggagaggagattttggacaatgctttgactagggcagaaaaaaataagatcaatttacatttggtggctgcagaagaagctcttgcattgtcgatatggactatggctacagtttgtcgttctctgtctttggaaagtgtgctaggcttattcactggagttttgctggagaagcaaattgtggtaatatgcccaaatctgggtgttctgtcagcaattcttttgtctattataccgatgataaggccgttccagtggcaaagtctgttgcttccggctggtgtacaacataaaccccctgatatcaagatgaaaggatctagtcttgtcagggtcaatgtccagaaagatcaggtccaaggcatgttcactgcctcgacttccacattacaaggagctcgtttctaatctcggtccacttcatgccagactatcgtgtgagaattctttggctaagagacatcccatctataaatgcaatgaagttcaggctgatgtagcttggaagttcttaaatataatgagaacctacttggaatcactttgctctgacctgcgctttcataccattacaaatgtacagtcaaataatgacagggtttctttgcttctgaaagacagtttcattgattcgttcccctcaaatgatagaccatttataaagctctttgtggagacgcagatgttttctgttctatcagattctcgactgtccagtttcgaaaatgaacggacataaaggcattgttccagtggagatcaaacacagtgatactctctgctttggttttggcgtctgcttcctggtgctacctttacatgtcatttccaatgcgcaggggattgggaagataaaaacaaggcacgtcgcgtggagtgcggaggatttcgattttgccgaagccacatcactaattagaagtgttctgaaaagtatctaggctcgtctgcaatgtaagaagaatacgacggactctcaggttataggaaatagatgcaacccgatcttctaaatgggaccgagctacatgtggcgcacaaggaaaacaaatgatgatgaatatagttgggtttctgcttgcgatcttgttttgctatgtaacactagtgtgtagtgacttagctatatttcatatagggaaaagaagaaccctgtatataggtgaagttattcattggagttacgcgtccccggtttgatcatgtaaatcatgacctggtgcgcaagaaaccggcatcagttttgaatagggaacgttttgcaatttagtgcatttaaggccatggagtggaacaacttcgacgtatgttcgattggacctgctatatcatcactattcacagcagctactgttttgctaa

SEQ ID NO: 84858 - DNA, 2321 bp, Zea Mays
aaaaacttaaaatttcaggctcgcctaatagagaggactccatccatgagtgacctgaatgaagtgatatttgggcaggaacatctgtctcgagatgatctgtcttttatcttctccctcaaggtatcagacaatgcgccactatatggtgtttgtctgcatgttcaggaaatagttcaaaaggcacctggtatactaggtgctgtctcacccttaaaccctacttcctataagcccagtcgtttcttggtttctgcaccacgttgttactgtctacttacaaaggtacctttttttgagctacactatgagatgctaaacagcattattgcacaggagaggcttgacagaataacacagtttgctagtgaaattactctagctgagccagttcctcgtcctattaaagaacaagatggagtagacggtgattttgattcctcaaatgggattccatatattgactggacagaatatgctgtacctgtcaacagtatatcaggtctcatttcttcatccagtattccatcagaaagggacatgtcttcatatttgttcaggagctgggagcctaattcttctcaaagtatatctggtagtgagatttcagattctagttatgtaagagaagttgaggaggcaaggcatagtttccagcattatgaagattgtatagtagagaacttggaaccacgttgtgatagctttgggagagcaagttacatgtatgataatgggcatacttccccagatcttctgtccatgcattctcctgcctctagcagattagagcgtgcacaaagtgtggagtctttagaaagtcaaaggtgcaacatcagatgaagaatatgaagtaaatgtgaagcatgaagtgattgttgatgatgaaaaagttgtaggatgggctaaggcacacaataacgaacctctacagattgtgtgtggttaccatgctcttcatctgccacctcgtggtggtgaacttgtattccgcccccttgaacatctccaacctgtgaaatactcccggcctggattacccttgttgggttttggagaggagattttggacaatgctttgactagggcagaaaaaaataagatcaatttacatttggtggctgcagaagaagctcttgcattgtcgatatggactatggctacagtttgtcgttctctgtctttggaaagtgtgctaggcttattcactggagttttgctggagaagcaaattgtggtaatatgcccaaatctgggtgttctgtcagcaattcttttgtctattataccgatgataaggccgttccagtggcaaagtctgttgcttccgattcttccgaggaaattgattgattttcttgatgcccctgtacctttcattgctggtgtacaacataaaccccctgatatcaagatgaaaggatctagtcttgtcagggtcaatgtccagaaagatcagactatcgtgtgagaattctttggctaagagacatcccatctataaatgcaatgaagttcaggctgatgtagcttggaagttcttaaatataatgagaacctacttggaatcactttgctctgacctgcgctttcataccattacaaatgtacagtcaaataatgacagggtttctttgcttctgaaagacagtttcattgattcgttcccctcaaatgatagaccatttataaagctctttgtggagacgcagatgttttctgttctatcagattctcgactgtccagtttcgaaaatgaacggacataaaggcattgttccagtggagatcaaacacagggattgggaagataaaaacaaggcacgtcgcgtggagtgcggaggatttcgattttgccgaagccacatcactaattagaagtgttctgaaaagtatctaggctcgtctgcaatgtaagaagaatacgacggactctcaggttataggaaatagatgcaacccgatcttctaaatgggaccgagctacatgtggcgcacaaggaaaacaaatgatgatgaatatagttgggtttctgcttgcgatcttgttttgctatgtaacactagtgtgtagtgacttagctatatttcatatagggaaaagaagaaccctgtatataggtgaagttattcattggagttacgcgtccccggtttgatcatgtaaatcatgacctggtgcgcaagaaaccggcatcagttttgaatagggaacgttttgcaatttagtgcatttaaggccatggagtggaacaacttcgacgtatgttcgattggacctgctatatcatcactattcacagcagctactgttttgctaa

SEQ ID NO: 84859 - DNA, 2787 bp, Zea Mays
aaaaacttaaaatttcaggctcgcctaatagagaggactccatccatgagtgacctgaatgaagtgatatttgggcaggaacatctgtctcgagatgatctgtcttttatcttctccctcaaggtatcagacaatgcgccactatatggtgtttgtctgcatgttcaggaaatagttcaaaaggcacctggtatactaggtgctgtctcacccttaaaccctacttcctataagcccagtcgtttcttggtttctgcaccacgttgttactgtctacttacaaaggtacctttttttgagctacactatgagatgctaaacagcattattgcacaggagaggcttgacagaataacacagtttgctagtgaaattactctagctgagccagttcctcgtcctattaaagaacaagatggagtagacggtgattttgattcctcaaatgggattccatatattgactggacagaatatgctgtacctgtcaacagtatatcaggtctcatttcttcatccagtattccatcagaaagggacatgtcttcatatttgttcaggagctgggagcctaattcttctcaaagtatatctggtagtgagatttcagattctagttatgtaagagaagttgaggaggcaaggcatagtttccagcattatgaagattgtatagtagagaacttggaaccacgttgtgatagctttgggagagcaagttacatgtatgataatgggcatacttccccagatcttctgtccatgcattctcctgcctctagcagattagagcgtgcacaaagtgtggagtctttagaaagttcagtcaaaggtgcaacatcagatgaagaatatgaagtaaatgtgaagcatgaagtgattgttgatgatgaaaaagttgtaggatgggctaaggcacacaataacgaacctctacagattgtgtgtggttaccatgctcttcatctgccacctcgtggtggtgaacttgtattccgcccccttgaacatctccaacctgtgaaatactcccggcctggattacccttgttgggttttggagaggagattttggacaatgctttgactagggcagaaaaaaataagatcaatttacatttggtggctgcagaagaagctcttgcattgtcgatatggactatggctacagtttgtcgttctctgtctttggaaagtgtgctaggcttattcactggagttttgctggagaagcaaattgtggtaatatgcccaaatctgggtgttctgtcagcaattcttttgtctattataccgatgataaggccgttccagtggcaaagtctgttgcttccgattcttccgaggaaattgattgattttcttgatgcccctgtacctttcattgctggtgtacaacataaaccccctgatatcaagatgaaaggatctagtcttgtcagggtcaatgtccagaaagatcagactatcgtgtgagaattctttggctaagagacatcccatctataaatgcaatgaagttcaggctgatgtagcttggaagttcttaaatataatgagaacctacttggaatcactttgctctgacctgcgctttcataccattacaaatgtacagtcaaataatgacagggttagcaatacgaacattgttctctacccttaataattatgttctttgttagttcacttagacatcgtaaaatccatttgagtaatgttagccctgaatgatcaggtttctttgcttctgaaagacagtttcattgattcgttcccctcaaatgatagaccatttataaaggtacgtatcttattgtttcacacagcagattccgtgtttattttctgtaagaaaaccacatatagttgatggaagtagcagatttcaggcctttctgtctgggcaacgcgtaaagtgtcaatagataagcagatcctcattgatagggtttttcttgatggaactcatatgatgctgtcacgctatgcgtgtttccagtagaatcagttttttttttttttttttgtcgctgctgtattttttccccattttgcctgcattctcattattcttaacatggtgcagctctttgtggagacgcagatgttttctgttctatcagattctcgactgtccagtttcgaaaatgaacggacataaaggcattgttccagtggagatcaaacacagtgatactctctgctttggttttggcgtctgcttcctggtgctacctttacatgtcatttccaatgcgcaggggattgggaagataaaaacaaggcacgtcgcgtggagtgcggaggatttcgattttgccgaagccacatcactaattagaagtgttctgaaaagtatctaggctcgtctgcaatgtaagaagaatacgacggactctcaggttataggaaatagatgcaacccgatcttctaaatgggaccgagctacatgtggcgcacaaggaaaacaaatgatgatgaatatagttgggtttctgcttgcgatcttgttttgctatgtaacactagtgtgtagtgacttagctatatttcatatagggaaaagaagaaccctgtatataggtgaagttattcattggagttacgcgtccccggtttgatcatgtaaatcatgacctggtgcgcaagaaaccggcatcagttttgaatagggaacgttttgcaatttagtgcatttaaggccatggagtggaacaacttcgacgtatgttcgattggacctgctatatcatcactattcacagcagctactgttttgctaa

SEQ ID NO: 84860 - DNA, 2197 bp, Zea Mays
aaaaacttaaaatttcaggctcgcctaatagagaggactccatccatgagtgacctgaatgaagtgatatttgggcaggaacatctgtctcgagatgatctgtcttttatcttctccctcaagcattattgcacaggagaggcttgacagaataacacagtttgctagtgaaattactctagctgagccagttcctcgtcctattaaagaacaagatggagtagacggtgattttgattcctcaaatgggattccatatattgactggacagaatatgctgtacctgtcaacagtatatcaggtctcatttcttcatccagtattccatcagaaagggacatgtcttcatatttgttcaggagctgggagcctaattcttctcaaagtatatctggtagtgagatttcagattctagttatgtaagagaagttgaggaggcaaggcatagtttccagcattatgaagattgtatagtagagaacttggaaccacgttgtgatagctttgggagagcaagttacatgtatgataatgggcatacttccccagatcttctgtccatgcattctcctgcctctagcagattagagcgtgcacaaagtgtggagtctttagaaagttcagtcaaaggtgcaacatcagatgaagaatatgaagtaaatgtgaagcatgaagtgattgttgatgatgaaaaagttgtaggatgggctaaggcacacaataacgaacctctacagattgtgtgtggttaccatgctcttcatctgccacctcgtggtggtgaacttgtattccgcccccttgaacatctccaacctgtgaaatactcccggcctggattacccttgttgggttttggagaggagattttggacaatgctttgactagggcagaaaaaaataagatcaatttacatttggtggctgcagaagaagctcttgcattgtcgatatggactatggctacagtttgtcgttctctgtctttggaaagtgtgctaggcttattcactggagttttgctggagaagcaaattgtggtaatatgcccaaatctgggtgttctgtcagcaattcttttgtctattataccgatgataaggccgttccagtggcaaagtctgttgcttccgattcttccgaggaaattgattgattttcttgatgcccctgtacctttcattgctggtgtacaacataaaccccctgatatcaagatgaaaggatctagtcttgtcagggtcaatgtccagaaagatcagactatcgtgtgagaattctttggctaagagacatcccatctataaatgcaatgaagttcaggctgatgtagcttggaagttcttaaatataatgagaacctacttggaatcactttgctctgacctgcgctttcataccattacaaatgtacagtcaaataatgacagggtttctttgcttctgaaagacagtttcattgattcgttcccctcaaatgatagaccatttataaagctctttgtggagacgcagatgttttctgttctatcagattctcgactgtccagtttcgaaaatgaacggacataaaggcattgttccagtggagatcaaacacagtgatactctctgctttggttttggcgtctgcttcctggtgctacctttacatgtcatttccaatgcgcaggggattgggaagataaaaacaaggcacgtcgcgtggagtgcggaggatttcgattttgccgaagccacatcactaattagaagtgttctgaaaagtatctaggctcgtctgcaatgtaagaagaatacgacggactctcaggttataggaaatagatgcaacccgatcttctaaatgggaccgagctacatgtggcgcacaaggaaaacaaatgatgatgaatatagttgggtttctgcttgcgatcttgttttgctatgtaacactagtgtgtagtgacttagctatatttcatatagggaaaagaagaaccctgtatataggtgaagttattcattggagttacgcgtccccggtttgatcatgtaaatcatgacctggtgcgcaagaaaccggcatcagttttgaatagggaacgttttgcaatttagtgcatttaaggccatggagtggaacaacttcgacgtatgttcgattggacctgctatatcatcactattcacagcagctactgttttgctaa

SEQ ID NO: 84861 - DNA, 2396 bp, Zea Mays
aaaaacttaaaatttcaggctcgcctaatagagaggactccatccatgagtgacctgaatgaagtgatatttgggcaggaacatctgtctcgagatgatctgtcttttatcttctccctcaaggtatcagacaatgcgccactatatggtgtttgtctgcatgttcaggaaatagttcaaaaggcacctggtatactaggtgctgtctcacccttaaaccctacttcctataagcccagtcgtttcttggtttctgcaccacgttgttactgtctacttacaaaggtacctttttttgagctacactatgagatgctaaacagcattattgcacaggagaggcttgacagaataacacagtttgctagtgaaattactctagctgagccagttcctcgtcctattaaagaacaagatggagtagacggtgattttgattcctcaaatgggattccatatattgactggacagaatatgctgtacctgtcaacagtatatcaggtctcatttcttcatccagtattccatcagaaagggacatgtcttcatatttgttcaggagctgggagcctaattcttctcaaagtatatctggtagtgagatttcagattctagttatgtaagagaagttgaggaggcaaggcatagtttccagcattatgaagattgtatagtagagaacttggaaccacgttgtgatagctttgggagagcaagttacatgtatgataatgggcatacttccccagatcttctgtccatgcattctcctgcctctagcagattagagcgtgcacaaagtgtggagtctttagaaagtcaaaggtgcaacatcagatgaagaatatgaagtaaatgtgaagcatgaagtgattgttgatgatgaaaaagttgtaggatgggctaaggcacacaataacgaacctctacagattgtgtgtggttaccatgctcttcatctgccacctcgtggtggtgaacttgtattccgcccccttgaacatctccaacctgtgaaatactcccggcctggattacccttgttgggttttggagaggagattttggacaatgctttgactagggcagaaaaaaataagatcaatttacatttggtggctgcagaagaagctcttgcattgtcgatatggactatggctacagtttgtcgttctctgtctttggaaagtgtgctaggcttattcactggagttttgctggagaagcaaattgtggtaatatgcccaaatctgggtgttctgtcagcaattcttttgtctattataccgatgataaggccgttccagtggcaaagtctgttgcttccgattcttccgaggaaattgattgattttcttgatgcccctgtacctttcattgctggtgtacaacataaaccccctgatatcaagatgaaaggatctagtcttgtcagggtcaatgtccagaaagatcaggtccaaggcatgttcactgcctcgacttccacattacaaggagctcgtttctaatctcggtccacttcatgccagactatcgtgtgagaattctttggctaagagacatcccatctataaatgcaatgaagttcaggctgatgtagcttggaagttcttaaatataatgagaacctacttggaatcactttgctctgacctgcgctttcataccattacaaatgtacagtcaaataatgacagggtttctttgcttctgaaagacagtttcattgattcgttcccctcaaatgatagaccatttataaagctctttgtggagacgcagatgttttctgttctatcagattctcgactgtccagtttcgaaaatgaacggacataaaggcattgttccagtggagatcaaacacagggattgggaagataaaaacaaggcacgtcgcgtggagtgcggaggatttcgattttgccgaagccacatcactaattagaagtgttctgaaaagtatctaggctcgtctgcaatgtaagaagaatacgacggactctcaggttataggaaatagatgcaacccgatcttctaaatgggaccgagctacatgtggcgcacaaggaaaacaaatgatgatgaatatagttgggtttctgcttgcgatcttgttttgctatgtaacactagtgtgtagtgacttagctatatttcatatagggaaaagaagaaccctgtatataggtgaagttattcattggagttacgcgtccccggtttgatcatgtaaatcatgacctggtgcgcaagaaaccggcatcagttttgaatagggaacgttttgcaatttagtgcatttaaggccatggagtggaacaacttcgacgtatgttcgattggacctgctatatcatcactattcacagcagctactgttttgctaa

SEQ ID NO: 84862 - DNA, 3057 bp, Zea Mays
aaaaacttaaaatttcaggctcgcctaatagagaggactccatccatgagtgacctgaatgaagtgatatttgggcaggaacatctgtctcgagatgatctgtcttttatcttctccctcaaggtatcagacaatgcgccactatatggtgtttgtctgcatgttcaggaaatagttcaaaaggcacctggtatactaggtgctgtctcacccttaaaccctacttcctataagcccagtcgtttcttggtttctgcaccacgttgttactgtctacttacaaaggtacctttttttgagctacactatgagatgctaaacaggttcgttttcagttctaacatatatgtatatattttttgatattgatataatatttcatcaattcagttctaaggatgtggtggtgtgtctattctatgaacagcattattgcacaggagaggcttgacagaataacacagtttgctagtgaaattactctagctgagccagttcctcgtcctattaaagaacaagatggagtagacggtgattttgattcctcaaatgggattccatatattgactggacagaatatgctgtacctgtcaacagtatatcaggtctcatttcttcatccagtattccatcagaaagggacatgtcttcatatttgttcaggagctgggagcctaattcttctcaaagtatatctggtagtgagatttcagattctagttatgtaagagaagttgaggaggcaaggcatagtttccagcattatgaagattgtatagtagagaacttggaaccacgttgtgatagctttgggagagcaagttacatgtatgataatgggcatacttccccagatcttctgtccatgcattctcctgcctctagcagattagagcgtgcacaaagtgtggagtctttagaaagtcaaaggtgcaacatcagatgaagaatatgaagtaaatgtgaagcatgaagtgattgttgatgatgaaaaagttgtaggatgggctaaggcacacaataacgaacctctacagattgtgtgtggttaccatgctcttcatctgccacctcgtggtggtgaacttgtattccgcccccttgaacatctccaacctgtgaaatactcccggcctggattacccttgttgggttttggagaggagattttggacaatgctttgactagggcagaaaaaaataagatcaatttacatttggtggctgcagaagaagctcttgcattgtcgatatggactatggctacagtttgtcgttctctgtctttggaaagtgtgctaggcttattcactggagttttgctggagaagcaaattgtggtaatatgcccaaatctgggtgttctgtcagcaattcttttgtctattataccgatgataaggccgttccagtggcaaagtctgttgcttccgattcttccgaggaaattgattgattttcttgatgcccctgtacctttcattgctggtgtacaacataaaccccctgatatcaagatgaaaggatctagtcttgtcagggtcaatgtccagaaagatcagactatcgtgtgagaattctttggctaagagacatcccatctataaatgcaatgaagttcaggtactaatttttttaccactttatagatttatcattttactttctagtttgtaccattcattttttttttctctagaaggaaattatctctgcacttgatcatttaaacttctattggttatccaatttagtttttgaatgataaaacattacatatggatattattgcaggctgatgtagcttggaagttcttaaatataatgagaacctacttggaatcactttgctctgacctgcgctttcataccattacaaatgtacagtcaaataatgacagggttagcaatacgaacattgttctctacccttaataattatgttctttgttagttcacttagacatcgtaaaatccatttgagtaatgttagccctgaatgatcaggtttctttgcttctgaaagacagtttcattgattcgttcccctcaaatgatagaccatttataaaggtacgtatcttattgtttcacacagcagattccgtgtttattttctgtaagaaaaccacatatagttgatggaagtagcagatttcaggcctttctgtctgggcaacgcgtaaagtgtcaatagataagcagatcctcattgatagggtttttcttgatggaactcatatgatgctgtcacgctatgcgtgtttccagtagaatcagttttttttttttttttttgtcgctgctgtattttttccccattttgcctgcattctcattattcttaacatggtgcagctctttgtggagacgcagatgttttctgttctatcagattctcgactgtccagtttcgaaaatgaacggacataaaggcattgttccagtggagatcaaacacagtgatactctctgctttggttttggcgtctgcttcctggtgctacctttacatgtcatttccaatgcgcaggggattgggaagataaaaacaaggcacgtcgcgtggagtgcggaggatttcgattttgccgaagccacatcactaattagaagtgttctgaaaagtatctaggctcgtctgcaatgtaagaagaatacgacggactctcaggttataggaaatagatgcaacccgatcttctaaatgggaccgagctacatgtggcgcacaaggaaaacaaatgatgatgaatatagttgggtttctgcttgcgatcttgttttgctatgtaacactagtgtgtagtgacttagctatatttcatatagggaaaagaagaaccctgtatataggtgaagttattcattggagttacgcgtccccggtttgatcatgtaaatcatgacctggtgcgcaagaaaccggcatcagttttgaatagggaacgttttgcaatttagtgcatttaaggccatggagtggaacaacttcgacgtatgttcgattggacctgctatatcatcactattcacagcagctactgttttgctaa

SEQ ID NO: 84863 - DNA, 2752 bp, Zea Mays
aaaaacttaaaatttcaggctcgcctaatagagaggactccatccatgagtgacctgaatgaagtgatatttgggcaggaacatctgtctcgagatgatctgtcttttatcttctccctcaaggtatcagacaatgcgccactatatggtgtttgtctgcatgttcaggaaatagttcaaaaggcacctggtatactaggtgctgtctcacccttaaaccctacttcctataagcccagtcgtttcttggtttctgcaccacgttgttactgtctacttacaaaggtacctttttttgagctacactatgagatgctaaacagcattattgcacaggagaggcttgacagaataacacagtttgctagtgaaattactctagctgagccagttcctcgtcctattaaagaacaagatggagtagacggtgattttgattcctcaaatgggattccatatattgactggacagaatatgctgtacctgtcaacagtatatcaggtctcatttcttcatccagtattccatcagaaagggacatgtcttcatatttgttcaggagctgggagcctaattcttctcaaagtatatctggtagtgagatttcagattctagttatgtaagagaagttgaggaggcaaggcatagtttccagcattatgaagattgtatagtagagaacttggaaccacgttgtgatagctttgggagagcaagttacatgtatgataatgggcatacttccccagatcttctgtccatgcattctcctgcctctagcagattagagcgtgcacaaagtgtggagtctttagaaagttcagtcaaaggtgcaacatcagatgaagaatatgaagtaaatgtgaagcatgaagtgattgttgatgatgaaaaagttgtaggatgggctaaggcacacaataacgaacctctacagattgtgtgtggttaccatgctcttcatctgccacctcgtggtggtgaacttgtattccgcccccttgaacatctccaacctgtgaaatactcccggcctggattacccttgttgggttttggagaggagattttggacaatgctttgactagggcagaaaaaaataagatcaatttacatttggtggctgcagaagaagctcttgcattgtcgatatggactatggctacagtttgtcgttctctgtctttggaaagtgtgctaggcttattcactggagttttgctggagaagcaaattgtggtaatatgcccaaatctgggtgttctgtcagcaattcttttgtctattataccgatgataaggccgttccagtggcaaagtctgttgcttccgattcttccgaggaaattgattgattttcttgatgcccctgtacctttcattgctggtgtacaacataaaccccctgatatcaagatgaaaggatctagtcttgtcagggtcaatgtccagaaagatcaggcaagtatacattacatgctatttcctcatagtgaaaaaacatgttgggaaggaaaaggaatatctaaaacctttttctttggtaaaagagcataattgttatcttttttttgctctaagttcattggattgtactgccaacctgttcttttacgtcagccaatcatgaatctattgcacactgctagatcttgatatttattgggacatcatttatgaggaaatataatcatgcactatggtgcaagctgaatgttagccttgtataaaaaacacgcaggtccaaggcatgttcactgcctcgacttccacattacaaggagctcgtttctaatctcggtccacttcatgccagactatcgtgtgagaattctttggctaagagacatcccatctataaatgcaatgaagttcaggctgatgtagcttggaagttcttaaatataatgagaacctacttggaatcactttgctctgacctgcgctttcataccattacaaatgtacagtcaaataatgacagggtttctttgcttctgaaagacagtttcattgattcgttcccctcaaatgatagaccatttataaagctctttgtggagacgcagatgttttctgttctatcagattctcgactgtccagtttcgaaaatgaacggacataaaggcattgttccagtggagatcaaacacagtgatactctctgctttggttttggcgtctgcttcctggtgctacctttacatgtcatttccaatgcgcaggggattgggaagataaaaacaaggcacgtcgcgtggagtgcggaggatttcgattttgccgaagccacatcactaattagaagtgttctgaaaagtatctaggctcgtctgcaatgtaagaagaatacgacggactctcaggttataggaaatagatgcaacccgatcttctaaatgggaccgagctacatgtggcgcacaaggaaaacaaatgatgatgaatatagttgggtttctgcttgcgatcttgttttgctatgtaacactagtgtgtagtgacttagctatatttcatatagggaaaagaagaaccctgtatataggtgaagttattcattggagttacgcgtccccggtttgatcatgtaaatcatgacctggtgcgcaagaaaccggcatcagttttgaatagggaacgttttgcaatttagtgcatttaaggccatggagtggaacaacttcgacgtatgttcgattggacctgctatatcatcactattcacagcagctactgttttgctaa

SEQ ID NO: 84864 - DNA, 2388 bp, Zea Mays
aaaaacttaaaatttcaggctcgcctaatagagaggactccatccatgagtgacctgaatgaagtgatatttgggcaggaacatctgtctcgagatgatctgtcttttatcttctccctcaaggtatcagacaatgcgccactatatggtgtttgtctgcatgttcaggaaatagttcaaaaggcacctggtatactaggtgctgtctcacccttaaaccctacttcctataagcccagtcgtttcttggtttctgcaccacgttgttactgtctacttacaaaggtacctttttttgagctacactatgagatgctaaacaggttcgttttcagttctaacatatatgtatatattttttgatattgatataatatttcatcaattcagttctaaggatgtggtggtgtgtctattctatgaacagcattattgcacaggagaggcttgacagaataacacagtttgctagtgaaattactctagctgagccagttcctcgtcctattaaagaacaagatggagtagacggtgattttgattcctcaaatgggattccatatattgactggacagaatatgctgtacctgtcaacagtatatcaggtctcatttcttcatccagtattccatcagaaagggacatgtcttcatatttgttcaggagctgggagcctaattcttctcaaagtatatctggtagtgagatttcagattctagttatgtaagagaagttgaggaggcaaggcatagtttccagcattatgaagattgtatagtagagaacttggaaccacgttgtgatagctttgggagagcaagttacatgtatgataatgggcatacttccccagatcttctgtccatgcattctcctgcctctagcagattagagcgtgcacaaagtgtggagtctttagaaagtcaaaggtgcaacatcagatgaagaatatgaagtaaatgtgaagcatgaagtgattgttgatgatgaaaaagttgtaggatgggctaaggcacacaataacgaacctctacagattgtgtgtggttaccatgctcttcatctgccacctcgtggtggtgaacttgtattccgcccccttgaacatctccaacctgtgaaatactcccggcctggattacccttgttgggttttggagaggagattttggacaatgctttgactagggcagaaaaaaataagatcaatttacatttggtggctgcagaagaagctcttgcattgtcgatatggactatggctacagtttgtcgttctctgtctttggaaagtgtgctaggcttattcactggagttttgctggagaagcaaattgtggtaatatgcccaaatctgggtgttctgtcagcaattcttttgtctattataccgatgataaggccgttccagtggcaaagtctgttgcttccgattcttccgaggaaattgattgattttcttgatgcccctgtacctttcattgctggtgtacaacataaaccccctgatatcaagatgaaaggatctagtcttgtcagggtcaatgtccagaaagatcagactatcgtgtgagaattctttggctaagagacatcccatctataaatgcaatgaagttcaggtttctttgcttctgaaagacagtttcattgattcgttcccctcaaatgatagaccatttataaagctctttgtggagacgcagatgttttctgttctatcagattctcgactgtccagtttcgaaaatgaacggacataaaggcattgttccagtggagatcaaacacagtgatactctctgctttggttttggcgtctgcttcctggtgctacctttacatgtcatttccaatgcgcaggggattgggaagataaaaacaaggcacgtcgcgtggagtgcggaggatttcgattttgccgaagccacatcactaattagaagtgttctgaaaagtatctaggctcgtctgcaatgtaagaagaatacgacggactctcaggttataggaaatagatgcaacccgatcttctaaatgggaccgagctacatgtggcgcacaaggaaaacaaatgatgatgaatatagttgggtttctgcttgcgatcttgttttgctatgtaacactagtgtgtagtgacttagctatatttcatatagggaaaagaagaaccctgtatataggtgaagttattcattggagttacgcgtccccggtttgatcatgtaaatcatgacctggtgcgcaagaaaccggcatcagttttgaatagggaacgttttgcaatttagtgcatttaaggccatggagtggaacaacttcgacgtatgttcgattggacctgctatatcatcactattcacagcagctactgttttgctaa

SEQ ID NO: 84865 - DNA, 2551 bp, Zea Mays
aaaaacttaaaatttcaggctcgcctaatagagaggactccatccatgagtgacctgaatgaagtgatatttgggcaggaacatctgtctcgagatgatctgtcttttatcttctccctcaaggtatcagacaatgcgccactatatggtgtttgtctgcatgttcaggaaatagttcaaaaggcacctggtatactaggtgctgtctcacccttaaaccctacttcctataagcccagtcgtttcttggtttctgcaccacgttgttactgtctacttacaaaggtacctttttttgagctacactatgagatgctaaacaggttcgttttcagttctaacatatatgtatatattttttgatattgatataatatttcatcaattcagttctaaggatgtggtggtgtgtctattctatgaacagcattattgcacaggagaggcttgacagaataacacagtttgctagtgaaattactctagctgagccagttcctcgtcctattaaagaacaagatggagtagacggtgattttgattcctcaaatgggattccatatattgactggacagaatatgctgtacctgtcaacagtatatcaggtctcatttcttcatccagtattccatcagaaagggacatgtcttcatatttgttcaggagctgggagcctaattcttctcaaagtatatctggtagtgagatttcagattctagttatgtaagagaagttgaggaggcaaggcatagtttccagcattatgaagattgtatagtagagaacttggaaccacgttgtgatagctttgggagagcaagttacatgtatgataatgggcatacttccccagatcttctgtccatgcattctcctgcctctagcagattagagcgtgcacaaagtgtggagtctttagaaagttcagtcaaaggtgcaacatcagatgaagaatatgaagtaaatgtgaagcatgaagtgattgttgatgatgaaaaagttgtaggatgggctaaggcacacaataacgaacctctacagattgtgtgtggttaccatgctcttcatctgccacctcgtggtggtgaacttgtattccgcccccttgaacatctccaacctgtgaaatactcccggcctggattacccttgttgggttttggagaggagattttggacaatgctttgactagggcagaaaaaaataagaagaagctcttgcattgtcgatatggactatggctacagtttgtcgttctctgtctttggaaagtgtgctaggcttattcactggagttttgctggagaagcaaattgtggtaatatgcccaaatctgggtgttctgtcagcaattcttttgtctattataccgatgataaggccgttccagtggcaaagtctgttgcttccgattcttccgaggaaattgattgattttcttgatgcccctgtacctttcattgctggtgtacaacataaaccccctgatatcaagatgaaaggatctagtcttgtcagggtcaatgtccagaaagatcaggtccaaggcatgttcactgcctcgacttccacattacaaggagctcgtttctaatctcggtccacttcatgccagactatcgtgtgagaattctttggctaagagacatcccatctataaatgcaatgaagttcaggctgatgtagcttggaagttcttaaatataatgagaacctacttggaatcactttgctctgacctgcgctttcataccattacaaatgtacagtcaaataatgacagggtttctttgcttctgaaagacagtttcattgattcgttcccctcaaatgatagaccatttataaagctctttgtggagacgcagatgttttctgttctatcagattctcgactgtccagtttcgaaaatgaacggacataaaggcattgttccagtggagatcaaacacagtgatactctctgctttggttttggcgtctgcttcctggtgctacctttacatgtcatttccaatgcgcaggggattgggaagataaaaacaaggcacgtcgcgtggagtgcggaggatttcgattttgccgaagccacatcactaattagaagtgttctgaaaagtatctaggctcgtctgcaatgtaagaagaatacgacggactctcaggttataggaaatagatgcaacccgatcttctaaatgggaccgagctacatgtggcgcacaaggaaaacaaatgatgatgaatatagttgggtttctgcttgcgatcttgttttgctatgtaacactagtgtgtagtgacttagctatatttcatatagggaaaagaagaaccctgtatataggtgaagttattcattggagttacgcgtccccggtttgatcatgtaaatcatgacctggtgcgcaagaaaccggcatcagttttgaatagggaacgttttgcaatttagtgcatttaaggccatggagtggaacaacttcgacgtatgttcgattggacctgctatatcatcactattcacagcagctactgttttgctaa

SEQ ID NO: 84866 - DNA, 2757 bp, Zea Mays
aaaaacttaaaatttcaggctcgcctaatagagaggactccatccatgagtgacctgaatgaagtgatatttgggcaggaacatctgtctcgagatgatctgtcttttatcttctccctcaaggtatcagacaatgcgccactatatggtgtttgtctgcatgttcaggaaatagttcaaaaggcacctggtatactaggtgctgtctcacccttaaaccctacttcctataagcccagtcgtttcttggtttctgcaccacgttgttactgtctacttacaaaggtacctttttttgagctacactatgagatgctaaacagcattattgcacaggagaggcttgacagaataacacagtttgctagtgaaattactctagctgagccagttcctcgtcctattaaagaacaagatggagtagacggtgattttgattcctcaaatgggattccatatattgactggacagaatatgctgtacctgtcaacagtatatcaggtctcatttcttcatccagtattccatcagaaagggacatgtcttcatatttgttcaggagctgggagcctaattcttctcaaagtatatctggtagtgagatttcagattctagttatgtaagagaagttgaggaggcaaggcatagtttccagcattatgaagattgtatagtagagaacttggaaccacgttgtgatagctttgggagagcaagttacatgtatgataatgggcatacttccccagatcttctgtccatgcattctcctgcctctagcagattagagcgtgcacaaagtgtggagtctttagaaagttcagtcaaaggtgcaacatcagatgaagaatatgaagtaaatgtgaagcatgaagtgattgttgatgatgaaaaagttgtaggatgggctaaggcacacaataacgaacctctacagattgtgtgtggttaccatgctcttcatctgccacctcgtggtggtgaacttgtattccgcccccttgaacatctccaacctgtgaaatactcccggcctggattacccttgttgggttttggagaggagattttggacaatgctttgactagggcagaaaaaaataagatcaatttacatttggtggctgcagaagaagctcttgcattgtcgatatggactatggctacagtttgtcgttctctgtctttggaaagtgtgctaggcttattcactggagttttgctggagaagcaaattgtggtaatatgcccaaatctgggtgttctgtcagcaattcttttgtctattataccgatgataaggccgttccagtggcaaagtctgttgcttccgattcttccgaggaaattgattgattttcttgatgcccctgtacctttcattgctggtgtacaacataaaccccctgatatcaagatgaaaggatctagtcttgtcagggtcaatgtccagaaagatcaggtccaaggcatgttcactgcctcgacttccacattacaaggagctcgtttctaatctcggtccacttcatgccagactatcgtgtgagaattctttggctaagagacatcccatctataaatgcaatgaagttcaggctgatgtagcttggaagttcttaaatataatgagaacctacttggaatcactttgctctgacctgcgctttcataccattacaaatgtacagtcaaataatgacagggtttctttgcttctgaaagacagtttcattgattcgttcccctcaaatgatagaccatttataaaggtacgtatcttattgtttcacacagcagattccgtgtttattttctgtaagaaaaccacatatagttgatggaagtagcagatttcaggcctttctgtctgggcaacgcgtaaagtgtcaatagataagcagatcctcattgatagggtttttcttgatggaactcatatgatgctgtcacgctatgcgtgtttccagtagaatcagttttttttttttttttttgtcgctgctgtattttttccccattttgcctgcattctcattattcttaacatggtgcagctctttgtggagacgcagatgttttctgttctatcagattctcgactgtccagtttcgaaaatgaacggacataaaggcattgttccagtggagatcaaacacagtgatactctctgctttggttttggcgtctgcttcctggtgctacctttacatgtcatttccaatgcgcaggggattgggaagataaaaacaaggcacgtcgcgtggagtgcggaggatttcgattttgccgaagccacatcactaattagaagtgttctgaaaagtatctaggctcgtctgcaatgtaagaagaatacgacggactctcaggttataggaaatagatgcaacccgatcttctaaatgggaccgagctacatgtggcgcacaaggaaaacaaatgatgatgaatatagttgggtttctgcttgcgatcttgttttgctatgtaacactagtgtgtagtgacttagctatatttcatatagggaaaagaagaaccctgtatataggtgaagttattcattggagttacgcgtccccggtttgatcatgtaaatcatgacctggtgcgcaagaaaccggcatcagttttgaatagggaacgttttgcaatttagtgcatttaaggccatggagtggaacaacttcgacgtatgttcgattggacctgctatatcatcactattcacagcagctactgttttgctaa

SEQ ID NO: 84867 - DNA, 948 bp, Zea Mays
ttgacgctagattgccgcgaccctcggaatttcagttcgcggttggggcatggaggaagaggaactcacctccggcggcggcgacgcggcgttgctggcgccggaaccgcgcgaacaggcggccgaagaggggaggtcaccgcgagacgcggaggcgttcgaggacgcggtggaagaggcgtccgccgcctccacgtcgccggtggcgtgctgcaatggcgacgccgcggagacttcgtctccgccagcttggaaatcgcaggtcgacgggccgtcggccccggaggaagcggaaacgtacgagtcgccgtcggcttcgtcgtcggggtgtgcggcgatggaggtggagtcttcgttggtttctgaattgcgggaggagccggggagggtggatgctggaagcgccgcgtcgccgtcggggcagcgcgcgggaggcacggaggagcacgagaattcgatggccacgccgggggcaggatcgccgtccagggaggagacggactcgtgtatgcactcggcaccgtcgtccccgccgcgctcggcctcgtcgacgtcgtccccgccgcgctcagcctcgttgacgtcgtctccgccgctgccgcagattaagcagcagtcgcggcatgtgcgaaccggcagcttccagcggttccgtgagcagatgcagcgcgcttggaagtgggggcctattggaggtggaggaggtggcgagaggagtcctagggagcagttgttacggacgactgtgaacattgaggctatggcgaatcagaagcggcactggtatcaagtccgctccaagtcgataattggcaatatagggaaccgacatcgctctttgaacattttttcgtggttggtctccactcttatgcagatgtcggagtagttgaggatgcttttgcaaaaaagaaagcttggaatctaatgtagcacgatcagagatag

SEQ ID NO: 84868 - DNA, 1008 bp, Zea Mays
cgcctcctcttccccttccgttcccttgcgttggtgtttctattcatcgctgacgattgacgctagattgccgcgaccctcggaatttcagttcgcggttggggcatggaggaagaggaactcacctccggcggcggcgacgcggcgttgctggcgccggaaccgcgcgaacaggcggccgaagaggggaggtcaccgcgagacgcggaggcgttcgaggacgcggtggaagaggcgtccgccgcctccacgtcgccggtggcgtgctgcaatggcgacgccgcggagacttcgtctccgccagcttggaaatcgcaggtcgacgggccgtcggccccggaggaagcggaaacgtacgagtcgccgtcggcttcgtcgtcggggtgtgcggcgatggaggtggagtcttcgttggtttctgaattgcgggaggagccggggagggtggatgctggaagcgccgcgtcgccgtcggggcagcgcgcgggaggcacggaggagcacgagaattcgatggccacgccgggggcaggatcgccgtccagggaggagacggactcgtgtatgcactcggcaccgtcgtccccgccgcgctcggcctcgtcgacgtcgtccccgccgcgctcagcctcgttgacgtcgtctccgccgctgccgcagattaagcagcagtcgcggcatgtgcgaaccggcagcttccagcggttccgtgagcagatgcagcgcgcttggaagtgggggcctattggaggtggaggaggtggcgagaggagtcctagggagcagttgttacggacgactgtgaacattgaggctatggcgaatcagaagcggcactggtatcaagtccgctccaagtcgcaggataattggcaatatagggaaccgacatcgctctttgaacattttttcgtggttggtctccactcttatgcagatgtcggagtagttgaggatgcttttgcaaaaaagaaagcttggaatctaatgtagcacgatcagagatag

SEQ ID NO: 84869 - DNA, 922 bp, Zea Mays
ccttattatactttctcggactcaacgtcttatctatactatctatatcaccttgttatactttctcggactcgcgtctttccttcgtgatttactcactcatgccaccctctcaaacgcatcccaagaggcggaaagggaggagcgtggagcggcgaattattgtttgtttccccaagatgtcttctccaagcaagcgccgggagatggacctcatgaagctgatgatgagcgactacaaggtggagatggtgaacgatgggatgcaggagttctttgttgaatttcgtgggcctaacgaaagcatttatcaaggaggtgtatggaagattagagtagaattgccagacgcatatccttacaaatccccatcgatcggtttcatcaataagatatatcacccaaatgtcgacgaaatgtctggttcagtctgtttggatgtcatcaaccagacatggagcccaatgtttgatcttgtcaatgtgttcgaggtcttccttccacaacttctgttatatcctaatccttctgatccattaaatggagatgcagctgcgttgatgatgcgtgatcgccctgcttacgaacaaaaagtgaaagagtactgtgaaaaatacgccaaaccaggggatgctggtgtcaccccagaagagcagtccagtgacgaagagctgagtgaagatgaagacgactcgggtgatgaggagataatgggcaaaccagacccatagtcaagttggcacctactatacctgtaatctgcacacgatgtttactgcagcaactgcaattaaacaccccatgaacatccgcgtgcagtctgagtgccatgtaaataaactgcaatttcaccaattggatttccagcataactatgtcttcgaatcatgagtgtagtgtaggttcgtgcgtttgaattggc

SEQ ID NO: 84870 - DNA, 844 bp, Zea Mays
ctcttaccattttttctttcgcatcattataaatctaagcgcatcccaagaggcggaaagggaggagcgtggagcggcgaattattgtttgtttccccaagatgtcttctccaagcaagcgccgggagatggacctcatgaagctgatgatgagcgactacaaggtggagatggtgaacgatgggatgcaggagttctttgttgaatttcgtgggcctaacgaaagcatttatcaaggaggtgtatggaagattagagtagaattgccagacgcatatccttacaaatccccatcgatcggtttcatcaataagatatatcacccaaatgtcgacgaaatgtctggttcagtctgtttggatgtcatcaaccagacatggagcccaatgtttgatcttgtcaatgtgttcgaggtcttccttccacaacttctgttatatcctaatccttctgatccattaaatggagatgcagctgcgttgatgatgcgtgatcgccctgcttacgaacaaaaagtgaaagagtactgtgaaaaatacgccaaaccaggggatgctggtgtcaccccagaagagcagtccagtgacgaagagctgagtgaagatgaagacgactcgggtgatgaggagataatgggcaaaccagacccatagtcaagttggcacctactatacctgtaatctgcacacgatgtttactgcagcaactgcaattaaacaccccatgaacatccgcgtgcagtctgagtgccatgtaaataaactgcaatttcaccaattggatttccagcataactatgtcttcgaatcatgagtgtagtgtaggttcgtgcgtttgaattggc

SEQ ID NO: 84871 - DNA, 952 bp, Zea Mays
gttgtctattagacgctgaatattgctcatcataggcaacaacaacaaaaaataacaataaagatgcatacttcatggaaacaactagatttcttcatgcgtgatgcgtttacctgcataagaaaacctacaggatacacacaccattagatatctggtactcgcatatgtttgctcagcaacatttccacacaagcatagcaagatctgcaagggactcttctggtttctagccaatagacacacaacatctaagctttgttcgattatccctacatcacatggattggattgaattggaaaatgttcgtatagattttgacttggtataaatttaaactcaccaaatctaatttaatccacatatattaaggtgaaaccgaacatgccgaaggaaggcgatcagtcccgttccccaccacctgcggtaactgaaagaatccaatcaatcggttgatttccaccaccaatctttgaagcgaatcaaatcaagagaggcaaacataaaaatttagatcttcctttcgcttgattgctccagacgatccgcttcagttcatggcagaggtgggtagaacaaccaactccctgtaatctctacgtatgctccacagaatctctgcgcgccgcttcatgctctgccggttcctcttcgttggagctaagcactgcagggccagctcgtacaacttctcgaccgctagattgatctcattgagctggtatgttctgagatagatattctggatcgagatagcctgctgttcccttgacttgattgagagatatgactagcgtcagctgagctagtttggcaaatccgaagccagcaaccttatagctcgacaggtgttcattagaagaggatttgatgtccctgtgggttacgggatggtctacctgaatataggcatgagccacatcaattgcaatttccaatctcagtgagaag

SEQ ID NO: 84872 - DNA, 1586 bp, Zea Mays
atgcgcatccgccgctacgccgcgcgcctcctctccgccaccaccgccgccccctcctcgccgccgcggccgcccgccgcgtcctggctccacaccgacgacgacgacgactgctgcgccttctgcgagctcagccgcccggccccgcaggagggccaggacgccgtcaagcacaaggggcacattgccggccgggtgccggaatccgatgtcagagccgatgagcgcgtcggcctacaccagcgaccgcctgctcccgaagttaaaaaatgcaagattgatcatgtacctcctgtggataaatcttctgtcgggctgcaagttgtgaaatgtgcttctgaggtcagtggagctgtggcgaaaccagaaggtggtactcctgctagcgaagctgctgctggtcctgcagcgaaagctggtgcttttgttgtcaacgatgctgctagtgaacagggagttcaatgtatagcttctccactgggtggtgcctccaagctggaggaggttacagcagggaattcttttgcgaatgggccaaccactgaattaggagttttcaagggtgcatcccttgctaatgaattggctgatgtgccaggggttacgagcattatgccagaagttataggcaaacctagtactgacccaggggctataaccaccgtggtggaagttagtgatataggttctgtcgttcatgaaaccactgaactggaatctgcaggggaggattatattgccagtgaagctgctgctgaaccagaagatgctggcagagcttcttgcaatacagatgatactgctgctttagatgagccactgccgcctagttgtgatccgaacataggcaatgcgcaggttggaaatgcgatggacaccgttgccagtacagtgcggccttctcgatgtgatgctgcagaagaaggtgcttctgtgaattctacagccaatggtcctgttagagccagaggaccaaccgttaagggaggagtgcccaaggataaatctgttgcacccagtgttttacgtgtattggacgtagtgactagaagcattggtaaatcagggagaacagatgttatttgttatgctaggcggacaggtaagaggaagccagagctgcaggaagtgaagacggaaaatattgacttggaagatggtgttctatgcgagaaagaggaggcactgttgagaactgattgttgtgaaagtgtcttgtcaacagccgggtccatagatgttaaacttgccgacataaagaaagaccttatggataattcagctgcaagcaaggttacaaagatgaagagaaatatatttgaatgtaaaattgattactgccacatgacattcaagacaaaagctgagcttgctgcccacaagaagaacatgtgcacagtcaactcatgcagcaagcatttcagatcccacagttacctgaggcgccacgagagcgcacacaacgatgatatgccttacaagtgcccatgggatggttgtaatatggctttcaagtggtcatgggaccgggctgagcatttcaaggtccatgctggggccaagccttacaaatgcatgacgccttt

SEQ ID NO: 84873 - DNA, 2528 bp, Zea Mays
atgcgcatccgccgctacgccgcgcgcctcctctccgccaccaccgccgccccctcctcgccgccgcggccgcccgccgcgtcctggctccacaccgacgacgacgacgactgctgcgccttctgcgagctcagccgcccggccccgcaggagggccaggacgccgtcaagcacaaggggcacattgccggccgggtgccggaatccgatgtcagagccgatgagcgcgtcggcctacaccagcgaccgcctgctcccgaagttaaaaaatgcaagattgatcatgtacctcctgtggataaatcttctgtcgggctgcaagttgtgaaatgtgcttctgaggtcagtggagctgtggcgaaaccagaaggtggtactcctgctagcgaagctgctgctggtcctgcagcgaaagctggtgcttttgttgtcaacgatgctgctagtgaacagggagttcaatgtatagcttctccactgggtggtgcctccaagctggaggaggttacagcagggaattcttttgcgaatgggccaaccactgaattaggagttttcaagggtgcatcccttgctaatgaattggctgatgtgccaggggttacgagcattatgccagaagttataggcaaacctagtactgacccaggggctataaccaccgtggtggaagttagtgatataggttctgtcgttcatgaaaccactgaactggaatctgcaggggaggattatattgccagtgaagctgctgctgaaccagaagatgctggcagagcttcttgcaatacagatgatactgctgctttagatgagccactgccgcctagttgtgatccgaacataggcaatgcgcaggttggaaatgcgatggacaccgttgccagtacagtgcggccttctcgatgtgatgctgcagaagaaggtgcttctgtgaattctacagccaatggtcctgttagagccagaggaccaaccgttaagggaggagtgcccaaggataaatctgttgcacccagtgttttacgtgtattggacgtagtgactagaagcattggtaaatcagggagaacagatgttatttgttatgctaggcggacaggtaagaggaagccagagctgcaggaagtgaagacggaaaatattgacttggaagatggtgttctatgcgagaaagaggaggcactgttgagaactgattgttgtgaaagtgtcttgtcaacagccgggtccatagatgttaaacttgccgacataaagaaagaccttatggataattcagctgcaagcaaggttacaaagatgaagagaaatatatttgaatgtaaaattgattactgccacatgacattcaagacaaaagctgagcttgctgcccacaagaagaacatgtgcacagtcaactcatgcagcaagcatttcagatcccacagttacctgaggcgccacgagagcgcacacaacgatgatatgccttacaagtgcccatgggatggttgtaatatggctttcaagtggtcatgggaccgggctgagcatttcaaggtccatgctggggccaagccttacaaatgcatgacgcctggatgcagcaaaatgtttaagtttgtttcagatttcacccggcataggaggaggtgcaaacctcagaggtaaaagcttgcttgatactacagaattaggatagcagtgaagtttgtgcttgctactgtagatgttctatttatttatttgctaggagatccatcgcacaactgttctgacaacttatagtgggattgcctgtttctttgttgaggaaaatgctaaaatctttagttagaaacttgagtttctcaaaatatcagtgtacatttgcggaaggtagttgtggtgattatgatcagcgctgtatcgaatctgagagctgtaaatgggaagcttatttttttatttcttttattttgtttcagcatagcattccatatttatctacttggattaacatggttgcactagagtacagcataagattagtctattttggtaacataagggtagtctattttgattactcaaccgcttgtatataaaaatggtttcagttacattcatctcatcatctttatactctcaagggttgcaatctctaatctttaaataatttgtgatgttgtttgcaactttgtattgcgtggttatggtcatagttattaaggcgtcgctatagtaacgctaaagcctcactaaagcggtaaggcaaggctgcaggcaagggcgtccggattgccttagtcatcggcataaggtgtccgccttaggctagagcgtcgcctttggcaggggcgaagccaggatttaagtttaggggggacaaatccgaatagagggctgctagagaggtattttgtattgtttacatggtgattagctaaaaaaattagtgtctcatgtagaactagaggagcattagagctcctccctgtctttgcccctggcctttggggcgcaaggcgtccgtaaggcgttggatagtagacgccttggct

SEQ ID NO: 84874 - DNA, 844 bp, Zea Mays
atggggttcgtgtccttcgtcgggcgggtgctcttcgtcgccgctttcctcctctccgcctaccagggtttaatgaatttggcgctgatggtgggccagcagctaaggcccttcagcccaagttcaatgtgtttgtaaaaaatatctctgcacatctgggagtagctgtgccgcacattgagttgaagcatgtgattgctgctacaattgctcttaagggacttggaagtctcctttttattttgagcagctccctcggtgcttatctcctgctgctgtacctcgctctgatcactcctatcgttcacgacttctacaactacgacacggagaaggaagaattcgcgcggctgtttgcgaagttcacccagctctcctcgtcttcctgggcatgaagaactccatcccgaagcggcagggcaagaagaaggctcacaaggcgaagacgaactagtaggaggctgctcgctctttctttagatggttgcgcgccggcctcaggcgggtgtcaggagacgaataggcccactagtgcgaagcagtcgtcgatgcgcatcgagctgccggctgcgcttttacatgtatcggatattcagattccattttgcggggcgcggcccgaacgaaggtgtgactagtgagcggcggtcatgtatgtgattgcgattggttggttggtttcttgaactgggctggcagtggttaatcttttcgatttgattatcttttgcactgggccgcaactgattcgatcaggaaaagtcatcactgtccgaaaaacttacttgtagaggtagggcatgtttggttggatgcccaaaaattgctacacattttctgccat

SEQ ID NO: 84875 - DNA, 1070 bp, Zea Mays
gcgctttctgtgttctgtcacggcccaactcctccccgcgccagggatcgtctgcctgactcgtaggccccgcctgtaagttcacgacgcgccgtcatctcgtcttctctttcaacttcgttcgcaagaagctcagaagtcagatcagaagccgccgaggggaggcgccgacgccgagtttttgctccatcccgcatccaccgccagaatgtttctcacgaggacggagtacgaccgcggggttaacaccttctcgccggaggggcggctgttccaggtcgagtacgccatcgaggccatcaagttgggatccactgcgatcgggttgaaaacaaaggatggtgttgtccttgctgttgagaaacgtgtgacctcgccactgctggaaccaagcagtgtggaaaaaatcatggaaattgatgagcacataggctgtgccatgagtgggcttattgctgatgctagaacactagtcgagcatgctcgtgttgaaactcagaatcataggttctcatacggggagccaatgaccgtagaatcttcaacacaagctatttgtgacttagctctgcgctttggcgaaggtgacgaagagtcaatgtcacggccatttggagtctctcttctaattgctggacatgatgagaatggacctagcctgtactacaccgacccatctggtactttttggcaatgcaacgcgaaggcaattggatctggctctgaaggagctgatagctccttgcaggagcagtacaacaaggagctggcccttgaggaggcggagaccatagccctttctattctgaagcaggttatggaggagaaggtgaccccaaacaacgtcgatattgccaaggttgctcccaagtaccacctctacacccctgccgaggtcgaagccgtgatcgcgaggctgtgaaacgctttcggagctcgtgttattcatgtcatcaatcgcggagatgcttcgagaaaggtcgagtgaagctgttgtctgagctgttcaaatcacatccaaggctctaaactttttctgccgacgtggactatcgataagcggcatttgc

SEQ ID NO: 84876 - DNA, 1006 bp, Zea Mays
ggcccatccgcgctttctgtgttctgtcacggcccaactcctccccgcgccagggatcgtctgcctgactcgtaggccccgcctgtaagttcacgacgcgccgtcatctcgtcttctctttcaacttcgttcgcaagaagctcagaagtcagatcagaagccgccgaggggaggcgccgacgccgagtttttgctccatcccgcatccaccgccagaatgtttctcacgaggacggagtacgaccgcggggttaacaccttctcgccggaggggcggctgttccaggtcgagtacgccatcgaggccatcaagttgggatccactgcgatcgggttgaaaacaaaggatggtgttgtccttgctgttgagaaacgtgtgacctcgccactgctggaaccaagcagtgtggaaaaaatcatggaaattgatgagcacataggctgtgccatgagtgggcttattgctgatgctagaacactagtcgagcatgctcgtgttgaaactcagaatcataggttctcatacggggagccaatgaccgtagaatcttcaacacaagctatttgtgacttagctctgcgctttggcgaaggtgacgaagagtcaatgtcacggccatttggagtctctcttctaattgctggacatgatgagaatggacctagcctgtactacaccgacccatctggtactttttggcaatgcaacgcgaaggcaattggatctggctctgaaggagctgatagctccttgcaggagcagtacaacaaggagctggcccttgaggaggcggagaccatagccctttctattctgaagcaggttatggaggagaaggtgaccccaaacaacgtcgatattgccaaggttgctcccaagtaccacctctacacccctgccgaggtcgaagccgtgatcgcgaggctgtgaaacgctttcggagctcgtgttattcatgtcatcaatcgtggcagcggtggtgctggctatttcctgtgcttttca

SEQ ID NO: 84877 - DNA, 2730 bp, Zea Mays
cgcggctccaactaccatcaacgaacaacccggaagaaagaagctataaaggcgaacctatcccctcgcccctctcgtcttcatcttcacttcgccccccgaacccgagcacccgcaaatatctgtcgccgtctcgccaacagcaccaaccgcgcctcctcgaattcgaccgtcatggcgagccaaggcgagccgtcttcctccgatccgaaggggaagaaggattactctacggcgatcctggagaggaagaagtcgccgaaccggctggtggtcgacgaggccaccaatgatgacaactccgtcgtcgctctgcacccggacaccatggagaggctccagctcttccgcggtgacactgtcttgatcaagggtaagaagagaaaggacactgtctgcattgtgcttgcagatgagacatgtgaggagccaaaggtccggatgaacaagattgtcaggaagaacttgagggtacggcttggtgatgttgtatctgtccatcaatgcccagatgtcaaatacgggaagcgtgtgcacatacttccaattgatgacaccattgaaggcatcactggcaatttgtttgatgcctttctaaaaccatacttccttgaagcctatcgtcctttgaggaaaggagaccttttcctagtcaggggtggcatgagaagtgtagaattcaaagtcatagagactgatcctgcagagtattgtatcgttgcaccagatacagaaatattttgtgagggtgagcctattaagagggaggacgaggaaagactcgatgaggttggctatgacgatgttggtggagttagaaagcagatggcccaaatcagggaactggttgaacttccattgcgtcatccccagcttttcaagtctattggtgtgaaaccaccaaagggcatattgctgtttgggcctcctggctccggcaagacccttattgctagagctgtagctaatgagacaggtgctttcttctttttgatcaatggaccagaaatcatgtcaaagctagcaggagaaagtgaaagcaatctcagaaaggcatttgaagaagctgagaaaaatgcaccttccatcatttttattgatgagatagattccatagcacctaagagagagaagacccatggagaagttgaaaggcgtattgtttcacagctcttgactcttatggatgggctcaagtctcgtgcacatgtgattgttatgggtgccaccaaccgtccaaacagtatcgatcctgctcttagaaggtttggtaggtttgatcgcgagattgatattggtgttccagatgaagttggccgccttgaggttcttcggattcacacgaaaaacatgaagctggctgaagatgttgacttggagctcattgcgaaggatacccatgggttgttgaagtcccaaatgtctcttgggaagatattggtggtctggaaaatgttaagagggagctacaggagactgttcaatatccagtggagcatccagataaatttgaaaagtttggcatgtctccttcgaagggtgttttgttttatggccctcctggctgtggcaagactctgttggccaaggcaatcgctaatgaatgccaggctaacttcatcagtgtgaagggtcctgaactgctcaccatgtggtttggtgagagcgaggccaatgtccgtgagatttttgacaaggctaggcagtctgctccgtgtgtcctcttctttgatgagctcgactccattgctactcagagaggaagcagtgttggtgacgcgggcggtgctgctgacagggtgttgaaccagctgcttactgagatggatggcatgaatgccaagaagacggttttcattatcggcgcgactaacagaccagatatcattgaccctgccttgctgaggccaggacgcctcgatcagcttatctacattcctctgcccgatgagcagtccaggcttcagatcttcaaagcctgcctcaggaagtctcctgtggctaaggacgttgacttgcatgctcttgccaagtacacccagggtttcagtggagcagatatcaccgagatctgccagcgtgcgtgcaagtatgccatcagggagaacatcgagaaggacatcgagcgggagaggcgcaggaaggacaaccctgaggccatggaggaagacgaggtggacgacattgccgagatcatggctgcccacttcgaggagtccatgaagtacgcccgccgcagtgtcagtgatgccgacatccgcaagtaccaggccttcgcccagacactccagcagtcccgtgggtttggcagcgagttccggttctccgaccaaccgacggcagctgccggtgcggccgacccctttgcatccgcagccgacgatgacgacttatacagctaaactgcacttctattgtgacgcatctttcctccctccgtatatatgattatatcatatgttaatgcgtgtgtgggggtgttgctgtacctatacagtgaagttaatatttctgttttgcatgcttgcctgttgcctaatttcactaatttgagatgattaaggtagtgtttgtcggagcccagttgagaggagtggctctcgaagggctttttttttgtgaccgtttagtaaagattcacgataaactagaggtgaagctaccgaaagagtgtgccaaagggacactaagttgagccttaattaattttagtttaaaaataaatagaaa

SEQ ID NO: 84878 - DNA, 409 bp, Zea Mays
cccctcggtgacaacgtctgtagttgtccaatccccaaggaaattgcaaagaggttgcctaggccaacggcatcgtgacagaacacttttgtgtattgcttgtaccatgtaatgcatgccagtccatatacacgggtactgtatggactacggaagacctctcatgtaaagatatttcccccattctgttatagttgtggatgacaattggtattgagaatatcctctgatgtcgcaaattggtcttctgatgaccaagtgtttttcttttcttttacctcgttctaggcattctaagggcctggagcatctggtttttaaggaactggtttataaaagttagtgtggttccaaatatatcggcttatatttcagtttatagaaattggatttatagtttcttaaaaac

SEQ ID NO: 84879 - DNA, 956 bp, Zea Mays
actcaccaccaccaaaaagaaagaccgtgtttatgaagcctggctaactagaaatactggagggctgaacactatcagcaacgatagctctccagacgccagttcaaaggacttgcgtgctaagttggtattgctgggagactcaggtgttgggaaaagttgcattgttcttcgttttgttcgtggtcagtttgatcctacttccaaggtaactgttggcgcatcttttttatcacaaacattggcattggaggattcaacaatagtgaagtttgaaatttgggatactgctgggcaagagaggtatgctgccttggcgccactttactacagaggagctgctgctgcaattgttgtctatgatataacaagtccggaatcatttagcaaagcacagtattgggtaaaggaacttcagaagcatggtagtcctggtattgtaatggttttggttggtaataaggctgatctacatgataatcgaagtgtatcctcgcaggatgcgcaggactacgcagagaagaacaatatgtttttcattgagacgtcggccaagacagctgataatataaaccaactgtttgaggaaattgcaaagaggttgcctaggccaacggcatcgtgacagaacacttttgtgtattgcttgtaccatgtaatgcatgccagtccatatacacgggtactgtatggactacggaagacctctcatgtaaagatatttcccccattctgttatagttgtggatgacaattggtattgagaatatcctctgatgtcgcaaattggtcttctgatgaccaagtgtttttcttttcttttacctcgttctaggcattctaagggcctggagcatctggtttttaaggaactggtttataaaagttagtgtggttccaaatatatcggcttatatttcagtttatagaaattggatttatagtttcttaaaaac

SEQ ID NO: 84880 - DNA, 1467 bp, Zea Mays
atgccgaatgcagcagcgcgtgtgtgtgtgtgtggggggggggggggggggggggggggcagacgagacgaggatggtgggtggccgcactggaaggaaagcgaaagcgaagaaacattcctgcacgagcacactacggacagtgcagcagccagcaggcagcggccccctttgcctttacagccagagcccggaggggcgctgctgcagccgacccatgacgcccgagtgctcaacgcccccaacgacctggattcgcttttccccgagcctcagcagcagcaacgcgtcgcgcgtgcatcacaacgagattcagagcccgagcccgagccccagccccagaccaacgacgagaaaggacaaactgcggcggacctacccgaagtcggaggcagggcaaaaggcccgatcccccctccccgccggttgccgcgctcgtgccacggtgcggtagccccgtcgacgccggcggacagcgtgcactatgggttgctcctcctccgtgccagctagaaatactggagggctgaacactatcagcaacgatagctctccagacgccagttcaaaggacttgcgtgctaagttggtattgctgggagactcaggtgttgggaaaagttgcattgttcttcgttttgttcgtggtcagtttgatcctacttccaaggtaactgttggcgcatcttttttatcacaaacattggcattggaggattcaacaatagtgaagtttgaaatttgggatactgctgggcaagagaggtatgctgccttggcgccactttactacagaggagctgctgctgcaattgttgtctatgatataacaagtccggaatcatttagcaaagcacagtattgggtaaaggtaaagtataagcaaccctctactcttctgagttcttatccttggttttctccccattccctattatcgacctgtgcatcttcttgaagctctgatgtaatatgtatggtacctaaaacaccattacagattagaaacatattgacttggatattatcatatgatattcaattgactgtacctgagcaacattagaacttagaagctatcatgcaccttgaatatttatttatgtgtagcagttgactcggtgattatattcaatcttactgctctgaaattctattttcgtttgtaccctgtttttggtttcaagattaaatacaacactcctgtttttctttcccattccacaggaacttcagaagcatggtagtcctggtattgtaatggttttggttggtaataaggctgatctacatgataatcgaagtgtatcctcgcaggatgcgcaggactacgcagagaagaacaatatgtttttcattgagacgtcggccaagacagctgataatataaaccaactgtttgaggaagatcatttcagtttctttatgatttgttggaatggaaacacacaagttagtgctgaattt

SEQ ID NO: 84881 - DNA, 1614 bp, Zea Mays
cgcgcgtggcgcctctcttcctatttatgcctccggtttgtgtttcccctcctcttcgtcagaccaaccggtacgcacaagtgcacatccactctgagaagaagaaacccaaacgatccagagaggactcccagtccagtctccgtccatgggtgcgggaaagggaggagacggcgaggaggccgcgcagcccgtcgtgctgaagctggacctgcattgcgccggctgcgcgcacaaggtcaagaaggccatcaggtgtcgggtcgatcgtgacggacgtcgcggcgaacagggtcgtcgtggcgggcacggccgacgcgggcgcgctcaaggcgcggctcgaggccaagaccaacaagcccgtggaggtcgtctctgccggcggcgtccccccaaagccccccgccgctgagccccaacaggacgctggcgccggcgagaagaagggggacaagggcgcgaaccccaaggaggaggctaaggagcaacaggcggcggaggaggagaagaagaaacccaaggaggagacggtgctgctcaagatccgcctccactgcgacggctgcggcgaccgcatcaggcgacgcatctacaagttcaaaggcgtgaaggacgtggtgctggagggcaatgccaaggacgaggtgaaggtcacgggcaccatggacgtcccggacatgctctcgtacctcaaggagaagctcaaccgcgacgtggaggccgtggcgcccgccaagaaagacggcgatggcaaggacgaggacaagaaggacggcggcggcggcagcggcggcggcgaagacaagaacaagggcgcgggcgcggcgggcggcgacgacaagaaagacaagggcaaaggggccgacgacgtgccggtggccccgtccacggcggccgccgcggcgttgatggccgcgccggcgggggcgagcacgtaccgcgtggcgccgccgtacccgtacgggtacgtggcggcgtaccagcagcagcccccgccccccgccagctactacccgtacccgtcgtactacggcaatggcgacggcgtgggcctcgccaaccccgcccaccactacccgcagccgcagctggcgtacccgccgtacccgtaccgcttcgacgtggcgccgccgccgccgccgccgcagctcttcagcgacgagaaccccaacgcctgctccgtgatgtgacgtgacgggaaccgccgccggccgtgggcacgcacggtgtcccttggttgcgtcagcgagctcacccgatccgtcgtcggctttaacctttagccggccggccgaccggccgggaagaaaagaaatcgacatgtacatatcgtcgacggtagagctctagggttatttctctgacgcaattctgcctgcttcatccgttgaattgaatcctttcgttcccatcttcttgacgctctgttatgctcgaatgctggggtgcttcattcggtagcgaagttctgtaacagacgcgatgaacaaactggtcgggaagtgcgactgcgtggtcaccgacgctgaaccgtgtgctcctactcctgccgacgacctgggccgcattttctgacgttctgtagaatgcgtcggtccgaggcgttatccgaac

SEQ ID NO: 84882 - DNA, 1011 bp, Zea Mays
cgggaatccacgacaaccacaggaaaaaggagacgaccgcgccggcgccgcccattaatttctccccttctatccgcgatcacctctcctcgctgccgcggcatcttcttctgggtcctggcccgtcctcgtcgcaccattccatggccgattcagccgcgctctccacctccctcccccgctctctggcgtccaggaggcccctctcgtcgcctctccacgccagagcccgggcccgctcccagcgccgctgccggctcggatcgcgctcgctccaccggttgcgtgctcgggcgggaaaggacgacccggaggacctctacgggccctacccctgggaccagcccttggatctcaccgctgggtccgacattcaatgggtgcctgaagacagagtcacgctattcacttctgatgggctgatccagattgggggttccttggttcctcgtcgagtttctgcttctgagaagaggcaacggaaactgaagagtggacaaaagttgcgccggtttcaggagagctcttacatggatccaaatcaaagtctttgccttggagcactatttaacatagcagcaacaaatacatgggcagaagattatgcatctttggcttttgccgttctattgaaatgttaagcgatgtagtggaagatacggtattggagcatggcggtgaggttgtcactgcagagaaggcaagcagtaacggcctccaggagaagctaaccatgtctgttgcagtaccattgctgtggggcgttcctccagcatcagagaccctccatgtcgcggtgcggagcggtggaggtattgtcgataagatctattggcagtgggacttattctagatgtccagcattaacaaaattggttccaagatgtatatgtctctctaattttctgcacgcgttgtgcagcaactgtaaacttagtctctacctgtacagacccggtcacccttgtgcatatatataaaagaactttgggatcacaacttaaccggagg

SEQ ID NO: 84883 - DNA, 1143 bp, Zea Mays
cttgccagctcatcgtgccacaaggcgacaaagaaatctagcccgttggtctcatcaacgagcaaccagccaacgtccgagatccaaacagtggccagcaggcaccggccaaaacgaagaagtccaccgcttggctcgcgggaatccacgacaaccacaggaaaaaggagacgaccgcgccggcgccgcccattaatttctccccttctatccgcgatcacctctcctcgctgccgcggcatcttcttctgggtcctggcccgtcctcgtcgcaccattccatggccgattcagccgcgctctccacctccctcccccgctctctggcgtccaggaggcccctctcgtcgcctctccacgccagagcccgggcccgctcccagcgccgctgccggctcggatcgcgctcgctccaccggttgcgtgctcgggcgggaaaggacgacccggaggacctctacgggccctacccctgggaccagcccttggatctcaccgctgggtccgacattcaatgggtgcctgaagacagagtcacgctattcacttctgatgggctgatccagattgggggttccttggttcctcgtcgagtttctgcttctgagaagaggcaacggaaactgaagagtggacaaaagttgcgccggtttcaggagagctcttacatggatccaaatcaaagtctttgccttggagcactatttaacatagcagcaacaaatggcctagacatgggcagaagattatgcatctttggcttttgccgttctattgaaatgttaagcgatgtagtggaagatacggtattggagcatggcggtgagagaaggcaagcagtaacggcctccaggagaagctaaccatgtctgttgcagtaccattgctgtggggcgttcctccagcatcagagaccctccatgtcgcggtgcggagcggtggaggtattgtcgataagatctattggcagtgggacttattctagatgtccagcattaacaaaattggttccaagatgtatatgtctctctaattttctgcacgcgttgtgcagcaactgtaaacttagtctctacctgtacagacccggtcacccttgtgcatatatataaaagaactttgggatcacaacttaaccggagg

SEQ ID NO: 84884 - DNA, 2907 bp, Zea Mays
ttttttttacaacttctccctctcagtttactgttgaaaaggcaaacaaaatcacttagccgcgctgcctctgtgtctgtcttttcgtttaattagggtttccggatctgctctgcgtcgccgccgaccaacctccaccgcgcgacgccatggacttcgacgagtacgagtatctggagaagacggtggaagcgttcgcagcgccggccaacggttcgtcgccgcccgggtcggggtacaaggacaaggagcgcagctcacgccgccgctcaacgggcggtgacgaagagcgcgacaacgtagaacgcagatcgaagcgttctcgccccgaggaaggccgcgaccgcgatagagagcggcacaggtaccgcgacggcgaccggcaccgcagcagtcgggagcggcgggaccgtgaccgtgacgtcaaggagaaagagcagggcagggagaacgacaaggacaggaggagccgcgaccgcgaacgggagaaggaggagagggagaaggataggcagcggaggagtcggagccggtccgagcggcgccgtgatgacgaagagcgtgatcgctaccgtgaacgcgatgtcagacgtaggaaagaggaagttgctgaacctgaagttgatccagaaagagatcagaggactgtgtttgcttaccagttatctttgaaggcagatgaaagagatgtatatgagttcttttctagggctggaaaggtccgggatgttcgcctgattatggatcgaaattcacgacgttctaaaggtgtcgggtatattgaattctatgatgctatgtctgttccaatggcgatagctctttctggtcagttgcttcttggtcaacaagtgatggttaagccttcagaggctgaaaagaatttagttcagtcaaatgcttcaagtggagctgcttcaggtggagcaaggaagttgtatgttggaaatcttcactcaaacattaatgaagaccagttgcgacaggtctttgaaccatttggacaagtggagcttgttcagttgccattagatccgctcagtgggctatgcaaaggttttggttttgtgcagtttgcacgtcttgaagatgcaaaagcggcccagagtttgaatgggcaacttgagattgctggaagagtaatcaaggtttcagctgtgacagaccaagcaggcatgcaagttagtggagctacgggagatttggatgatgaagaagctggaggcttggcactgaatgccagttccagagctcttctaatgcagaaattggaccgcagcggcattacgaccaggtacctttttggggttgattgcataataataattctgacattttgataagtataggtctttaaaaaactatttagtatagcaccgatatttggagtatatttatttatttgttaattaattggtaacagagctgcacatttgattactgaggtgctgaatggactattcctccataatttgttttttttgtggcgctgcagagacttcatttcattttagaattccattatcttgcttgcttgtatgagtgccatcatttgtacccaaatctctcattattgacctctactatattatcgtcaggattcaaccaccactacagcaacactgtttccatatatatctagcttatcaaggtcgttctccatggacctcctccagttctttggtgtaaagtggtttggctgaaatattttgtttactgcagttctagtatttagtgccagttgcattgattgcaaatttcaggatggcgaattgatgatgtttgaaagtggacataagagaggaatcttgttacaatgcccttaccattttgatgcagatttcaatgattggctccataagaaacttgagttaaattttgttatagtagatgtacccttttatgtgtagcttactcactggacacgccaaccttttgtgttcctgcagtttgactggtgggacgggcattgctggtttgactactccagtggcaataccaactgtatctgtccttggtgctgccccagctgcagcccctcttctgcaccctacagtgcctggtcttgcaattcccggggcaactcttccaattactaccccatctattgatttggctccacctagtcaatgcctattgctcaagaatatgtttgatccagctttggagacagatcctgatttcgatttggacatcagagatgatgttcaggaggaatgttccaagtttggtcaattaaaacatatttttgtagacaaacattcaatgggtgcctgaagacagagtcacgctattcacttctgatgggctgatccagattgggggttccttggttcctcgtcgagtttctgcttctgagaagaggcaacggaaactgaagagtggacaaaagttgcgccggtttcaggagagctcttacatggatccaaatcaaagtctttgccttggagcactatttaacatagcagcaacaaatggcctagacatgggcagaagattatgcatctttggcttttgccgttctattgaaatgttaagcgatgtagtggaagatacggtattggagcatggcggtgaggttgtcactgcagagaaggcaagcagtaacggcctccaggagaagctaaccatgtctgttgcagtaccattgctgtggggcgttcctccagcatcagagaccctccatgtcgcggtgcggagcggtggaggtattgtcgataagatctattggcagtgggacttattctagatgtccagcattaacaaaattggttccaagatgtatatgtctctctaattttctgcacgcgttgtgcagcaactgtaaacttagtctctacctgtacagacccggtcacccttgtgcatatatataaaagaactttgggatcacaacttaaccggagg

SEQ ID NO: 84885 - DNA, 583 bp, Zea Mays
ctgtcctcctgtttctacccttagcaaagtactgccggttttgtgtacctgcggtttgatagtataacagccgctatgagcgcacagaaagcactccatggaagatggttcgcagggaagatgatcacagcaacttttatgaccccacaacagtatgaaatgaagttcccgagctagtgaacagatgcatgattaatatggacgtagttgcttgggctcggtgggtgctggcatttctatattttagcgttttgagcttgtgtcaacttattactggaggtaattataaaaaaaactagtggaggaaaatttagtggaagctagtgtatcgggaaatggctaacgaaaaatggtgaaagaaagagtttccttgccctgtgggttagtgctcgaattgaaactgtactgtgtaatggagtttctccctgaagtgctagtactaatacctaaaatgatggaagaaagagttgacttgcgttgcgcttgttgatttgattatactcgtccgtaccctttgcattattgtttggagatgcttgtcacagtttttaagtgatgtacattaattgtgtgtttggttgag

SEQ ID NO: 84886 - DNA, 2572 bp, Zea Mays
ttttttttacaacttctccctctcagtttactgttgaaaaggcaaacaaaatcacttagccgcgctgcctctgtgtctgtcttttcgtttaattagggtttccggatctgctctgcgtcgccgccgaccaacctccaccgcgcgacgccatggacttcgacgagtacgagtatctggagaagacggtggaagcgttcgcagcgccggccaacggttcgtcgccgcccgggtcggggtacaaggacaaggagcgcagctcacgccgccgctcaacgggcggtgacgaagagcgcgacaacgtagaacgcagatcgaagcgttctcgccccgaggaaggccgcgaccgcgatagagagcggcacaggtaccgcgacggcgaccggcaccgcagcagtcgggagcggcgggaccgtgaccgtgacgtcaaggagaaagagcagggcagggagaacgacaaggacaggaggagccgcgaccgcgaacgggagaaggaggagagggagaaggataggcagcggaggagtcggagccggtccgagcggcgccgtgatgacgaagagcgtgatcgctaccgtgaacgcgatgtcagacgtaggaaagaggaagttgctgaacctgaagttgatccagaaagagatcagaggactgtgtttgcttaccagttatctttgaaggcagatgaaagagatgtatatgagttcttttctagggctggaaaggtccgggatgttcgcctgattatggatcgaaattcacgacgttctaaaggtgtcgggaatatttgtaatatggtgtacctgctgggatactcagcaacttattaagatggaaaacaagatcatattggtatattgaattctatgatgctatgtctgttccaatggcgatagctctttctggtcagttgcttcttggtcaacaagtgatggttaagccttcagaggctgaaaagaatttagttcagtcaaatgcttcaagtggagctgcttcaggtggagcaaggaagttgtatgttggaaatcttcactcaaacattaatgaagaccagttgcgacaggtctttgaaccatttggacaagtggagcttgttcagttgccattagatccgctcagtgggctatgcaaaggttttggttttgtgcagatgcaaaagcggcccagagtttgaatgggcaacttgagattgctggaagagtaatcaaggtttcagctgtgacagaccaagcaggcatgcaagttagtggagctacgggagatttggatgatgaagaagctggaggcttggcactgaatgccagttccagagctcttctaatgcagaaattggaccgcagcggcattacgaccaggtacctttttggggttgattgcataataataattctgacattttgataagtataggtctttaaaaaactatttagtatagcaccgatatttggagtatatttatttatttgttaattaattggtaacagagctgcacatttgattactgaggtgctgaatggactattcctccataatttgttttttttgtggcgctgcagagacttcatttcattttagaattccattatcttgcttgcttgtatgagtgccatcatttgtacccaaatctctcattattgacctctactatattatcgtcaggattcaaccaccactacagcaacactgtttccatatatatctagcttatcaagtttgactggtgggacgggcattgctggtttgactactccagtggcaataccaactgtatctgtccttggtgctgccccagctgcagcccctcttctgcaccctacagtgcctggtcttgcaattcccggggcaactcttccaattactaccccatctattgatttggctccacctagtcaatgcctattgctcaagaatatgtttgatccagctttggagacagatcctgatttcgatttggacatcagagatgatgttcaggaggaatgttccaagtttggtcaattaaaacatatttttgtagacaaaagtactgccggttttgtgtacctgcggtttgatagtataacagccgctatgagcgcacagaaagcactccatggaagatggttcgcagggaagatgatcacagcaacttttatgaccccacaacagtatgaaatgaagttcccgagctagtgaacagatgcatgattaatatggacgtagttgcttgggctcggtgggtgctggcatttctatattttagcgttttgagcttgtgtcaacttattactggaggtaattataaaaaaaactagtggaggaaaatttagtggaagctagtgtatcgggaaatggctaacgaaaaatggtgaaagaaagagtttccttgccctgtgggttagtgctcgaattgaaactgtactgtgtaatggagtttctccctgaagtgctagtactaatacctaaaatgatggaagaaagagttgacttgcgttgcgcttgttgatttgattatactcgtccgtaccctttgcattattgtttggagatgcttgtcacagtttttaagtgatgtacattaattgtgtgtttggttgag

SEQ ID NO: 84887 - DNA, 2517 bp, Zea Mays
ttttttttacaacttctccctctcagtttactgttgaaaaggcaaacaaaatcacttagccgcgctgcctctgtgtctgtcttttcgtttaattagggtttccggatctgctctgcgtcgccgccgaccaacctccaccgcgcgacgccatggacttcgacgagtacgagtatctggagaagacggtggaagcgttcgcagcgccggccaacggttcgtcgccgcccgggtcggggtacaaggacaaggagcgcagctcacgccgccgctcaacgggcggtgacgaagagcgcgacaacgtagaacgcagatcgaagcgttctcgccccgaggaaggccgcgaccgcgatagagagcggcacaggtaccgcgacggcgaccggcaccgcagcagtcgggagcggcgggaccgtgaccgtgacgtcaaggagaaagagcagggcagggagaacgacaaggacaggaggagccgcgaccgcgaacgggagaaggaggagagggagaaggataggcagcggaggagtcggagccggtccgagcggcgccgtgatgacgaagagcgtgatcgctaccgtgaacgcgatgtcagacgtaggaaagaggaagttgctgaacctgaagttgatccagaaagagatcagaggactgtgtttgcttaccagttatctttgaaggcagatgaaagagatgtatatgagttcttttctagggctggaaaggtccgggatgttcgcctgattatggatcgaaattcacgacgttctaaaggtgtcgggtatattgaattctatgatgctatgtctgttccaatggcgatagctctttctggtcagttgcttcttggtcaacaagtgatggttaagccttcagaggctgaaaagaatttagttcagtcaaatgcttcaagtggagctgcttcaggtggagcaaggaagttgtatgttggaaatcttcactcaaacattaatgaagaccagttgcgacaggtctttgaaccatttggacaagtggagcttgttcagttgccattagatccgctcagtgggctatgcaaaggttttggttttgtgcagtttgcacgtcttgaagatgcaaaagcggcccagagtttgaatgggcaacttgagattgctggaagagtaatcaaggtttcagctgtgacagaccaagcaggcatgcaagttagtggagctacgggagatttggatgatgaagaagctggaggcttggcactgaatgccagttccagagctcttctaatgcagaaattggaccgcagcggcattacgaccaggtacctttttggggttgattgcataataataattctgacattttgataagtataggtctttaaaaaactatttagtatagcaccgatatttggagtatatttatttatttgttaattaattggtaacagagctgcacatttgattactgaggtgctgaatggactattcctccataatttgttttttttgtggcgctgcagagacttcatttcattttagaattccattatcttgcttgcttgtatgagtgccatcatttgtacccaaatctctcattattgacctctactatattatcgtcaggattcaaccaccactacagcaacactgtttccatatatatctagcttatcaagtttgactggtgggacgggcattgctggtttgactactccagtggcaataccaactgtatctgtccttggtgctgccccagctgcagcccctcttctgcaccctacagtgcctggtcttgcaattcccggggcaactcttccaattactaccccatctattgatttggctccacctagtcaatgcctattgctcaagaatatgtttgatccagctttggagacagatcctgatttcgatttggacatcagagatgatgttcaggaggaatgttccaagtttggtcaattaaaacatatttttgtagacaaaagtactgccggttttgtgtacctgcggtttgatagtataacagccgctatgagcgcacagaaagcactccatggaagatggttcgcagggaagatgatcacagcaacttttatgaccccacaacagtatgaaatgaagttcccgagctagtgaacagatgcatgattaatatggacgtagttgcttgggctcggtgggtgctggcatttctatattttagcgttttgagcttgtgtcaacttattactggaggtaattataaaaaaaactagtggaggaaaatttagtggaagctagtgtatcgggaaatggctaacgaaaaatggtgaaagaaagagtttccttgccctgtgggttagtgctcgaattgaaactgtactgtgtaatggagtttctccctgaagtgctagtactaatacctaaaatgatggaagaaagagttgacttgcgttgcgcttgttgatttgattatactcgtccgtaccctttgcattattgtttggagatgcttgtcacagtttttaagtgatgtacattaattgtgtgtttggttgag

SEQ ID NO: 84888 - DNA, 2231 bp, Zea Mays
ttttttttacaacttctccctctcagtttactgttgaaaaggcaaacaaaatcacttagccgcgctgcctctgtgtctgtcttttcgtttaattagggtttccggatctgctctgcgtcgccgccgaccaacctccaccgcgcgacgccatggacttcgacgagtacgagtatctggagaagacggtggaagcgttcgcagcgccggccaacggttcgtcgccgcccgggtcggggtacaaggacaaggagcgcagctcacgccgccgctcaacgggcggtgacgaagagcgcgacaacgtagaacgcagatcgaagcgttctcgccccgaggaaggccgcgaccgcgatagagagcggcacaggtaccgcgacggcgaccggcaccgcagcagtcgggagcggcgggaccgtgaccgtgacgtcaaggagaaagagcagggcagggagaacgacaaggacaggaggagccgcgaccgcgaacgggagaaggaggagagggagaaggataggcagcggaggagtcggagccggtccgagcggcgccgtgatgacgaagagcgtgatcgctaccgtgaacgcgatgtcagacgtaggaaagaggaagttgctgaacctgaagttgatccagaaagagatcagaggactgtgtttgcttaccagttatctttgaaggcagatgaaagagatgtatatgagttcttttctagggctggaaaggtccgggatgttcgcctgattatggatcgaaattcacgacgttctaaaggtgtcgggaatatttgtaatatggtgtacctgctgggatactcagcaacttattaagatggaaaacaagatcatattggtatattgaattctatgatgctatgtctgttccaatggcgatagctctttctggtcagttgcttcttggtcaacaagtgatggttaagccttcagaggctgaaaagaatttagttcagtcaaatgcttcaagtggagctgcttcaggtggagcaaggaagttgtatgttggaaatcttcactcaaacattaatgaagaccagttgcgacaggtctttgaaccatttggacaagtggagcttgttcagttgccattagatccgctcagtgggctatgcaaaggttttggttttgtgcagtttgcacgtcttgaagatgcaaaagcggcccagagtttgaatgggcaacttgagattgctggaagagtaatcaaggtttcagctgtgacagaccaagcaggcatgcaagttagtggagctacgggagatttggatgatgaagaagctggaggcttggcactgaatgccagttccagagctcttctaatgcagaaattggaccgcagcggcattacgaccagtttgactggtgggacgggcattgctggtttgactactccagtggcaataccaactgtatctgtccttggtgctgccccagctgcagcccctcttctgcaccctacagtgcctggtcttgcaattcccggggcaactcttccaattactaccccatctattgatttggctccacctagtcaatgcctattgctcaagaatatgtttgatccagctttggagacagatcctgatttcgatttggacatcagagatgatgttcaggaggaatgttccaagtttggtcaattaaaacatatttttgtagacaaaagtactgccggttttgtgtacctgcggtttgatagtataacagccgctatgagcgcacagaaagcactccatggaagatggttcgcagggaagatgatcacagcaacttttatgaccccacaacagtatgaaatgaagttcccgagctagtgaacagatgcatgattaatatggacgtagttgcttgggctcggtgggtgctggcatttctatattttagcgttttgagcttgtgtcaacttattactggaggtaattataaaaaaaactagtggaggaaaatttagtggaagctagtgtatcgggaaatggctaacgaaaaatggtgaaagaaagagtttccttgccctgtgggttagtgctcgaattgaaactgtactgtgtaatggagtttctccctgaagtgctagtactaatacctaaaatgatggaagaaagagttgacttgcgttgcgcttgttgatttgattatactcgtccgtaccctttgcattattgtttggagatgcttgtcacagtttttaagtgatgtacattaattgtgtgtttggttgag

SEQ ID NO: 84889 - DNA, 2213 bp, Zea Mays
ttttttttacaacttctccctctcagtttactgttgaaaaggcaaacaaaatcacttagccgcgctgcctctgtgtctgtcttttcgtttaattagggtttccggatctgctctgcgtcgccgccgaccaacctccaccgcgcgacgccatggacttcgacgagtacgagtatctggagaagacggtggaagcgttcgcagcgccggccaacggttcgtcgccgcccgggtcggggtacaaggacaaggagcgcagctcacgccgccgctcaacgggcggtgacgaagagcgcgacaacgtagaacgcagatcgaagcgttctcgccccgaggaaggccgcgaccgcgatagagagcggcacaggtaccgcgacggcgaccggcaccgcagcagtcgggagcggcgggaccgtgaccgtgacgtcaaggagaaagagcagggcagggagaacgacaaggacaggaggagccgcgaccgcgaacgggagaaggaggagagggagaaggataggcagcggaggagtcggagccggtccgagcggcgccgtgatgacgaagagcgtgatcgctaccgtgaacgcgatgtcagacgtaggaaagaggaagttgctgaacctgaagttgatccagaaagagatcagaggactgtgtttgcttaccagttatctttgaaggcagatgaaagagatgtatatgagttcttttctagggctggaaaggtccgggatgttcgcctgattatggatcgaaattcacgacgttctaaaggtgtcgggtatattgaattctatgatgctatgtctgttccaatggcgatagctctttctggtcagttgcttcttggtcaacaagtgatggttaagccttcagaggctgaaaagaatttagttcagtcaaatgcttcaagtggagctgcttcaggtggagcaaggaagttgtatgttggaaatcttcactcaaacattaatgaagaccagttgcgacaggtctttgaaccatttggacaagtggagcttgttcagttgccattagatccgctcagtgggctatgcaaaggttttggttttgtgcagtttgcacgtcttgaagatgcaaaagcggcccagagtttgaatgggcaacttgagattgctggaagagtaatcaaggtttcagctgtgacagaccaagcaggcatgcaagttagtggagctacgggagatttggatgatgaagaagctggaggcttggcactgaatgccagttccagagctcttctaatgcagaaattggaccgcagcggcattacgaccaggattcaaccaccactacagcaacactgtttccatatatatctagcttatcaagtttgactggtgggacgggcattgctggtttgactactccagtggcaataccaactgtatctgtccttggtgctgccccagctgcagcccctcttctgcaccctacagtgcctggtcttgcaattcccggggcaactcttccaattactaccccatctattgatttggctccacctagtcaatgcctattgctcaagaatatgtttgatccagctttggagacagatcctgatttcgatttggacatcagagatgatgttcaggaggaatgttccaagtttggtcaattaaaacatatttttgtagacaaaagtactgccggttttgtgtacctgcggtttgatagtataacagccgctatgagcgcacagaaagcactccatggaagatggttcgcagggaagatgatcacagcaacttttatgaccccacaacagtatgaaatgaagttcccgagctagtgaacagatgcatgattaatatggacgtagttgcttgggctcggtgggtgctggcatttctatattttagcgttttgagcttgtgtcaacttattactggaggtaattataaaaaaaactagtggaggaaaatttagtggaagctagtgtatcgggaaatggctaacgaaaaatggtgaaagaaagagtttccttgccctgtgggttagtgctcgaattgaaactgtactgtgtaatggagtttctccctgaagtgctagtactaatacctaaaatgatggaagaaagagttgacttgcgttgcgcttgttgatttgattatactcgtccgtaccctttgcattattgtttggagatgcttgtcacagtttttaagtgatgtacattaattgtgtgtttggttgag

SEQ ID NO: 84890 - DNA, 2470 bp, Zea Mays
ttttttttacaacttctccctctcagtttactgttgaaaaggcaaacaaaatcacttagccgcgctgcctctgtgtctgtcttttcgtttaattagggtttccggatctgctctgcgtcgccgccgaccaacctccaccgcgcgacgccatggacttcgacgagtacgagtatctggagaagacggtggaagcgttcgcagcgccggccaacggttcgtcgccgcccgggtcggggtacaaggacaaggagcgcagctcacgccgccgctcaacgggcggtgacgaagagcgcgacaacgtagaacgcagatcgaagcgttctcgccccgaggaaggccgcgaccgcgatagagagcggcacaggtaccgcgacggcgaccggcaccgcagcagtcgggagcggcgggaccgtgaccgtgacgtcaaggagaaagagcagggcagggagaacgacaaggacaggaggagccgcgaccgcgaacgggagaaggaggagagggagaaggataggcagcggaggagtcggagccggtccgagcggcgccgtgatgacgaagagcgtgatcgctaccgtgaacgcgatgtcagacgtaggaaagaggaagttgctgaacctgaagttgatccagaaagagatcagaggactgtgtttgcttaccagttatctttgaaggcagatgaaagagatgtatatgagttcttttctagggctggaaaggtccgggatgttcgcctgattatggatcgaaattcacgacgttctaaaggtgtcgggaatatttgtaatatggtgtacctgctgggatactcagcaacttattaagatggaaaacaagatcatattggtatattgaattctatgatgctatgtctgttccaatggcgatagctctttctggtcagttgcttcttggtcaacaagtgatggttaagccttcagaggctgaaaagaatttagttcagtcaaatgcttcaagtggagctgcttcaggtggagcaaggaagttgtatgttggaaatcttcactcaaacattaatgaagaccagttgcgacaggtctttgaaccatttggacaagtggagcttgttcagttgccattagatccgctcagtgggctatgcaaaggttttggttttgtgcagtttgcacgtcttgaagatgcaaaagcggcccagagtttgaatgggcaacttgagattgctggaagagtaatcaaggtttcagctgtgacagaccaagcaggcatgcaagttagtggagctacgggagatttggatgatgaagaagctggaggcttggcactgaatgccagttccagagctcttctaatgcagaaattggaccgcagcggcattacgaccaggattcaaccaccactacagcaacactgtttccatatatatctagcttatcaaggatggcgaattgatgatgtttgaaagtggacataagagaggaatcttgttacaatgcccttaccattttgatgcagatttcaatgattggctccataagaaacttgagttaaattttgttatagtagatgtacccttttatgtgtagcttactcactggacacgccaaccttttgtgttcctgcagtttgactggtgggacgggcattgctggtttgactactccagtggcaataccaactgtatctgtccttggtgctgccccagctgcagcccctcttctgcaccctacagtgcctggtcttgcaattcccggggcaactcttccaattactaccccatctattgatttggctccacctagtcaatgcctattgctcaagaatatgtttgatccagctttggagacagatcctgatttcgatttggacatcagagatgatgttcaggaggaatgttccaagtttggtcaattaaaacatatttttgtagacaaaagtactgccggttttgtgtacctgcggtttgatagtataacagccgctatgagcgcacagaaagcactccatggaagatggttcgcagggaagatgatcacagcaacttttatgaccccacaacagtatgaaatgaagttcccgagctagtgaacagatgcatgattaatatggacgtagttgcttgggctcggtgggtgctggcatttctatattttagcgttttgagcttgtgtcaacttattactggaggtaattataaaaaaaactagtggaggaaaatttagtggaagctagtgtatcgggaaatggctaacgaaaaatggtgaaagaaagagtttccttgccctgtgggttagtgctcgaattgaaactgtactgtgtaatggagtttctccctgaagtgctagtactaatacctaaaatgatggaagaaagagttgacttgcgttgcgcttgttgatttgattatactcgtccgtaccctttgcattattgtttggagatgcttgtcacagtttttaagtgatgtacattaattgtgtgtttggttgag

SEQ ID NO: 84891 - DNA, 2399 bp, Zea Mays
ttttttttacaacttctccctctcagtttactgttgaaaaggcaaacaaaatcacttagccgcgctgcctctgtgtctgtcttttcgtttaattagggtttccggatctgctctgcgtcgccgccgaccaacctccaccgcgcgacgccatggacttcgacgagtacgagtatctggagaagacggtggaagcgttcgcagcgccggccaacggttcgtcgccgcccgggtcggggtacaaggacaaggagcgcagctcacgccgccgctcaacgggcggtgacgaagagcgcgacaacgtagaacgcagatcgaagcgttctcgccccgaggaaggccgcgaccgcgatagagagcggcacaggtaccgcgacggcgaccggcaccgcagcagtcgggagcggcgggaccgtgaccgtgacgtcaaggagaaagagcagggcagggagaacgacaaggacaggaggagccgcgaccgcgaacgggagaaggaggagagggagaaggataggcagcggaggagtcggagccggtccgagcggcgccgtgatgacgaagagcgtgatcgctaccgtgaacgcgatgtcagacgtaggaaagaggaagttgctgaacctgaagttgatccagaaagagatcagaggactgtgtttgcttaccagttatctttgaaggcagatgaaagagatgtatatgagttcttttctagggctggaaaggtccgggatgttcgcctgattatggatcgaaattcacgacgttctaaaggtgtcgggtatattgaattctatgatgctatgtctgttccaatggcgatagctctttctggtcagttgcttcttggtcaacaagtgatggttaagccttcagaggctgaaaagaatttagttcagtcaaatgcttcaagtggagctgcttcaggtggagcaaggaagttgtatgttggaaatcttcactcaaacattaatgaagaccagttgcgacaggtctttgaaccatttggacaagtggagcttgttcagttgccattagatccgctcagtgggctatgcaaaggttttggttttgtgcagtttgcacgtcttgaagatgcaaaagcggcccagagtttgaatgggcaacttgagattgctggaagagtaatcaaggtttcagctgtgacagaccaagcaggcatgcaagttagtggagctacgggagatttggatgatgaagaagctggaggcttggcactgaatgccagttccagagctcttctaatgcagaaattggaccgcagcggcattacgaccaggattcaaccaccactacagcaacactgtttccatatatatctagcttatcaaggatggcgaattgatgatgtttgaaagtggacataagagaggaatcttgttacaatgcccttaccattttgatgcagatttcaatgattggctccataagaaacttgagttaaattttgttatagtagatgtacccttttatgtgtagcttactcactggacacgccaaccttttgtgttcctgcagtttgactggtgggacgggcattgctggtttgactactccagtggcaataccaactgtatctgtccttggtgctgccccagctgcagcccctcttctgcaccctacagtgcctggtcttgcaattcccggggcaactcttccaattactaccccatctattgatttggctccacctagtcaatgcctattgctcaagaatatgtttgatccagctttggagacagatcctgatttcgatttggacatcagagatgatgttcaggaggaatgttccaagtttggtcaattaaaacatatttttgtagacaaaagtactgccggttttgtgtacctgcggtttgatagtataacagccgctatgagcgcacagaaagcactccatggaagatggttcgcagggaagatgatcacagcaacttttatgaccccacaacagtatgaaatgaagttcccgagctagtgaacagatgcatgattaatatggacgtagttgcttgggctcggtgggtgctggcatttctatattttagcgttttgagcttgtgtcaacttattactggaggtaattataaaaaaaactagtggaggaaaatttagtggaagctagtgtatcgggaaatggctaacgaaaaatggtgaaagaaagagtttccttgccctgtgggttagtgctcgaattgaaactgtactgtgtaatggagtttctccctgaagtgctagtactaatacctaaaatgatggaagaaagagttgacttgcgttgcgcttgttgatttgattatactcgtccgtaccctttgcattattgtttggagatgcttgtcacagtttttaagtgatgtacattaattgtgtgtttggttgag

SEQ ID NO: 84892 - DNA, 2511 bp, Zea Mays
ttttttttacaacttctccctctcagtttactgttgaaaaggcaaacaaaatcacttagccgcgctgcctctgtgtctgtcttttcgtttaattagggtttccggatctgctctgcgtcgccgccgaccaacctccaccgcgcgacgccatggacttcgacgagtacgagtatctggagaagacggtggaagcgttcgcagcgccggccaacggttcgtcgccgcccgggtcggggtacaaggacaaggagcgcagctcacgccgccgctcaacgggcggtgacgaagagcgcgacaacgtagaacgcagatcgaagcgttctcgccccgaggaaggccgcgaccgcgatagagagcggcacaggtaccgcgacggcgaccggcaccgcagcagtcgggagcggcgggaccgtgaccgtgacgtcaaggagaaagagcagggcagggagaacgacaaggacaggaggagccgcgaccgcgaacgggagaaggaggagagggagaaggataggcagcggaggagtcggagccggtccgagcggcgccgtgatgacgaagagcgtgatcgctaccgtgaacgcgatgtcagacgtaggaaagaggaagttgctgaacctgaagttgatccagaaagagatcagaggactgtgtttgcttaccagttatctttgaaggcagatgaaagagatgtatatgagttcttttctagggctggaaaggtccgggatgttcgcctgattatggatcgaaattcacgacgttctaaaggtgtcgggaatatttgtaatatggtgtacctgctgggatactcagcaacttattaagatggaaaacaagatcatattggtatattgaattctatgatgctatgtctgttccaatggcgatagctctttctggtcagttgcttcttggtcaacaagtgatggttaagccttcagaggctgaaaagaatttagttcagtcaaatgcttcaagtggagctgcttcaggtggagcaaggaagttgtatgttggaaatcttcactcaaacattaatgaagaccagttgcgacaggtctttgaaccatttggacaagtggagcttgttcagttgccattagatccgctcagtgggctatgcaaaggttttggttttgtgcagtttgcacgtcttgaagatgcaaaagcggcccagagtttgaatgggcaacttgagattgctggaagagtaatcaaggtttcagctgtgacagaccaagcaggcatgcaagttagtggagctacgggagatttggatgatgaagaagctggaggcttggcactgaatgccagttccagagctcttctaatgcagaaattggaccgcagcggcattacgaccaggattcaaccaccactacagcaacactgtttccatatatatctagcttatcaagttctagtatttagtgccagttgcattgattgcaaatttcaggatggcgaattgatgatgtttgaaagtggacataagagaggaatcttgttacaatgcccttaccattttgatgcagatttcaatgattggctccataagaaacttgagttaaattttgttatagtagatgtacccttttatgtgtagcttactcactggacacgccaaccttttgtgttcctgcagtttgactggtgggacgggcattgctggtttgactactccagtggcaataccaactgtatctgtccttggtgctgccccagctgcagcccctcttctgcaccctacagtgcctggtcttgcaattcccggggcaactcttccaattactaccccatctattgatttggctccacctagtcaatgcctattgctcaagaatatgtttgatccagctttggagacagatcctgatttcgatttggacatcagagatgatgttcaggaggaatgttccaagtttggtcaattaaaacatatttttgtagacaaaagtactgccggttttgtgtacctgcggtttgatagtataacagccgctatgagcgcacagaaagcactccatggaagatggttcgcagggaagatgatcacagcaacttttatgaccccacaacagtatgaaatgaagttcccgagctagtgaacagatgcatgattaatatggacgtagttgcttgggctcggtgggtgctggcatttctatattttagcgttttgagcttgtgtcaacttattactggaggtaattataaaaaaaactagtggaggaaaatttagtggaagctagtgtatcgggaaatggctaacgaaaaatggtgaaagaaagagtttccttgccctgtgggttagtgctcgaattgaaactgtactgtgtaatggagtttctccctgaagtgctagtactaatacctaaaatgatggaagaaagagttgacttgcgttgcgcttgttgatttgattatactcgtccgtaccctttgcattattgtttggagatgcttgtcacagtttttaagtgatgtacattaattgtgtgtttggttgag

SEQ ID NO: 84893 - DNA, 2774 bp, Zea Mays
ttttttttacaacttctccctctcagtttactgttgaaaaggcaaacaaaatcacttagccgcgctgcctctgtgtctgtcttttcgtttaattagggtttccggatctgctctgcgtcgccgccgaccaacctccaccgcgcgacgccatggacttcgacgagtacgagtatctggagaagacggtggaagcgttcgcagcgccggccaacggttcgtcgccgcccgggtcggggtacaaggacaaggagcgcagctcacgccgccgctcaacgggcggtgacgaagagcgcgacaacgtagaacgcagatcgaagcgttctcgccccgaggaaggccgcgaccgcgatagagagcggcacaggtaccgcgacggcgaccggcaccgcagcagtcgggagcggcgggaccgtgaccgtgacgtcaaggagaaagagcagggcagggagaacgacaaggacaggaggagccgcgaccgcgaacgggagaaggaggagagggagaaggataggcagcggaggagtcggagccggtccgagcggcgccgtgatgacgaagagcgtgatcgctaccgtgaacgcgatgtcagacgtaggaaagaggaagttgctgaacctgaagttgatccagaaagagatcagaggactgtgtttgcttaccagttatctttgaaggcagatgaaagagatgtatatgagttcttttctagggctggaaaggtccgggatgttcgcctgattatggatcgaaattcacgacgttctaaaggtgtcgggaatatttgtaatatggtgtacctgctgggatactcagcaacttattaagatggaaaacaagatcatattggtatattgaattctatgatgctatgtctgttccaatggcgatagctctttctggtcagttgcttcttggtcaacaagtgatggttaagccttcagaggctgaaaagaatttagttcagtcaaatgcttcaagtggagctgcttcaggtggagcaaggaagttgtatgttggaaatcttcactcaaacattaatgaagaccagttgcgacaggtctttgaaccatttggacaagtggagcttgttcagttgccattagatccgctcagtgggctatgcaaaggttttggttttgtgcagtttgcacgtcttgaagatgcaaaagcggcccagagtttgaatgggcaacttgagattgctggaagagtaatcaaggtttcagctgtgacagaccaagcaggcatgcaagttagtggagctacgggagatttggatgatgaagaagctggaggcttggcactgaatgccagttccagagctcttctaatgcagaaattggaccgcagcggcattacgaccaggtacctttttggggttgattgcataataataattctgacattttgataagtataggtctttaaaaaactatttagtatagcaccgatatttggagtatatttatttatttgttaattaattggtaacagagctgcacatttgattactgaggtgctgaatggactattcctccataatttgttttttttgtggcgctgcagagacttcatttcattttagaattccattatcttgcttgcttgtatgagtgccatcatttgtacccaaatctctcattattgacctctactatattatcgtcaggattcaaccaccactacagcaacactgtttccatatatatctagcttatcaaggatggcgaattgatgatgtttgaaagtggacataagagaggaatcttgttacaatgcccttaccattttgatgcagatttcaatgattggctccataagaaacttgagttaaattttgttatagtagatgtacccttttatgtgtagcttactcactggacacgccaaccttttgtgttcctgcagtttgactggtgggacgggcattgctggtttgactactccagtggcaataccaactgtatctgtccttggtgctgccccagctgcagcccctcttctgcaccctacagtgcctggtcttgcaattcccggggcaactcttccaattactaccccatctattgatttggctccacctagtcaatgcctattgctcaagaatatgtttgatccagctttggagacagatcctgatttcgatttggacatcagagatgatgttcaggaggaatgttccaagtttggtcaattaaaacatatttttgtagacaaaagtactgccggttttgtgtacctgcggtttgatagtataacagccgctatgagcgcacagaaagcactccatggaagatggttcgcagggaagatgatcacagcaacttttatgaccccacaacagtatgaaatgaagttcccgagctagtgaacagatgcatgattaatatggacgtagttgcttgggctcggtgggtgctggcatttctatattttagcgttttgagcttgtgtcaacttattactggaggtaattataaaaaaaactagtggaggaaaatttagtggaagctagtgtatcgggaaatggctaacgaaaaatggtgaaagaaagagtttccttgccctgtgggttagtgctcgaattgaaactgtactgtgtaatggagtttctccctgaagtgctagtactaatacctaaaatgatggaagaaagagttgacttgcgttgcgcttgttgatttgattatactcgtccgtaccctttgcattattgtttggagatgcttgtcacagtttttaagtgatgtacattaattgtgtgtttggttgag

SEQ ID NO: 84894 - DNA, 2466 bp, Zea Mays
ttttttttacaacttctccctctcagtttactgttgaaaaggcaaacaaaatcacttagccgcgctgcctctgtgtctgtcttttcgtttaattagggtttccggatctgctctgcgtcgccgccgaccaacctccaccgcgcgacgccatggacttcgacgagtacgagtatctggagaagacggtggaagcgttcgcagcgccggccaacggttcgtcgccgcccgggtcggggtacaaggacaaggagcgcagctcacgccgccgctcaacgggcggtgacgaagagcgcgacaacgtagaacgcagatcgaagcgttctcgccccgaggaaggccgcgaccgcgatagagagcggcacaggtaccgcgacggcgaccggcaccgcagcagtcgggagcggcgggaccgtgaccgtgacgtcaaggagaaagagcagggcagggagaacgacaaggacaggaggagccgcgaccgcgaacgggagaaggaggagagggagaaggataggcagcggaggagtcggagccggtccgagcggcgccgtgatgacgaagagcgtgatcgctaccgtgaacgcgatgtcagacgtaggaaagaggaagttgctgaacctgaagttgatccagaaagagatcagaggactgtgtttgcttaccagttatctttgaaggcagatgaaagagatgtatatgagttcttttctagggctggaaaggtccgggatgttcgcctgattatggatcgaaattcacgacgttctaaaggtgtcgggaatatttgtaatatggtgtacctgctgggatactcagcaacttattaagatggaaaacaagatcatattggtatattgaattctatgatgctatgtctgttccaatggcgatagctctttctggtcagttgcttcttggtcaacaagtgatggttaagccttcagaggctgaaaagaatttagttcagtcaaatgcttcaagtggagctgcttcaggtggagcaaggaagttgtatgttggaaatcttcactcaaacattaatgaagaccagttgcgacaggtctttgaaccatttggacaagtggagcttgttcagttgccattagatccgctcagtgggctatgcaaaggttttggttttgtgcagtttgcacgtcttgaagatgcaaaagcggcccagagtttgaatgggcaacttgagattgctggaagagtaatcaaggtttcagctgtgacagaccaagcaggcatgcaagttagtggagctacgggagatttggatgatgaagaagctggaggcttggcactgaatgccagttccagagctcttctaatgcagaaattggaccgcagcggcattacgaccaggattcaaccaccactacagcaacactgtttccatatatatctagcttatcaaggatggcgaattgatgatgtttgaaagtggacataagagaggaatcttgttacaatgcccttaccattttgatgcagatttcaatgattggctccataagaaacttgagttaaattttgttatagtagatgtacccttttatgtgtagcttactcactggacacgccaaccttttgtgttcctgcagtttgactggtgggacgggcattgctggtttgactactccagtggcaataccaactgtatctgtccttggtgctgccccagctgcagcccctcttctgcaccctacagtgcctggtcttgcaattcccggggcaactcttccaattactaccccatctattgatttggctccacctagtcaatgcctattgctcaagaatatgtttgatccagctttggagatcctgatttcgatttggacatcagagatgatgttcaggaggaatgttccaagtttggtcaattaaaacatatttttgtagacaaaagtactgccggttttgtgtacctgcggtttgatagtataacagccgctatgagcgcacagaaagcactccatggaagatggttcgcagggaagatgatcacagcaacttttatgaccccacaacagtatgaaatgaagttcccgagctagtgaacagatgcatgattaatatggacgtagttgcttgggctcggtgggtgctggcatttctatattttagcgttttgagcttgtgtcaacttattactggaggtaattataaaaaaaactagtggaggaaaatttagtggaagctagtgtatcgggaaatggctaacgaaaaatggtgaaagaaagagtttccttgccctgtgggttagtgctcgaattgaaactgtactgtgtaatggagtttctccctgaagtgctagtactaatacctaaaatgatggaagaaagagttgacttgcgttgcgcttgttgatttgattatactcgtccgtaccctttgcattattgtttggagatgcttgtcacagtttttaagtgatgtacattaattgtgtgtttggttgag

SEQ ID NO: 84895 - DNA, 2566 bp, Zea Mays
ttttttttacaacttctccctctcagtttactgttgaaaaggcaaacaaaatcacttagccgcgctgcctctgtgtctgtcttttcgtttaattagggtttccggatctgctctgcgtcgccgccgaccaacctccaccgcgcgacgccatggacttcgacgagtacgagtatctggagaagacggtggaagcgttcgcagcgccggccaacggttcgtcgccgcccgggtcggggtacaaggacaaggagcgcagctcacgccgccgctcaacgggcggtgacgaagagcgcgacaacgtagaacgcagatcgaagcgttctcgccccgaggaaggccgcgaccgcgatagagagcggcacaggtaccgcgacggcgaccggcaccgcagcagtcgggagcggcgggaccgtgaccgtgacgtcaaggagaaagagcagggcagggagaacgacaaggacaggaggagccgcgaccgcgaacgggagaaggaggagagggagaaggataggcagcggaggagtcggagccggtccgagcggcgccgtgatgacgaagagcgtgatcgctaccgtgaacgcgatgtcagacgtaggaaagaggaagttgctgaacctgaagttgatccagaaagagatcagaggactgtgtttgcttaccagttatctttgaaggcagatgaaagagatgtatatgagttcttttctagggctggaaaggtccgggatgttcgcctgattatggatcgaaattcacgacgttctaaaggtgtcgggaatatttgtaatatggtgtacctgctgggatactcagcaacttattaagatggaaaacaagatcatattggtatattgaattctatgatgctatgtctgttccaatggcgatagctctttctggtcagttgcttcttggtcaacaagtgatggttaagccttcagaggctgaaaagaatttagttcagtcaaatgcttcaagtggagctgcttcaggtggagcaaggaagttgtatgttggaaatcttcactcaaacattaatgaagaccagttgcgacaggtctttgaaccatttggacaagtggagcttgttcagttgccattagatccgctcagtgggctatgcaaaggttttggttttgtgcagatgcaaaagcggcccagagtttgaatgggcaacttgagattgctggaagagtaatcaaggtttcagctgtgacagaccaagcaggcatgcaagttagtggagctacgggagatttggatgatgaagaagctggaggcttggcactgaatgccagttccagagctcttctaatgcagaaattggaccgcagcggcattacgaccaggattcaaccaccactacagcaacactgtttccatatatatctagcttatcaaggtcgttctccatggacctcctccagttctttggtgtaaagtggtttggctgaaatattttgtttactgcagttctagtatttagtgccagttgcattgattgcaaatttcaggatggcgaattgatgatgtttgaaagtggacataagagaggaatcttgttacaatgcccttaccattttgatgcagatttcaatgattggctccataagaaacttgagttaaattttgttatagtagatgtacccttttatgtgtagcttactcactggacacgccaaccttttgtgttcctgcagtttgactggtgggacgggcattgctggtttgactactccagtggcaataccaactgtatctgtccttggtgctgccccagctgcagcccctcttctgcaccctacagtgcctggtcttgcaattcccggggcaactcttccaattactaccccatctattgatttggctccacctagtcaatgcctattgctcaagaatatgtttgatccagctttggagacagatcctgatttcgatttggacatcagagatgatgttcaggaggaatgttccaagtttggtcaattaaaacatatttttgtagacaaaagtactgccggttttgtgtacctgcggtttgatagtataacagccgctatgagcgcacagaaagcactccatggaagatggttcgcagggaagatgatcacagcaacttttatgaccccacaacagtatgaaatgaagttcccgagctagtgaacagatgcatgattaatatggacgtagttgcttgggctcggtgggtgctggcatttctatattttagcgttttgagcttgtgtcaacttattactggaggtaattataaaaaaaactagtggaggaaaatttagtggaagctagtgtatcgggaaatggctaacgaaaaatggtgaaagaaagagtttccttgccctgtgggttagtgctcgaattgaaactgtactgtgtaatggagtttctccctgaagtgctagtactaatacctaaaatgatggaagaaagagttgacttgcgttgcgcttgttgatttgattatactcgtccgtaccctttgcattattgtttggagatgcttgtcacagtttttaagtgatgtacattaattgtgtgtttggttgag

SEQ ID NO: 84896 - DNA, 2284 bp, Zea Mays
ttttttttacaacttctccctctcagtttactgttgaaaaggcaaacaaaatcacttagccgcgctgcctctgtgtctgtcttttcgtttaattagggtttccggatctgctctgcgtcgccgccgaccaacctccaccgcgcgacgccatggacttcgacgagtacgagtatctggagaagacggtggaagcgttcgcagcgccggccaacggttcgtcgccgcccgggtcggggtacaaggacaaggagcgcagctcacgccgccgctcaacgggcggtgacgaagagcgcgacaacgtagaacgcagatcgaagcgttctcgccccgaggaaggccgcgaccgcgatagagagcggcacaggtaccgcgacggcgaccggcaccgcagcagtcgggagcggcgggaccgtgaccgtgacgtcaaggagaaagagcagggcagggagaacgacaaggacaggaggagccgcgaccgcgaacgggagaaggaggagagggagaaggataggcagcggaggagtcggagccggtccgagcggcgccgtgatgacgaagagcgtgatcgctaccgtgaacgcgatgtcagacgtaggaaagaggaagttgctgaacctgaagttgatccagaaagagatcagaggactgtgtttgcttaccagttatctttgaaggcagatgaaagagatgtatatgagttcttttctagggctggaaaggtccgggatgttcgcctgattatggatcgaaattcacgacgttctaaaggtgtcgggaatatttgtaatatggtgtacctgctgggatactcagcaacttattaagatggaaaacaagatcatattggtatattgaattctatgatgctatgtctgttccaatggcgatagctctttctggtcagttgcttcttggtcaacaagtgatggttaagccttcagaggctgaaaagaatttagttcagtcaaatgcttcaagtggagctgcttcaggtggagcaaggaagttgtatgttggaaatcttcactcaaacattaatgaagaccagttgcgacaggtctttgaaccatttggacaagtggagcttgttcagttgccattagatccgctcagtgggctatgcaaaggttttggttttgtgcagtttgcacgtcttgaagatgcaaaagcggcccagagtttgaatgggcaacttgagattgctggaagagtaatcaaggtttcagctgtgacagaccaagcaggcatgcaagttagtggagctacgggagatttggatgatgaagaagctggaggcttggcactgaatgccagttccagagctcttctaatgcagaaattggaccgcagcggcattacgaccaggattcaaccaccactacagcaacactgtttccatatatatctagcttatcaagtttgactggtgggacgggcattgctggtttgactactccagtggcaataccaactgtatctgtccttggtgctgccccagctgcagcccctcttctgcaccctacagtgcctggtcttgcaattcccggggcaactcttccaattactaccccatctattgatttggctccacctagtcaatgcctattgctcaagaatatgtttgatccagctttggagacagatcctgatttcgatttggacatcagagatgatgttcaggaggaatgttccaagtttggtcaattaaaacatatttttgtagacaaaagtactgccggttttgtgtacctgcggtttgatagtataacagccgctatgagcgcacagaaagcactccatggaagatggttcgcagggaagatgatcacagcaacttttatgaccccacaacagtatgaaatgaagttcccgagctagtgaacagatgcatgattaatatggacgtagttgcttgggctcggtgggtgctggcatttctatattttagcgttttgagcttgtgtcaacttattactggaggtaattataaaaaaaactagtggaggaaaatttagtggaagctagtgtatcgggaaatggctaacgaaaaatggtgaaagaaagagtttccttgccctgtgggttagtgctcgaattgaaactgtactgtgtaatggagtttctccctgaagtgctagtactaatacctaaaatgatggaagaaagagttgacttgcgttgcgcttgttgatttgattatactcgtccgtaccctttgcattattgtttggagatgcttgtcacagtttttaagtgatgtacattaattgtgtgtttggttgag

SEQ ID NO: 84897 - DNA, 2544 bp, Zea Mays
aatttaccaaaggatttctattttaccaagggtttccggatctgctctgcgtcgccgccgaccaacctccaccgcgcgacgccatggacttcgacgagtacgagtatctggagaagacggtggaagcgttcgcagcgccggccaacggttcgtcgccgcccgggtcggggtacaaggacaaggagcgcagctcacgccgccgctcaacgggcggtgacgaagagcgcgacaacgtagaacgcagatcgaagcgttctcgccccgaggaaggccgcgaccgcgatagagagcggcacaggtaccgcgacggcgaccggcaccgcagcagtcgggagcggcgggaccgtgaccgtgacgtcaaggagaaagagcagggcagggagaacgacaaggacaggaggagccgcgaccgcgaacgggagaaggaggagagggagaaggataggcagcggaggagtcggagccggtccgagcggcgccgtgatgacgaagagcgtgatcgctaccgtgaacgcgatgtcagacgtaggaaagaggaagttgctgaacctgaagttgatccagaaagagatcagaggactgtgtttgcttaccagttatctttgaaggcagatgaaagagatgtatatgagttcttttctagggctggaaaggtccgggatgttcgcctgattatggatcgaaattcacgacgttctaaaggtgtcgggtatattgaattctatgatgctatgtctgttccaatggcgatagctctttctggtggagcaaggaagttgtatgttggaaatcttcactcaaacattaatgaagaccagttgcgacaggtctttgaaccatttggacaagtggagcttgttcagttgccattagatccgctcagtgggctatgcaaaggttttggttttgtgcagtttgcacgtcttgaagatgcaaaagcggcccagagtttgaatgggcaacttgagattgctggaagagtaatcaaggtttcagctgtgacagaccaagcaggcatgcaagttagtggagctacgggagatttggatgatgaagaagctggaggcttggcactgaatgccagttccagagctcttctaatgcagaaattggaccgcagcggcattacgaccaggtacctttttggggttgattgcataataataattctgacattttgataagtataggtctttaaaaaactatttagtatagcaccgatatttggagtatatttatttatttgttaattaattggtaacagagctgcacatttgattactgaggtgctgaatggactattcctccataatttgttttttttgtggcgctgcagagacttcatttcattttagaattccattatcttgcttgcttgtatgagtgccatcatttgtacccaaatctctcattattgacctctactatattatcgtcaggattcaaccaccactacagcaacactgtttccatatatatctagcttatcaaggatggcgaattgatgatgtttgaaagtggacataagagaggaatcttgttacaatgcccttaccattttgatgcagatttcaatgattggctccataagaaacttgagttaaattttgttatagtagatgtacccttttatgtgtagcttactcactggacacgccaaccttttgtgttcctgcagtttgactggtgggacgggcattgctggtttgactactccagtggcaataccaactgtatctgtccttggtgctgccccagctgcagcccctcttctgcaccctacagtgcctggtcttgcaattcccggggcaactcttccaattactaccccatctattgatttggctccacctagtcaatgcctattgctcaagaatatgtttgatccagctttggagacagatcctgatttcgatttggacatcagagatgatgttcaggaggaatgttccaagtttggtcaattaaaacatatttttgtagacaaaagtactgccggttttgtgtacctgcggtttgatagtataacagccgctatgagcgcacagaaagcactccatggaagatggttcgcagggaagatgatcacagcaacttttatgaccccacaacagtatgaaatgaagttcccgagctagtgaacagatgcatgattaatatggacgtagttgcttgggctcggtgggtgctggcatttctatattttagcgttttgagcttgtgtcaacttattactggaggtaattataaaaaaaactagtggaggaaaatttagtggaagctagtgtatcgggaaatggctaacgaaaaatggtgaaagaaagagtttccttgccctgtgggttagtgctcgaattgaaactgtactgtgtaatggagtttctccctgaagtgctagtactaatacctaaaatgatggaagaaagagttgacttgcgttgcgcttgttgatttgattatactcgtccgtaccctttgcattattgtttggagatgcttgtcacagtttttaagtgatgtacattaattgtgtgtttggttgag

SEQ ID NO: 84898 - DNA, 2064 bp, Zea Mays
aagaaatacagttcaagagctagtttggaaaccccaatttaccaaaggatttctattttaccaagggtttccggatctgctctgcgtcgccgccgaccaacctccaccgcgcgacgccatggacttcgacgagtacgagtatctggagaagacggtggaagcgttcgcagcgccggccaacggttcgtcgccgcccgggtcggggtacaaggacaaggagcgcagctcacgccgccgctcaacgggcggtgacgaagagcgcgacaacgtagaacgcagatcgaagcgttctcgccccgaggaaggccgcgaccgcgatagagagcggcacaggtaccgcgacggcgaccggcaccgcagcagtcgggagcggcgggaccgtgaccgtgacgtcaaggagaaagagcagggcagggagaacgacaaggacaggaggagccgcgaccgcgaacgggagaaggaggagagggagaaggataggcagcggaggagtcggagccggtccgagcggcgccgtgatgacgaagagcgtgatcgctaccgtgaacgcgatgtcagacgtaggaaagaggaagttgctgaacctgaagttgatccagaaagagatcagaggactgtgtttgcttaccagttatctttgaaggcagatgaaagagatgtatatgagttcttttctagggctggaaaggtccgggatgttcgcctgattatggatcgaaattcacgacgttctaaaggtgtcgggtatattgaattctatgatgctatgtctgttccaatggcgatagctctttctgtcaaatgcttcaagtggagctgcttcaggtggagcaaggaagttgtatgttggaaatcttcactcaaacattaatgaagaccagttgcgacaggtctttgaaccatttggacaagtggagcttgttcagttgccattagatccgctcagtgggctatgcaaaggttttggttttgtgcagtttgcacgtcttgaagatgcaaaagcggcccagagtttgaatgggcaacttgagattgctggaagagtaatcaaggtttcagctgtgacagaccaagcaggcatgcaagttagtggagctacgggagatttggatgatgaagaagctggaggcttggcactgaatgccagttccagagctcttctaatgcagaaattggaccgcagcggcattacgaccagtttgactggtgggacgggcattgctggtttgactactccagtggcaataccaactgtatctgtccttggtgctgccccagctgcagcccctcttctgcaccctacagtgcctggtcttgcaattcccggggcaactcttccaattactaccccatctattgatttggctccacctagtcaatgcctattgctcaagaatatgtttgatccagctttggagacagatcctgatttcgatttggacatcagagatgatgttcaggaggaatgttccaagtttggtcaattaaaacatatttttgtagacaaaagtactgccggttttgtgtacctgcggtttgatagtataacagccgctatgagcgcacagaaagcactccatggaagatggttcgcagggaagatgatcacagcaacttttatgaccccacaacagtatgaaatgaagttcccgagctagtgaacagatgcatgattaatatggacgtagttgcttgggctcggtgggtgctggcatttctatattttagcgttttgagcttgtgtcaacttattactggaggtaattataaaaaaaactagtggaggaaaatttagtggaagctagtgtatcgggaaatggctaacgaaaaatggtgaaagaaagagtttccttgccctgtgggttagtgctcgaattgaaactgtactgtgtaatggagtttctccctgaagtgctagtactaatacctaaaatgatggaagaaagagttgacttgcgttgcgcttgttgatttgattatactcgtccgtaccctttgcattattgtttggagatgcttgtcacagtttttaagtgatgtacattaattgtgtgtttggttgag

SEQ ID NO: 84899 - DNA, 1426 bp, Zea Mays
gacgaggaggggaatccgggaatccaaagcagacggccagacgccgtgccgagccgagcagtccaactcccgggcagaggcagaggcagaggcggagggcggggcgagagagccgtgcggctgtccaactccccttccctatccggtagcagctgctcctatatgacccccgcaccccagcaaaaaccttcccctttttccccttcacagccccgtactactatccccgctaccgctagccgccgcgctgctcatctggtggcggctcgcctccctccccccatccgccgccgccggctcctcctctagctccctccttaccccgagctttaagctcgtgctacctgcctacctatccgtagggagagagagagagaggggagaaggttcggtcggtcggtcgggggctctcggatctcgccgctgcctccccgtttcttcgttgggatctcgctcgcttcgcgccatggccgccgtcgcgacgccaccggcccccgcgcccgccgcgccggcaccggcaccggcaccggctgctgctccggctcccgtcaccgtcgcccctgccgcggaccaaaccacggatctgctgcagaagttgtcgctggattcgcagcccaaggcggcgggtgcgacagagcctgctgctgctgccgccaaggagggtgctgtgacaagccagccgctgagtgtggccatcccgccggagcggtctatcacgccggtgcttcaggactttatggatcccaacctgttctatctaccagcgtattactatggaggctacgacagttccatgagcgagtgggatgattatccaagatatctaaattcagatggagtggagattgccccagcagtgtatggagatatttatggatatgggtatgctccttacggggcatactctccggccacttccccagttccaacggttgatggtcagatgtttggcgcacagcattaccagtatccaaccacgtattttcagcctcctacaccaattccttctaccactcaaagcaacctccagtcttccaacaatcctgaaaagccagcagctaaagcagatcctgccaaggcaaccgctaatggtgttccaaatggtactggtcacactcacagttacagtggaactgtaccaagccaacaaagttcagcactgacgcctgatggaacttatagggcgcccttgctaggtggagttccttctgctggttacctagacacgacatattatgggtatgacagcacaggggcacaatttgcatggtatgatggctctgcttatgcaaatggacagcaaagaacaaccacaactaatcgttttccatcctcgtcattcagtggtaatggttcatctgcaatatatcagaacaagagctccaccacgcagcagatgtttaaactcggctggggagggaaagac

SEQ ID NO: 84900 - DNA, 3602 bp, Zea Mays
ctccccttaaacccctgcaccattcatttctccctgccccgctcccgacgccgaacccgcggactccgcttgcggactccgcttcctcccctttatcgcgtcgccggcgcccggccccgctattgcttcgctgtggagtccggtaaagtttatatttgtctcgatcaatgcggcattgcagttagcccctgccgttttcttctcccgtagtcccgtcccaccggcccccctccgccgcctccacacgccaggtgtagcctcgtcgatcccttcgccggcgaagagcccctactagttgctagcgagaagccagaagtagaattcatggacttccagaacggtgacacttttcaggattattcatctgaagatacccctgtgctcgtctcagctcctttccctttcgagcatggaaaaccaaaatctgtacttgttggagaaacatcggctgatactattcagattgagaatacctctcctgaacctgtaaatttgtggagtgtaagaattttctcctcaaatccagaagacagctacgtgttatcgatgatgagacctccatcaaatggtgctagcgaagaggaaaagcaggcttttcttgctttgacatcggtggaagaccgtacacttcggcctggacaaaccctcacagtttggctgtcttgtacgccaaaagatattggtttgcatacatcaatcgtgcatgttgatatcggcaatgagaagattgagcgtgtggcttttcttttggcagatgacaatgtctccaagtcattattttctgataagccttattctaggagacgtgttcaagttaagaaatttgagccttcaccatttgtgccaggttgccgtccaactcagcagcatgttcaaggatacaaacataagcttcctcagtatgcaatacctgcacatatccgtgagctcattgaaagtaaacagacacctgatgtcctatatgatgagttgagcatgataaactatgcagaatatttcagcactcttatagtcatggaagaactcaatttggaggaggaaatgagagcatatgacatggagggtgtcttaatgagaaggaggggtatgcactttttgtctcttgaagtccctggtttggcagaaagaaggccatcactagtccaaggagacttcatattcgctagatatgctgggaatgattctcagccttaccaaggtttcattcacaaggttgaagctgatgagatatttttaaaatttgatcatcagttccacatgaatcacagagaaagaaaccagtaccatgttagcttcacatataacagagtgaacatgagaaggctttacaaatcaattgatgatgcaaaatatttgggacctggcatcttgtttccccacaaatcaccttatagagttttgaaaaggttgccatttaagcctctcgatccatatataaatactgagcaagctgatgctgttgcgagcatacttgcctgcagaggagttccaccatatgtgatatatggacctccaggaactggcaagaccatgaccattgtagaggctgttttgcagctttatacgggcaagaagagggcaaatattctcatttgtgctgcttccaatactgcagctgatcatgtattggaaaagctccttcaaggcagccatccgatccgtccaagagatatctttaggctaaatgctccaagccgtcaatacgaggatgtcaataccgattttatcaagttttgcttcttccaagatctggtgttcaagtgccctccgttacaagcactggtgcagtacaagataattatatcgacctatacaagttcatatctgctgcaggctgagggcattcgccaagggcatttcacacacattttcttggatgaggctggtcaagcctctgaaccagaggcgatggttcctttgtcggggttgtgtggaagagacactgtggttgtgttagcaggagatccaaagcaattagggccggtggtttattgcagggaagcggagagatgtggtctggggacatcatatctggaaaggctgctaactggcttcgagcagtaccaaacagggaatgctaactatgtgacaaagctggtgaggaattatcggtgccatcctgcaatcctagagctaccatcagagcttttctacgagggtgaattgattgcctgtaaagaaggagaatcatctgcttacgactgcatcggccttcctaacaagtcgttccctgttctcttcgtcgggattcaaggatgcgacgagagggaaggcaacaatccatcatggttcaacaggattgaagttagtaaagtagtatctatcatcaggaacctgacaaggggtgaggatgttcatgaatctgatataggagtgatcactccatatcgtcagcaagttgccaagataaagaaagccctggaggcatttgaaatgcccagcttcaaagtcggaagcgtcgagcaattccagggccaagagagggaggtgataatcatctccacagtcaggtcgaccgtaaagcacaacgagtttgacaaattttttaacctgggattcttgagcaaccatagaaggttcaacgttgccatcactcgcgcaaaatcgctgctcgtcatcatcggaaacccttacattatcaccaaggaccgtcactgggataggctcctgcggtactgcgctgacaacggctcctatcaaggatgcccccttccaccaccagagtctccttattcagacgacgccagattcttttccaagtacgacgaagaccaaggtggaccttctgggcaggactacagccaagagcctgcctactgcaactacaaccaagagcctgcctactgcaactacgacgaccaagagccttctgacttcggttcggggcatgacactggtgttgctcaacctgaacctgcttcggagaatcaagagtcatggtccgaggagttgcctgaagacgagagccagccattcagcaacccccaagcagatgttgaggagacgccgaagcaggacggcgaggaaggggctgcagctgcacagggagacgcgcaggccgaccagtcgttgaccaacgacgacagtcagctccaggacgcaggcgcggggaagtacaccttccctcccggttggtgcgacgtttcgagcatcccggcaacgggctggggcgactgatcagacccgcaaccgcaaccgcccctggcaggggggtacgttgggagaataactgaggctgatggcctttcaccctccttccatcaagcctccactcagctcactgctgaacagttgttgtagcgagtgagctgcgtccgtgtgtttaggccacgtgtgccaggtgctggcaacgtgcaatatggtgggttagctcgcgtgccattgagcgtgtgctaatggtttttaaatgcttaggcctttttcggttacaagggataaaattctaccatggatttaatccgaccagaattaagtaaattcatacctcacatccaatcacatggtgggattaaatccattaattaatccatgtatatctcaaagatagttattcttttaatccatggattttaatataaacttgtgcaatattgtcatggatt

SEQ ID NO: 84901 - DNA, 3718 bp, Zea Mays
ggaagaacacacgcggcggtttcatgatcccttgattcgcttcgtttacctccatcagagccatcatctactccagacagtgctcctccccttaaacccctgcaccattcatttctccctgccccgctcccgacgccgaacccgcggactccgcttgcggactccgcttcctcccctttatcgcgtcgccggcgcccggccccgctattgcttcgctgtggagtccggtaaagtttatatttgtctcgatcaatgcggcattgcagttagcccctgccgttttcttctcccgtagtcccgtcccaccggcccccctccgccgcctccacacgccaggtgtagcctcgtcgatcccttcgccggcgaagagcccctactaggattcaagatgggtcatcgtaggaattattctgacgacgaattttcagttgctagcgagaagccagaagtagaattcatggacttccagaacggtgacacttttcaggattattcatctgaagatacccctgtgctcgtctcagctcctttccctttcgagcatggaaaaccaaaatctgtacttgttggagaaacatcggctgatactattcagattgagaatacctctcctgaacctgtaaatttgtggagtgtaagaattttctcctcaaatccagaagacagctacgtgttatcgatgatgagacctccatcaaatggtgctagcgaagaggaaaagcaggcttttcttgctttgacatcggtggaagaccgtacacttcggcctggacaaaccctcacagtttggctgtcttgtacgccaaaagatattggtttgcatacatcaatcgtgcatgttgatatcggcaatgagaagattgagcgtgtggcttttcttttggcagatgacaatgtctccaagtcattattttctgataagccttattctaggagacgtgttcaagttaagaaatttgagccttcaccatttgtgccaggttgccgtccaactcagcagcatgttcaaggatacaaacataagcttcctcagtatgcaatacctgcacatatccgtgagctcattgaaagtaaacagacacctgatgtcctatatgatgagttgagcatgataaactatgcagaatatttcagcactcttatagtcatggaagaactcaatttggaggaggaaatgagagcatatgacatggagggtgtcttaatgagaaggaggggtatgcactttttgtctcttgaagtccctggtttggcagaaagaaggccatcactagtccaaggagacttcatattcgctagatatgctgggaatgattctcagccttaccaaggtttcattcacaaggttgaagctgatgagatatttttaaaatttgatcatcagttccacatgaatcacagagaaagaaaccagtaccatgttagcttcacatataacagagtgaacatgagaaggctttacaaatcaattgatgatgcaaaatatttgggacctggcatcttgtttccccacaaatcaccttatagagttttgaaaaggttgccatttaagcctctcgatccatatataaatactgagcaagctgatgctgttgcgagcatacttgcctgcagaggagttccaccatatgtgatatatggacctccaggaactggcaagaccatgaccattgtagaggctgttttgcagctttatacgggcaagaagagggcaaatattctcatttgtgctgcttccaatactgcagctgatcatgtattggaaaagctccttcaaggcagccatccgatccgtccaagagatatctttaggctaaatgctccaagccgtcaatacgaggatgtcaataccgattttatcaagttttgcttcttccaagatctggtgttcaagtgccctccgttacaagcactggtgcagtacaagataattatatcgacctatacaagttcatatctgctgcaggctgagggcattcgccaagggcatttcacacacattttcttggatgaggctggtcaagcctctgaaccagaggcgatggttcctttgtcggggttgtgtggaagagacactgtggttgtgttagcaggagatccaaagcaattagggccggtggtttattgcagggaagcggagagatgtggtctggggacatcatatctggaaaggctgctaactggcttcgagcagtaccaaacagggaatgctaactatgtgacaaagctggtgaggaattatcggtgccatcctgcaatcctagagctaccatcagagcttttctacgagggtgaattgattgcctgtaaagaaggagaatcatctgcttacgactgcatcggccttcctaacaagtcgttccctgttctcttcgtcgggattcaaggatgcgacgagagggaaggcaacaatccatcatggttcaacaggattgaagttagtaaagtagtatctatcatcaggaacctgacaaggggtgaggatgttcatgaatctgatataggagtgatcactccatatcgtcagcaagttgccaagataaagaaagccctggaggcatttgaaatgcccagcttcaaagtcggaagcgtcgagcaattccagggccaagagagggaggtgataatcatctccacagtcaggtcgaccgtaaagcacaacgagtttgacaaattttttaacctgggattcttgagcaaccatagaaggttcaacgttgccatcactcgcgcaaaatcgctgctcgtcatcatcggaaacccttacattatcaccaaggctcctgcggtactgcgctgacaacggctcctatcaaggatgcccccttccaccaccagagtctccttattcagacgacgccagattcttttccaagtacgacgaagaccaaggtggaccttctgggcaggactacagccaagagcctgcctactgcaactacaaccaagagcctgcctactgcaactacgacgaccaagagccttctgacttcggttcggggcatgacactggtgttgctcaacctgaacctgcttcggagaatcaagagtcatggtccgaggagttgcctgaagacgagagccagccattcagcaacccccaagcagatgttgaggagacgccgaagcaggacggcgaggaaggggctgcagctgcacagggagacgcgcaggccgaccagtcgttgaccaacgacgacagtcagctccaggacgcaggcgcggggaagtacaccttccctcccggttggtgcgacgtttcgagcatcccggcaacgggctggggcgactgatcagacccgcaaccgcaaccgcccctggcaggggggtacgttgggagaataactgaggctgatggcctttcaccctccttccatcaagcctccactcagctcactgctgaacagttgttgtagcgagtgagctgcgtccgtgtgtttaggccacgtgtgccaggtgctggcaacgtgcaatatggtgggttagctcgcgtgccattgagcgtgtgctaatggtttttaaatgcttaggcctttttcggttacaagggataaaattctaccatggatttaatccgaccagaattaagtaaattcatacctcacatccaatcacatggtgggattaaatccattaattaatccatgtatatctcaaagatagttattcttttaatccatggattttaatataaacttgtgcaatattgtcatggatt

SEQ ID NO: 84902 - DNA, 2190 bp, Zea Mays
caggactcaaaaggcacgcggaacaacaagagtcctccaaaatccgtgtggcgactgtggatagcgatgcaagatccagcaggctggccggagagggagagaccagtctctcctcgagcccaagtacgaaagcgtatcaaaagaagaaaggaacaaggtgggggaaaaaaactaggggggccgtatcatatatctggtgccgaaaaacgcccttggaacggagaaaagcaaggtcgcggtgaagtgtgagcagcctctcctctagtggttctgctgggacgacaccaccagcactgcagtaccactactagttagtaagtacgctgctgcacacaacaatattcttttttctctccataatactacaaatactgcagtatcaatgtggctgtccctcctcttttccgctgatggagttgagatgttctgcactacttttccaccccgaatccggatggcacccgtaccgtagtgcttgtatgccttctttccctttcttctacttgtacctacatgctactacaggtgtactacgtattttgctccccccacttggttttgcaagcaagaccagcgtaaaagcagaggagactgtcagattcctctttcgctttattctcccgcccagcctcacacacacgtagttagtgttgggctactcacacatgacacaacttcgcctccctccaaatacccagagttttgaagcagggaggaaggaagacagagcagaagcagagcgctctccgtctccggtccagtatctccgctcgccctcctccctcctcctcctccttcgcttcaggttcaggagccagttagaacattggtgttagcgcgcgctctttcctccaagcagaatcaagattttgttcccatcctcaagtacttactcctcctctcccccactctccagccgtcctctctccttctccatcaaatcacaggctttgtttatagggaaaaaaaaacaaacaaacaaacagttgtctctgcgcccgcccgcccgccttggcttcttctacctacatcagctgtccatttcgcagcacgcagcagcagtctctacgctacggctgcatgagtgttagctagcagcaaggatgagagatggcagcaacaccaccaagaagagcaagctgtcgtggtccaagagcttggtgaggaagtggttcaacatcaggagcaaggcccacgacttccacgccgacgatgtggccgcgattggtaggacagttgcaggagggggcgatgacgagtggaggaggggcagcagcttcacccgtagggagccgagcacagtgaagaagagcaagacagagaggtcctcgaggaggagcaatgggcactcgaggcggggaaagattgaccttgatgccgccgaagccacagtgacattggactatagtaggatatttgttgctacatggaatgtgggcggccgttccccgccaaataacatgagcctcgaggactggctccacgctgcacctcctgctgacatctatgtcctcgggtttcaagaaattgttccactcaatgccggtaacgtccttgggacagaggacaatgttccagcgaagaggtgggtgtcactggtcaggaggacactgaacaatttgccaggtactagtggcaacgggagcttccggacaccatctccggctcctaaccctgtggtggagatcgacgatgattttgagggtttgtcatcgaagcagaacagtgcaagtttcttccatcgccggtctttccaggctgggcttagtcggagtttgaggatggagggtgacattcttgctcctcagccaaggctggaacgtcggtacagtgtctgtgaccgagcaatctatggccgtaggcctagcgactatgagaacaactaccgatggggtggatcgtcagatgatgagaataatactggagagtcaccgagcactgtgtattcaccagtgtcgtacggttacggcaatgcatcatctctggaagatggtcaaagacggcctggccaaactagatactgtctggtggcaagcaagcaaatggtagggttgtttctgatgatttgggctcggaaggacataagagatgacataagaaatctgaaagtttcttgtgttgggagaggactgatgggctaccttgggaataaggttagtcatagcgtgtctttttttttgtcgtttttcc

SEQ ID NO: 84903 - DNA, 1865 bp, Zea Mays
tccagattccggggcggcgctctctctcacactcagtcaggactcaaaaggcacgcggaacaacaagagtcctccaaaatccgtgtggcgactgtggatagcgatgcaagatccagcaggctggccggagagggagagaccagtctctcctcgagcccaagtacgaaagcgtatcaaaagaagaaaggaacaaggtgggggaaaaaaactaggggggccgtatcatatatctggtgccgaaaaacgcccttggaacggagaaaagcaaggtcgcggtgaagtgtgagcagcctctcctctagtggttctgctgggacgacaccaccagcactgcagtaccactactagttatatcaatgtggctgtccctcctcttttccgctgatggagttgagatgttctgcactacttttccaccccgaatccggatggcacccgtaccgtagtgcttagttttgaagcagggaggaaggaagacagagcagaagcagagcgctctccgtctccggtccagtatctccgctcgccctcctccctcctcctcctccttcgcttcaggttcaggagccagttagaacattggtgttagcgcgcgctctttcctccaagcagaatcaagattttgttcccatcctcaaggaaaaaaaaacaaacaaacaaacagttgtctctgcgcccgcccgcccgccttggcttcttctacctacatcagctgtccatttcgcagcacgcagcagcagtctctacgctacggctgcatgagtgttagctagcagcaaggatgagagatggcagcaacaccaccaagaagagcaagctgtcgtggtccaagagcttggtgaggaagtggttcaacatcaggagcaaggcccacgacttccacgccgacgatgtggccgcgattggtaggacagttgcaggagggggcgatgacgagtggaggaggggcagcagcttcacccgtagggagccgagcacagtgaagaagagcaagacagagaggtcctcgaggaggagcaatgggcactcgaggcggggaaagattgaccttgatgccgccgaagccacagtgacattggactataggatatttgttgctacatggaatgtgggcggccgttccccgccaaataacatgagcctcgaggactggctccacgctgcacctcctgctgacatctatgtcctcgggtttcaagaaattgttccactcaatgccggtaacgtccttgggacagaggacaatgttccagcgaagaggtgggtgtcactggtcaggaggacactgaacaatttgccaggtactagtggcaacgggagcttccggacaccatctccggctcctaaccctgtggtggagatcgacgatgattttgagggtttgtcatcgaagcagaacagtgcaagtttcttccatcgccggtctttccaggctgggcttagtcggagtttgaggatggagggtgacattcttgctcctcagccaaggctggaacgtcggtacagtgtctgtgaccgagcaatctatggccgtaggcctagcgactatgagaacaactaccgatggggtggatcgtcagatgatgagaataatactggagagtcaccgagcactgtgtattcaccagtgtcgtacggttacggcaatgcatcatctctggaagatggtcaaagacggcctggccaaactagatactgtctggtggcaagcaagcaaatggtagggttgtttctgatgatttgggctcggaaggacataagagatgacataagaaatctgaaagtttcttgtgttgggagaggactgatgggctaccttgggaataaggttagtcatagcgtgtctttttttttgtcgtttttcc

SEQ ID NO: 84904 - DNA, 3533 bp, Zea Mays
atggagatttctggaagggctgcggcggcggaggcggaggcgctgattgcgggcgggatgcgggacggggtgcggctgcggcagcggcagaacaatgagggagcacatgctactgataagtagcggcggctggtttcctcatctattctatacttctggaactgatcggcggtgatcgcgacggatttgaagaaatagactgcgggcttgactaattgacgaacgacttattgccacagagctaaggccgtttgcagcagtctacccaaagtttatccaaaagcactattctgcattgttatacactgtagactacactgttcgcagagtgaagtttgaatataactatgagatgggtaagctgctggagatagcctaaagatgtcagtataagtatcccagcataaggatgtcagtataagtatcccctgatgtgtcgataggtcaagtaggcgctgcagcctgcagtgagtccatggccaggatgaatagcatgggcaatagttggtctccttgccagactcctgatctaccaaatcctgtctctcaaatttgaagactatactccccaacaaatttgtgtttgatccaactgccctcatcttacagctttgtcatcaggagttcaagtgcagctgtacgttccttggaaggggacaaattagtgtgcggtgtgccatagaagcttgttatattagaaagtacgtttttttgcaggtacaatgtcaggagcctataattgccatatgtcttgtagatcttatggattttttttttgttcttcctgaagtgtcattcatgtccacggattctcaacagcttctctgccaggacatgcagaaaaaactgttcatatcaacagaaacccattacttacacagtcagatagtccgctcttctactgtcttgactgctgatgatgttgtgcttgtgcaagatactgtggatagcagctactcgtctccgatggacatggactggactgtctcaagcttcgaagcccacggaccctatgagcacagaacaggaaccacatgaccgaggctcgggttttctcttttaagctggagctgtggagcatggcagctgctgcacaagatggacggacggacggaccacacaagaatccaatccagccctcgcgtggctgtactgtactgtacgtgcgctgcgcagaaagcactgtacgccgagagaccaatggctgatctgctccaactcaggcctacttttatctaaggtgccgtacacccgtgggaatcatggataaactaagcggaaatgatggggctctgttggtaaccctggtcgtaatctcttggttccaggattatgacgctaattgttaactatgtgtggttcagacggactggtcgcttctgctaaggccgccgtcctgccgtctgagcagacgatcattgaaaatggatgccacgtgattggcacaaaggttctgctgtcctcttcctcaagggatagcgatgcaagatccagcaggctggccggagagggagagaccagtctctcctcgagcccaagtacgaaagcgtatcaaaagaagaaaggaacaaggtgggggaaaaaaactaggggggccgtatcatatatctggtgccgaaaaacgcccttggaacggagaaaagcaaggtcgcggtgaagtgtgagcagcctctcctctagtggttctgctgggacgacaccaccagcactgcagtaccactactagttatatcaatgtggctgtccctcctcttttccgctgatggagttgagatgttctgcactacttttccaccccgaatccggatggcacccgtaccgtagtgcttgtatgccttctttccctttcttctacttgtacctacatgctactacaggtgtactacgtattttgctccccccacttggttttgcaagcaagaccagcgtaaaagcagaggagactgtcagattcctctttcgctttattctcccgcccagcctcacacacacgtagttagtgttgggctactcacacatgacacaacttcgcctccctccaaatacccagagttttgaagcagggaggaaggaagacagagcagaagcagagcgctctccgtctccggtccagtatctccgctcgccctcctccctcctcctcctccttcgcttcaggttcaggagccagttagaacattggtgttagcgcgcgctctttcctccaagcagaatcaagattttgttcccatcctcaagtacttactcctcctctcccccactctccagccgtcctctctccttctccatcaaatcacaggctttgtttatagggaaaaaaaaacaaacaaacaaacagttgtctctgcgcccgcccgcccgccttggcttcttctacctacatcagctgtccatttcgcagcacgcagcagcagtctctacgctacggctgcatgagtgttagctagcagcaaggatgagagatggcagcaacaccaccaagaagagcaagctgtcgtggtccaagagcttggtgaggaagtggttcaacatcaggagcaaggcccacgacttccacgccgacgatgtggccgcgattggtaggacaggagggggcgatgacgagtggaggaggggcagcagcttcacccgtagggagccgagcacagtgaagaagagcaagacagagaggtcctcgaggaggagcaatgggcactcgaggcggggaaagattgaccttgatgccgccgaagccacagtgacattggactataggatatttgttgctacatggaatgtgggcggccgttccccgccaaataacatgagcctcgaggactggctccacgctgcacctcctgctgacatctatgtcctcgggtttcaagaaattgttccactcaatgccggtaacgtccttgggacagaggacaatgttccagcgaagaggtgggtgtcactggtcaggaggacactgaacaatttgccaggtactagtggcaacgggagcttccggacaccatctccggctcctaaccctgtggtggagatcgacgatgattttgagggtttgtcatcgaagcagaacagtgcaagtttcttccatcgccggtctttccaggctgggcttagtcggagtttgaggatggagggtgacattcttgctcctcagccaaggctggaacgtcggtacagtgtctgtgaccgagcaatctatggccgtaggcctagcgactatgagaacaactaccgatggggtggatcgtcagatgatgagaataatactggagagtcaccgagcactgtgtattcaccagtgtcgtacggttacggcaatgcatcatctctggaagatggtcaaagacggcctggccaaactagatactgtctggtggcaagcaagcaaatggtagggttgtttctgatgatttgggctcggaaggacataagagatgacataagaaatctgaaagtttcttgtgttgggagaggactgatgggctaccttgggaataaggttagtcatagcgtgtctttttttttgtcgtttttcc

SEQ ID NO: 84905 - DNA, 3203 bp, Zea Mays
atggagatttctggaagggctgcggcggcggaggcggaggcgctgattgcgggcgggatgcgggacggggtgcggctgcggcagcggcagaacaatgagggagcacatgctactgataagtagcggcggctggtttcctcatctattctatacttctggaactgatcggcggtgatcgcgacggatttgaagaaatagactgcgggcttgactaattgacgaacgacttattgccacagagctaaggccgtttgcagcagtctacccaaagtttatccaaaagcactattctgcattgttatacactgtagactacactgttcgcagagtgaagtttgaatataactatgagatgggtaagctgctggagatagcctaaagatgtcagtataagtatcccagcataaggatgtcagtataagtatcccctgatgtgtcgataggtcaagtaggcgctgcagcctgcagtgagtccatggccaggatgaatagcatgggcaatagttggtctccttgccagactcctgatctaccaaatcctgtctctcaaatttgaagactatactccccaacaaatttgtgtttgatccaactgccctcatcttacagctttgtcatcaggagttcaagtgcagctgtacgttccttggaaggggacaaattagtgtgcggtgtgccatagaagcttgttatattagaaagtacgtttttttgcaggtacaatgtcaggagcctataattgccatatgtcttgtagatcttatggattttttttttgttcttcctgaagtgtcattcatgtccacggattctcaacagcttctctgccaggacatgcagaaaaaactgttcatatcaacagaaacccattacttacacagtcagatagtccgctcttctactgtcttgactgctgatgatgttgtgcttgtgcaagatactgtggatagcagctactcgtctccgatggacatggactggactgtctcaagcttcgaagcccacggaccctatgagcacagaacaggaaccacatgaccgaggctcgggttttctcttttaagctggagctgtggagcatggcagctgctgcacaagatggacggacggacggaccacacaagaatccaatccagccctcgcgtggctgtactgtactgtacgtgcgctgcgcagaaagcactgtacgccgacggactggtcgcttctgctaaggccgccgtcctgccgtctgagcagacgatcattgaaaatggatgccacgtgattggcacaaaggttctgctgtcctcttcctcaagggatagcgatgcaagatccagcaggctggccggagagggagagaccagtctctcctcgagcccaagtacgaaagcgtatcaaaagaagaaaggaacaaggtgggggaaaaaaactaggggggccgtatcatatatctggtgccgaaaaacgcccttggaacggagaaaagcaaggtcgcggtgaagtgtgagcagcctctcctctagtggttctgctgggacgacaccaccagcactgcagtaccactactagttatatcaatgtggctgtccctcctcttttccgctgatggagttgagatgttctgcactacttttccaccccgaatccggatggcacccgtaccgtagtgcttgtatgccttctttccctttcttctacttgtacctacatgctactacaggtgtactacgtattttgctccccccacttggttttgcaagcaagaccagcgtaaaagcagaggagactgtcagattcctctttcgctttattctcccgcccagcctcacacacacgtagttagtgttgggctactcacacatgacacaacttcgcctccctccaaatacccagagttttgaagcagggaggaaggaagacagagcagaagcagagcgctctccgtctccggtccagtatctccgctcgccctcctccctcctcctcctccttcgcttcaggttcaggagccagttagaacattggtgttagcgcgcgctctttcctccaagcagaatcaagattttgttcccatcctcaacacgcagcagcagtctctacgctacggctgcatgagtgttagctagcagcaaggatgagagatggcagcaacaccaccaagaagagcaagctgtcgtggtccaagagcttggtgaggaagtggttcaacatcaggagcaaggcccacgacttccacgccgacgatgtggccgcgattggtaggacagttgcaggagggggcgatgacgagtggaggaggggcagcagcttcacccgtagggagccgagcacagtgaagaagagcaagacagagaggtcctcgaggaggagcaatgggcactcgaggcggggaaagattgaccttgatgccgccgaagccacagtgacattggactataggatatttgttgctacatggaatgtgggcggccgttccccgccaaataacatgagcctcgaggactggctccacgctgcacctcctgctgacatctatgtcctcgggtttcaagaaattgttccactcaatgccggtaacgtccttgggacagaggacaatgttccagcgaagaggtgggtgtcactggtcaggaggacactgaacaatttgccaggtactagtggcaacgggagcttccggacaccatctccggctcctaaccctgtggtggagatcgacgatgattttgagggtttgtcatcgaagcagaacagtgcaagtttcttccatcgccggtctttccaggctgggcttagtcggagtttgaggatggagggtgacattcttgctcctcagccaaggctggaacgtcggtacagtgtctgtgaccgagcaatctatggccgtaggcctagcgactatgagaacaactaccgatggggtggatcgtcagatgatgagaataatactggagagtcaccgagcactgtgtattcaccagtgtcgtacggttacggcaatgcatcatctctggaagatggtcaaagacggcctggccaaactagatactgtctggtggcaagcaagcaaatggtagggttgtttctgatgatttgggctcggaaggacataagagatgacataagaaatctgaaagtttcttgtgttgggagaggactgatgggctaccttgggaataaggttagtcatagcgtgtctttttttttgtcgtttttcc

SEQ ID NO: 84906 - DNA, 3619 bp, Zea Mays
atggagatttctggaagggctgcggcggcggaggcggaggcgctgattgcgggcgggatgcgggacggggtgcggctgcggcagcggcagaacaatgaggtatcgataggggcctacattcgaatcactggaaatcaacgacaattgttcagttacttgcccaaacaacgaacgacttattgccacagagctaaggatgacagtgtgagtatcccctgctgtgtcgataggtcaagtaggcgctgcagcctgcatgtcattcatgtccacggattctcaacagcttctctgccaggacatgcagaaaaactgttcatatcaacagaaaacccattatttactgctgatgatgttgtgcaagatactgtggatagcagttactcgtctccgacggacatggactggactgtctcaagcttcgaagcccacgaaccctatgactatgagcacagaacaggaaccacaggatcgagggaaccattcaaagctgtcctttgtgcacatctgggaatcaaatctccccactcttccacaaaggctcgggttttctcttttaagctggagctgtggagcatggcagctgctgcacaagatggacggacggacggaccacacaagaatccaatccagccctcgcgtggctgtactgtactatcggttcgccccgtcgagaagggtgagcagagaattgtccaacggtgggcggcggcggcgagggtatgccggtatgccatcttggccgtccttgcacgtcctccgttgtctccacctccacctgaacggaatctggaatcgccatcacctgccacgcgcgtcgcctccctcgccctcggcgcagacgaacgacttattgccacagagctaaggccgtttgcagcagtctacccaaagtttatccaaaagcactattctgcattgttatacactgtagactacactgttcgcagagtgaagtttgaatataactatgagatgggtaagctgctggagatagcctaaagatgtcagtataagtatcccagcataaggatgtcagtataagtatcccctgatgtgtcgataggtcaagtaggcgctgcagcctgcagtgagtccatggccaggatgaatagcatgggcaatagttggtctccttgccagactcctgatctaccaaatcctgtctctcaaatttgaagactatactccccaacaaatttgtgtttgatccaactgccctcatcttacagctttgtcatcaggagttcaagtgcagctgtacgttccttggaaggtaccctggtgttcgctttctagttccaacaagcttgcacccatcatatattggtgaatggttggttacacatgccaacaacaactgatcatgtgggcaggttgctctgtgacaggggacaaattagtgtgcggtgtgccatagaagcttgttatattagaaagtacgtttttttgcaggtacaatgtcaggagcctataattgccatatgtcttgtagatcttatggattttttttttgttcttcctgaagtgtcattcatgtccacggattctcaacagcttctctgccaggacatgcagaaaaaactgttcatatcaacagaaacccattacttacacagtcagatagtccgctcttctactgtcttgactgctgatgatgttgtgcttgtgcaagatactgtggatagcagctactcgtctccgatggacatggactggactgtctcaagcttcgaagcccacggaccctatgagcacagaacaggaaccacatgaccgaggctcgggttttctcttttaagctggagctgtggagcatggcagctgctgcacaagatggacggacggacggaccacacaagaatccaatccagccctcgcgtggctgtactgtactgtacgtgcgctgcgcagaaagcactgtacgccgacggactggtcgcttctgctaaggccgccgtcctgccgtctgagcagacgatcattgaaaatggatgccacgtgattggcacaaaggttctgctgtcctcttcctcaagggatagcgatgcaagatccagcaggctggccggagagggagagaccagtctctcctcgagcccaagtacgaaagcgtatcaaaagaagaaaggaacaaggtgggggaaaaaaactaggggggccgtatcatatatctggtgccgaaaaacgcccttggaacggagaaaagcaaggtcgcggtgaagtgtgagcagcctctcctctagtggttctgctgggacgacaccaccagcactgcagtaccactactagttatatcaatgtggctgtccctcctcttttccgctgatggagttgagatgttctgcactacttttccaccccgaatccggatggcacccgtaccgtagtgcttggaaaaaaaaacaaacaaacaaacagttgtctctgcgcccgcccgcccgccttggcttcttctacctacatcagctgtccatttcgcagcacgcagcagcagtctctacgctacggctgcatgagtgttagctagcagcaaggatgagagatggcagcaacaccaccaagaagagcaagctgtcgtggtccaagagcttggtgaggaagtggttcaacatcaggagcaaggcccacgacttccacgccgacgatgtggccgcgattggtaggacagttgcaggagggggcgatgacgagtggaggaggggcagcagcttcacccgtagggagccgagcacagtgaagaagagcaagacagagaggtcctcgaggaggagcaatgggcactcgaggcggggaaagattgaccttgatgccgccgaagccacagtgacattggactataggatatttgttgctacatggaatgtgggcggccgttccccgccaaataacatgagcctcgaggactggctccacgctgcacctcctgctgacatctatgtcctcgggtttcaagaaattgttccactcaatgccggtaacgtccttgggacagaggacaatgttccagcgaagaggtgggtgtcactggtcaggaggacactgaacaatttgccaggtactagtggcaacgggagcttccggacaccatctccggctcctaaccctgtggtggagatcgacgatgattttgagggtttgtcatcgaagcagaacagtgcaagtttcttccatcgccggtctttccaggctgggcttagtcggagtttgaggatggagggtgacattcttgctcctcagccaaggctggaacgtcggtacagtgtctgtgaccgagcaatctatggccgtaggcctagcgactatgagaacaactaccgatggggtggatcgtcagatgatgagaataatactggagagtcaccgagcactgtgtattcaccagtgtcgtacggttacggcaatgcatcatctctggaagatggtcaaagacggcctggccaaactagatactgtctggtggcaagcaagcaaatggtagggttgtttctgatgatttgggctcggaaggacataagagatgacataagaaatctgaaagtttcttgtgttgggagaggactgatgggctaccttgggaataaggttagtcatagcgtgtctttttttttgtcgtttttcc

SEQ ID NO: 84907 - DNA, 7074 bp, Zea Mays
atggagatttctggaagggctgcggcggcggaggcggaggcgctgattgcgggcgggatgcgggacggggtgcggctgcggcagcggcagaacaatgaggtatcgataggggcctacattcgaatcactggaaatcaacgacaattgttcagttacttgcccaaacaacgaacgacttattgccacagagctaaggatgacagtgtgagtatcccctgctgtgtcgataggtcaagtaggcgctgcagcctgcatgtcattcatgtccacggattctcaacagcttctctgccaggacatgcagaaaaactgttcatatcaacagaaaacccattatttactgctgatgatgttgtgcaagatactgtggatagcagttactcgtctccgacggacatggactggactgtctcaagcttcgaagcccacgaaccctatgactatgagcacagaacaggaaccacaggatcgagggaaccattcaaagctgtcctttgtgcacatctgggaatcaaatctccccactcttccacaaaggctcgggttttctcttttaagctggagctgtggagcatggcagctgctgcacaagatggacggacggacggaccacacaagaatccaatccagccctcgcgtggctgtactgtactatcggttcgccccgtcgagaagggtgagcagagaattgtccaacggtgggcggcggcggcgagggtatgccggtatgccatcttggccgtccttgcacgtcctccgttgtctccacctccacctgaacggaatctggaatcgccatcacctgccacgcgcgtcgcctccctcgccctcggcgcagggagcacatgctactgataagtagcggcggctggtttcctcatctattctatacttctggaactgatcggcggtgatcgcgacggatttgaagaaatagactgcgggcttgactaattggtaatctgggattggttcttcccccataccctctgctgagcatttaacctgtcttgagtagcgagaatggtgattggcataattgttgttgctgtcccaaaacacccttggattttttaatgacttgctttctctgcagagggcatgggattcatctgggaggatgcagttccttttatatattttttatttattctctgcatttaggatccaggaaattcattgtgctgtaactcagttcatctgatgtaaattaggttcataaatttcaataatgcttggtctctgaagcacatactcagttttctgtcggttgtgttgcagacgaacgacttattgccacagagctaaggccgtttgcagcagtctacccaaagtttatccaaaagcactattctgcattgttatacactgtagactacactgttcgcagagtgaagtttgaatataactatgagatgggtaagctgctggagatagcctaaagatgtcagtataagtatcccagcataaggatgtcagtataagtatcccctgatgtgtcgataggtcaagtaggcgctgcagcctgcagtgagtccatggccaggatgaatagcatgggcaatagttggtctccttgccagactcctgatctaccaaatcctgtctctcaaatttgaagactatactccccaacaaatttgtgtttgatccaactgccctcatcttacagctttgtcatcaggagttcaagtgcagctgtacgttccttggaaggtacaatgtcaggagcctataattgccatatgtcttgtagatcttatggattttttttttgttcttcctgaagtgtcattcatgtccacggattctcaacagcttctctgccaggacatgcagaaaaaactgttcatatcaacagaaacccattacttacacagtcagatagtccgctcttctactgtcttgactgctgatgatgttgtgcttgtgcaagatactgtggatagcagctactcgtctccgatggacatggactggactgtctcaagcttcgaagcccacggaccctatgagcacagaacaggaaccacatgaccgaggctcgggttttctcttttaagctggagctgtggagcatggcagctgctgcacaagatggacggacggacggaccacacaagaatccaatccagccctcgcgtggctgtactgtactgtacgtgcgctgcgcagaaagcactgtacgccggtgaggaaacgctgtcgccctgtgtgttactctgacttttttccaactttagtttttggtttacgtgcttcttactgttgcaattactttatggtctgctaggatagtttgtattatgtttttttgttttgtttcctgcggtacatgctataatgggtgtatccatgggtcagctgtagatgggtgcaagggcatatctatctacctagacgctttagtctgggcttttcatgggcacgctcatgtggccacggacagtgggccgtattccaagattttagaaatgatggtaacttgatgcgtttatcaatagcggggtccagttggagagaaatccctttgcagcaacagaaatggtggctgcaggcttgtgcagaggcagagagagagagagagagagagagagagagagagagagagagagagagagagagagagagagagagagagagagagagagagagagagagagagagagagagagagagagagagagagagagagagagagagagagagagagagagagagagagagagagagagagagagagagagagagagagagggctgtgtctagattgggacaaaagggtgctctgcatagagagagagagagagagagagagagagagagagagagagagagagagagagagagttggttgtgctcgagtacgtgctagatcgatcagcaccagcagcaagtcagcagctatcctcactccgtcaaagacgctttgggttgtcctccgtgtgcaactctatcaactagaggaggctttcagacaatgacacgaggggaactggggaggtgtgtgtgaaagcgagagagagagagagagattgagcgggagatgcagccatttaatctagctagcttagctagttggctgctgaagaaatgccgtacgctttttgtaagaatatcgcagttcacacttcacagcagtgcgtcagtcttttggagcacgctgttcattttattttattttctctctctcgtctgctcctgcatctagtataagttgctggcttcctctgttaccgttagagagagagagagagagacagagaggggaggaagggattgaactgaatgaggagggcctcagactgagaggctgcaaagctgaaaaagcaaaaaaggcaaagaggaacactttggccaaagcatatggaacgaggatcctgttttgactgactccacatttcgcagaggacaccttcccccattttttttcgtttaggtttcagcaatctggcacactgtagattattaagtagggactagggagtactttgttatttgtttcagctttcaagttcaggctagtcctgaacctatcctactttctgcttccgatctctctttttttttaaaaaaaaaaatctaccagccattaacgcttaaccgaagtcgttcccttgcactacaatttagtgatcttaagtaatttatttaatagttggttatcgtattaaaaacgtatatgtacatgtgtcctggtaagcattcagtttggcatttcgtcgtatcgtcgttttacaaatatatagtaaacatacagattgttggatggcctaatgatacagttatttctaaaatcattatggaaattatgatgagggcataaatcatgactcaagtaccacattgtcgtgaagaccaatacgaatgcttcagcaatgaaaaaaaaaggggaaggtgtagggattcccatttctggagataagggaagggcatgcgtgtccaatatggcctttatagctaatctagaccctgaaacctgctttgctctgacattaggctgacacatgtactctgtgcaaccaatgatctcatgcttaatgcccctaacctcatagatagactggcataagtgcctccttgtgctgtttcaagtctgaacacaatgctctatggatttctctacaacagctgtaataataaagccttttagtcctaaacaaggctaaatctttaggtatatttcattttttttttcaagtcttcctttaccgtctcttttcataataactttagccttccatggtctctcttactgttattatcacgtcttaggatgtcactatgtgctggcgcctttggaggtcttgttgcacacactctatggaatttttttctctaacttgttaatttgcttggtggggctaagtaacagtcagctgcacagattgcagggctagcagtacccatgttcttattcttggtcaagtctgctctcaactcaagaagattggacttgtcttgggagaagggagcaaatgtgcacaacaactagccttgtactttttttcttgattgaattaatcaatctaggcactagtctaatcacacattgcgcccatgcttaggaggccttgtcccaagtggtggtggtcattattatatttaaaaactgaccgtctttttccacccactcgtgcaacatccttctatgacagtgggaccatggatccaggtctgccatatacacctgactttttaggcacgtagatgtagcattcagtatatagttttttttttttgcattatacacatgaatctagcgtgtgtgcaattgtaaaagacaacaaaagttgtatgcctggccatgatttgggggaggcggtatgtgtcctgttggtagcatgatatttgaactcatgatcagccaacatgtacttgttggaacagagagaccaatggctgatctgctccaactcaggcctacttttatctaaggattatgacgctaattgttaactatgtgtggttcagacggactggtcgcttctgctaaggccgccgtcctgccgtctgagcagacgatcattgaaaatggatgccacgtgattggcacaaaggttctgctgtcctcttcctcaagggatagcgatgcaagatccagcaggctggccggagagggagagaccagtctctcctcgagcccaagtacgaaagcgtatcaaaagaagaaaggaacaaggtgggggaaaaaaactaggggggccgtatcatatatctggtgccgaaaaacgcccttggaacggagaaaagcaaggtcgcggtgaagtgtgagcagcctctcctctagtggttctgctgggacgacaccaccagcactgcagtaccactactagttatatcaatgtggctgtccctcctcttttccgctgatggagttgagatgttctgcactacttttccaccccgaatccggatggcacccgtaccgtagtgcttgtatgccttctttccctttcttctacttgtacctacatgctactacaggtgtactacgtattttgctccccccacttggttttgcaagcaagaccagcgtaaaagcagaggagactgtcagattcctctttcgctttattctcccgcccagcctcacacacacgtagttagtgttgggctactcacacatgacacaacttcgcctccctccaaatacccagagttttgaagcagggaggaaggaagacagagcagaagcagagcgctctccgtctccggtccagtatctccgctcgccctcctccctcctcctcctccttcgcttcaggttcaggagccagttagaacattggtgttagcgcgcgctctttcctccaagcagaatcaagattttgttcccatcctcaaggaaaaaaaaacaaacaaacaaacagttgtctctgcgcccgcccgcccgccttggcttcttctacctacatcagctgtccatttcgcagcacgcagcagcagtctctacgctacggctgcatgagtgttagctagcagcaaggatgagagatggcagcaacaccaccaagaagagcaagctgtcgtggtccaagagcttggtgaggaagtggttcaacatcaggagcaaggcccacgacttccacgccgacgatgtggccgcgattggtaggacagttgcaggagggggcgatgacgagtggaggaggggcagcagcttcacccgtagggagccgagcacagtgaagaagagcaagacagagaggtcctcgaggaggagcaatgggcactcgaggcggggaaagattgaccttgatgccgccgaagccacagtgacattggactataggatatttgttgctacatggaatgtgggcggccgttccccgccaaataacatgagcctcgaggactggctccacgctgcacctcctgctgacatctatgtcctcgggtttcaagaaattgttccactcaatgccggtaacgtccttgggacagaggacaatgttccagcgaagaggtgggtgtcactggtcaggaggacactgaacaatttgccaggtactagtggcaacgggagcttccggacaccatctccggctcctaaccctgtggtggagatcgacgatgattttgagggtttgtcatcgaagcagaacagtgcaagtttcttccatcgccggtctttccaggctgggcttagtcggagtttgaggatggagggtgacattcttgctcctcagccaaggctggaacgtcggtacagtgtctgtgaccgagcaatctatggccgtaggcctagcgactatgagaacaactaccgatggggtggatcgtcagatgatgagaataatactggagagtcaccgagcactgtgtattcaccagtgtcgtacggttacggcaatgcatcatctctggaagatggtcaaagacggcctggccaaactagatactgtctggtggcaagcaagcaaatggtagggttgtttctgatgatttgggctcggaaggacataagagatgacataagaaatctgaaagtttcttgtgttgggagaggactgatgggctaccttgggaataaggttagtcatagcgtgtctttttttttgtcgtttttcc

SEQ ID NO: 84908 - DNA, 7016 bp, Zea Mays
atggagatttctggaagggctgcggcggcggaggcggaggcgctgattgcgggcgggatgcgggacggggtgcggctgcggcagcggcagaacaatgaggtatcgataggggcctacattcgaatcactggaaatcaacgacaattgttcagttacttgcccaaacaacgaacgacttattgccacagagctaaggatgacagtgtgagtatcccctgctgtgtcgataggtcaagtaggcgctgcagcctgcatgtcattcatgtccacggattctcaacagcttctctgccaggacatgcagaaaaactgttcatatcaacagaaaacccattatttactgctgatgatgttgtgcaagatactgtggatagcagttactcgtctccgacggacatggactggactgtctcaagcttcgaagcccacgaaccctatgactatgagcacagaacaggaaccacaggatcgagggaaccattcaaagctgtcctttgtgcacatctgggaatcaaatctccccactcttccacaaaggctcgggttttctcttttaagctggagctgtggagcatggcagctgctgcacaagatggacggacggacggaccacacaagaatccaatccagccctcgcgtggctgtactgtactatcggttcgccccgtcgagaagggtgagcagagaattgtccaacggtgggcggcggcggcgagggtatgccggtatgccatcttggccgtccttgcacgtcctccgttgtctccacctccacctgaacggaatctggaatcgccatcacctgccacgcgcgtcgcctccctcgccctcggcgcagggagcacatgctactgataagtagcggcggctggtttcctcatctattctatacttctggaactgatcggcggtgatcgcgacggatttgaagaaatagactgcgggcttgactaattggtaatctgggattggttcttcccccataccctctgctgagcatttaacctgtcttgagtagcgagaatggtgattggcataattgttgttgctgtcccaaaacacccttggattttttaatgacttgctttctctgcagagggcatgggattcatctgggaggatgcagttccttttatatattttttatttattctctgcatttaggatccaggaaattcattgtgctgtaactcagttcatctgatgtaaattaggttcataaatttcaataatgcttggtctctgaagcacatactcagttttctgtcggttgtgttgcagacgaacgacttattgccacagagctaaggccgtttgcagcagtctacccaaagtttatccaaaagcactattctgcattgttatacactgtagactacactgttcgcagagtgaagtttgaatataactatgagatgggtaagctgctggagatagcctaaagatgtcagtataagtatcccagcataaggatgtcagtataagtatcccctgatgtgtcgataggtcaagtaggcgctgcagcctgcagtgagtccatggccaggatgaatagcatgggcaatagttggtctccttgccagactcctgatctaccaaatcctgtctctcaaatttgaagactatactccccaacaaatttgtgtttgatccaactgccctcatcttacagctttgtcatcaggagttcaagtgcagctgtacgttccttggaaggtacaatgtcaggagcctataattgccatatgtcttgtagatcttatggattttttttttgttcttcctgaagtgtcattcatgtccacggattctcaacagcttctctgccaggacatgcagaaaaaactgttcatatcaacagaaacccattacttacacagtcagatagtccgctcttctactgtcttgactgctgatgatgttgtgcttgtgcaagatactgtggatagcagctactcgtctccgatggacatggactggactgtctcaagcttcgaagcccacggaccctatgagcacagaacaggaaccacatgaccgaggctcgggttttctcttttaagctggagctgtggagcatggcagctgctgcacaagatggacggacggacggaccacacaagaatccaatccagccctcgcgtggctgtactgtactgtacgtgcgctgcgcagaaagcactgtacgccggtgaggaaacgctgtcgccctgtgtgttactctgacttttttccaactttagtttttggtttacgtgcttcttactgttgcaattactttatggtctgctaggatagtttgtattatgtttttttgttttgtttcctgcggtacatgctataatgggtgtatccatgggtcagctgtagatgggtgcaagggcatatctatctacctagacgctttagtctgggcttttcatgggcacgctcatgtggccacggacagtgggccgtattccaagattttagaaatgatggtaacttgatgcgtttatcaatagcggggtccagttggagagaaatccctttgcagcaacagaaatggtggctgcaggcttgtgcagaggcagagagagagagagagagagagagagagagagagagagagagagagagagagagagagagagagagagagagagagagagagagagagagagagagagagagagagagagagagagagagagagagagagagagagagagagagagagagagagagagagagagagagagagagagagagagagagggctgtgtctagattgggacaaaagggtgctctgcatagagagagagagagagagagagagagagagagagagagagagagagagagagagagttggttgtgctcgagtacgtgctagatcgatcagcaccagcagcaagtcagcagctatcctcactccgtcaaagacgctttgggttgtcctccgtgtgcaactctatcaactagaggaggctttcagacaatgacacgaggggaactggggaggtgtgtgtgaaagcgagagagagagagagagattgagcgggagatgcagccatttaatctagctagcttagctagttggctgctgaagaaatgccgtacgctttttgtaagaatatcgcagttcacacttcacagcagtgcgtcagtcttttggagcacgctgttcattttattttattttctctctctcgtctgctcctgcatctagtataagttgctggcttcctctgttaccgttagagagagagagagagagacagagaggggaggaagggattgaactgaatgaggagggcctcagactgagaggctgcaaagctgaaaaagcaaaaaaggcaaagaggaacactttggccaaagcatatggaacgaggatcctgttttgactgactccacatttcgcagaggacaccttcccccattttttttcgtttaggtttcagcaatctggcacactgtagattattaagtagggactagggagtactttgttatttgtttcagctttcaagttcaggctagtcctgaacctatcctactttctgcttccgatctctctttttttttaaaaaaaaaaatctaccagccattaacgcttaaccgaagtcgttcccttgcactacaatttagtgatcttaagtaatttatttaatagttggttatcgtattaaaaacgtatatgtacatgtgtcctggtaagcattcagtttggcatttcgtcgtatcgtcgttttacaaatatatagtaaacatacagattgttggatggcctaatgatacagttatttctaaaatcattatggaaattatgatgagggcataaatcatgactcaagtaccacattgtcgtgaagaccaatacgaatgcttcagcaatgaaaaaaaaaggggaaggtgtagggattcccatttctggagataagggaagggcatgcgtgtccaatatggcctttatagctaatctagaccctgaaacctgctttgctctgacattaggctgacacatgtactctgtgcaaccaatgatctcatgcttaatgcccctaacctcatagatagactggcataagtgcctccttgtgctgtttcaagtctgaacacaatgctctatggatttctctacaacagctgtaataataaagccttttagtcctaaacaaggctaaatctttaggtatatttcattttttttttcaagtcttcctttaccgtctcttttcataataactttagccttccatggtctctcttactgttattatcacgtcttaggatgtcactatgtgctggcgcctttggaggtcttgttgcacacactctatggaatttttttctctaacttgttaatttgcttggtggggctaagtaacagtcagctgcacagattgcagggctagcagtacccatgttcttattcttggtcaagtctgctctcaactcaagaagattggacttgtcttgggagaagggagcaaatgtgcacaacaactagccttgtactttttttcttgattgaattaatcaatctaggcactagtctaatcacacattgcgcccatgcttaggaggccttgtcccaagtggtggtggtcattattatatttaaaaactgaccgtctttttccacccactcgtgcaacatccttctatgacagtgggaccatggatccaggtctgccatatacacctgactttttaggcacgtagatgtagcattcagtatatagttttttttttttgcattatacacatgaatctagcgtgtgtgcaattgtaaaagacaacaaaagttgtatgcctggccatgatttgggggaggcggtatgtgtcctgttggtagcatgatatttgaactcatgatcagccaacatgtacttgttggaacagagagaccaatggctgatctgctccaactcaggcctacttttatctaaggtgccgtacacccgtgggaatcatggataaactaagcggaaatgatggggctctgttggtaaccctggtcgtaatctcttggttccaggattatgacgctaattgttaactatgtgtggttcagacggactggtcgcttctgctaaggccgccgtcctgccgtctgagcagacgatcattgaaaatggatgccacgtgattggcacaaaggttctgctgtcctcttcctcaagggatagcgatgcaagatccagcaggctggccggagagggagagaccagtctctcctcgagcccaagtacgaaagcgtatcaaaagaagaaaggaacaaggtgggggaaaaaaactaggggggccgtatcatatatctggtgccgaaaaacgcccttggaacggagaaaagcaaggtcgcggtgaagtgtgagcagcctctcctctagtggttctgctgggacgacaccaccagcactgcagtaccactactagttatatcaatgtggctgtccctcctcttttccgctgatggagttgagatgttctgcactacttttccaccccgaatccggatggcacccgtaccgtagtgcttagttttgaagcagggaggaaggaagacagagcagaagcagagcgctctccgtctccggtccagtatctccgctcgccctcctccctcctcctcctccttcgcttcaggttcaggagccagttagaacattggtgttagcgcgcgctctttcctccaagcagaatcaagattttgttcccatcctcaagtacttactcctcctctcccccactctccagccgtcctctctccttctccatcaaatcacaggctttgtttatagggaaaaaaaaacaaacaaacaaacagttgtctctgcgcccgcccgcccgccttggcttcttctacctacatcagctgtccatttcgcagcacgcagcagcagtctctacgctacggctgcatgagtgttagctagcagcaaggatgagagatggcagcaacaccaccaagaagagcaagctgtcgtggtccaagagcttggtgaggaagtggttcaacatcaggagcaaggcccacgacttccacgccgacgatgtggccgcgattggtaggacagttgcaggagggggcgatgacgagtggaggaggggcagcagcttcacccgtagggagccgagcacagtgaagaagagcaagacagagaggtcctcgaggaggagcaatgggcactcgaggcggggaaagattgaccttgatgccgccgaagccacagtgacattggactataggatatttgttgctacatggaatgtgggcggccgttccccgccaaataacatgagcctcgaggactggctccacgctgcacctcctgctgacatctatgtcctcgggtttcaagaaattgttccactcaatgccggtaacgtccttgggacagaggacaatgttccagcgaagaggtgggtgtcactggtcaggaggacactgaacaatttgccaggtactagtggcaacgggagcttccggacaccatctccggctcctaaccctgtggtggagatcgacgatgattttgagggtttgtcatcgaagcagaacagtgcaagtttcttccatcgccggtctttccaggctgggcttagtcggagtttgaggatggagggtgacattcttgctcctcagccaaggctggaacgtcggtacagtgtctgtgaccgagcaatctatggccgtaggcctagcgactatgagaacaactaccgatggggtggatcgtcagatgatgagaataatactggagagtcaccgagcactgtgtattcaccagtgtcgtacggttacggcaatgcatcatctctggaagatggtcaaagacggcctggccaaactagatactgtctggtggcaagcaagcaaatggtagggttgtttctgatgatttgggctcggaaggacataagagatgacataagaaatctgaaagtttcttgtgttgggagaggactgatgggctaccttgggaataaggttagtcatagcgtgtctttttttttgtcgtttttcc

SEQ ID NO: 84909 - DNA, 3134 bp, Zea Mays
atggagatttctggaagggctgcggcggcggaggcggaggcgctgattgcgggcgggatgcgggacggggtgcggctgcggcagcggcagaacaatgagggagcacatgctactgataagtagcggcggctggtttcctcatctattctatacttctggaactgatcggcggtgatcgcgacggatttgaagaaatagactgcgggcttgactaattggtaatctgggattggttcttcccccataccctctgctgagcatttaacctgtcttgagtagcgagaatggtgattggcataattgttgttgctgtcccaaaacacccttggattttttaatgacttgctttctctgcagagggcatgggattcatctgggaggatgcagttccttttatatattttttatttattctctgcatttaggatccaggaaattcattgtgctgtaactcagttcatctgatgtaaattaggttcataaatttcaataatgcttggtctctgaagcacatactcagttttctgtcggttgtgttgcagacgaacgacttattgccacagagctaaggccgtttgcagcagtctacccaaagtttatccaaaagcactattctgcattgttatacactgtagactacactgttcgcagagtgaagtttgaatataactatgagatgggtaagctgctggagatagcctaaagatgtcagtataagtatcccagcataaggatgtcagtataagtatcccctgatgtgtcgataggtcaagtaggcgctgcagcctgcagtgagtccatggccaggatgaatagcatgggcaatagttggtctccttgccagactcctgatctaccaaatcctgtctctcaaatttgaagactatactccccaacaaatttgtgtttgatccaactgccctcatcttacagctttgtcatcaggagttcaagtgcagctgtacgttccttggaaggtaccctggtgttcgctttctagttccaacaagcttgcacccatcatatattggtgaatggttggttacacatgccaacaacaactgatcatgtgggcaggttgctctgtgacaggggacaaattagtgtgcggtgtgccatagaagcttgttatattagaaagtacgtttttttgcaggtacaatgtcaggagcctataattgccatatgtcttgtagatcttatggattttttttttgttcttcctgaagtgtcattcatgtccacggattctcaacagcttctctgccaggacatgcagaaaaaactgttcatatcaacagaaacccattacttacacagtcagatagtccgctcttctactgtcttgactgctgatgatgttgtgcttgtgcaagatactgtggatagcagctactcgtctccgatggacatggactggactgtctcaagcttcgaagcccacggaccctatgagcacagaacaggaaccacatgaccgaggctcgggttttctcttttaagctggagctgtggagcatggcagctgctgcacaagatggacggacggacggaccacacaagaatccaatccagccctcgcgtggctgtactgtactgtacgtgcgctgcgcagaaagcactgtacgccgacggactggtcgcttctgctaaggccgccgtcctgccgtctgagcagacgatcattgaaaatggatgccacgtgattggcacaaaggttctgctgtcctcttcctcaagggatagcgatgcaagatccagcaggctggccggagagggagagaccagtctctcctcgagcccaagtacgaaagcgtatcaaaagaagaaaggaacaaggtgggggaaaaaaactaggggggccgtatcatatatctggtgccgaaaaacgcccttggaacggagaaaagcaaggtcgcggtgaagtgtgagcagcctctcctctagtggttctgctgggacgacaccaccagcactgcagtaccactactagttacacgcagcagcagtctctacgctacggctgcatgagtgttagctagcagcaaggatgagagatggcagcaacaccaccaagaagagcaagctgtcgtggtccaagagcttggtgaggaagtggttcaacatcaggagcaaggcccacgacttccacgccgacgatgtggccgcgattggtaggacagttgcaggagggggcgatgacgagtggaggaggggcagcagcttcacccgtagggagccgagcacagtgaagaagagcaagacagagaggtcctcgaggaggagcaatgggcactcgaggcggggaaagattgaccttgatgccgccgaagccacagtgacattggactataggatatttgttgctacatggaatgtgggcggccgttccccgccaaataacatgagcctcgaggactggctccacgctgcacctcctgctgacatctatgtcctcgggtttcaagaaattgttccactcaatgccggtaacgtccttgggacagaggacaatgttccagcgaagaggtgggtgtcactggtcaggaggacactgaacaatttgccaggtactagtggcaacgggagcttccggacaccatctccggctcctaaccctgtggtggagatcgacgatgattttgagggtttgtcatcgaagcagaacagtgcaagtttcttccatcgccggtctttccaggctgggcttagtcggagtttgaggatggagggtgacattcttgctcctcagccaaggctggaacgtcggtacagtgtctgtgaccgagcaatctatggccgtaggcctagcgactatgagaacaactaccgatggggtggatcgtcagatgatgagaataatactggagagtcaccgagcactgtgtattcaccagtgtcgtacggttacggcaatgcatcatctctggaagatggtcaaagacggcctggccaaactagatactgtctggtggcaagcaagcaaatggtagggttgtttctgatgatttgggctcggaaggacataagagatgacataagaaatctgaaagtttcttgtgttgggagaggactgatgggctaccttgggaataaggttagtcatagcgtgtctttttttttgtcgtttttcc

SEQ ID NO: 84910 - DNA, 4209 bp, Zea Mays
atggagatttctggaagggctgcggcggcggaggcggaggcgctgattgcgggcgggatgcgggacggggtgcggctgcggcagcggcagaacaatgaggtatcgataggggcctacattcgaatcactggaaatcaacgacaattgttcagttacttgcccaaacaacgaacgacttattgccacagagctaaggatgacagtgtgagtatcccctgctgtgtcgataggtcaagtaggcgctgcagcctgcatgtcattcatgtccacggattctcaacagcttctctgccaggacatgcagaaaaactgttcatatcaacagaaaacccattatttactgctgatgatgttgtgcaagatactgtggatagcagttactcgtctccgacggacatggactggactgtctcaagcttcgaagcccacgaaccctatgactatgagcacagaacaggaaccacaggatcgagggaaccattcaaagctgtcctttgtgcacatctgggaatcaaatctccccactcttccacaaaggctcgggttttctcttttaagctggagctgtggagcatggcagctgctgcacaagatggacggacggacggaccacacaagaatccaatccagccctcgcgtggctgtactgtactatcggttcgccccgtcgagaagggtgagcagagaattgtccaacggtgggcggcggcggcgagggtatgccggtatgccatcttggccgtccttgcacgtcctccgttgtctccacctccacctgaacggaatctggaatcgccatcacctgccacgcgcgtcgcctccctcgccctcggcgcagggagcacatgctactgataagtagcggcggctggtttcctcatctattctatacttctggaactgatcggcggtgatcgcgacggatttgaagaaatagactgcgggcttgactaattgacgaacgacttattgccacagagctaaggccgtttgcagcagtctacccaaagtttatccaaaagcactattctgcattgttatacactgtagactacactgttcgcagagtgaagtttgaatataactatgagatgggtaagctgctggagatagcctaaagatgtcagtataagtatcccagcataaggatgtcagtataagtatcccctgatgtgtcgataggtcaagtaggcgctgcagcctgcagtgagtccatggccaggatgaatagcatgggcaatagttggtctccttgccagactcctgatctaccaaatcctgtctctcaaatttgaagactatactccccaacaaatttgtgtttgatccaactgccctcatcttacagctttgtcatcaggagttcaagtgcagctgtacgttccttggaaggtaccctggtgttcgctttctagttccaacaagcttgcacccatcatatattggtgaatggttggttacacatgccaacaacaactgatcatgtgggcaggttgctctgtgacaggggacaaattagtgtgcggtgtgccatagaagcttgttatattagaaagtacgtttttttgcaggtacaatgtcaggagcctataattgccatatgtcttgtagatcttatggattttttttttgttcttcctgaagtgtcattcatgtccacggattctcaacagcttctctgccaggacatgcagaaaaaactgttcatatcaacagaaacccattacttacacagtcagatagtccgctcttctactgtcttgactgctgatgatgttgtgcttgtgcaagatactgtggatagcagctactcgtctccgatggacatggactggactgtctcaagcttcgaagcccacggaccctatgagcacagaacaggaaccacatgaccgaggctcgggttttctcttttaagctggagctgtggagcatggcagctgctgcacaagatggacggacggacggaccacacaagaatccaatccagccctcgcgtggctgtactgtactgtacgtgcgctgcgcagaaagcactgtacgccgacggactggtcgcttctgctaaggccgccgtcctgccgtctgagcagacgatcattgaaaatggatgccacgtgattggcacaaaggttctgctgtcctcttcctcaagggatagcgatgcaagatccagcaggctggccggagagggagagaccagtctctcctcgagcccaagtacgaaagcgtatcaaaagaagaaaggaacaaggtgggggaaaaaaactaggggggccgtatcatatatctggtgccgaaaaacgcccttggaacggagaaaagcaaggtcgcggtgaagtgtgagcagcctctcctctagtggttctgctgggacgacaccaccagcactgcagtaccactactagttagtaagtacgctgctgcacacaacaatattcttttttctctccataatactacaaatactgcagtatcaatgtggctgtccctcctcttttccgctgatggagttgagatgttctgcactacttttccaccccgaatccggatggcacccgtaccgtagtgcttgtatgccttctttccctttcttctacttgtacctacatgctactacaggtgtactacgtattttgctccccccacttggttttgcaagcaagaccagcgtaaaagcagaggagactgtcagattcctctttcgctttattctcccgcccagcctcacacacacgtagttagtgttgggctactcacacatgacacaacttcgcctccctccaaatacccagagttttgaagcagggaggaaggaagacagagcagaagcagagcgctctccgtctccggtccagtatctccgctcgccctcctccctcctcctcctccttcgcttcaggttcaggagccagttagaacattggtgttagcgcgcgctctttcctccaagcagaatcaagattttgttcccatcctcaaggaaaaaaaaacaaacaaacaaacagttgtctctgcgcccgcccgcccgccttggcttcttctacctacatcagctgtccatttcgcagcacgcagcagcagtctctacgctacggctgcatgagtgttagctagcagcaaggatgagagatggcagcaacaccaccaagaagagcaagctgtcgtggtccaagagcttggtgaggaagtggttcaacatcaggagcaaggcccacgacttccacgccgacgatgtggccgcgattggtaggacagttgcaggagggggcgatgacgagtggaggaggggcagcagcttcacccgtagggagccgagcacagtgaagaagagcaagacagagaggtcctcgaggaggagcaatgggcactcgaggcggggaaagattgaccttgatgccgccgaagccacagtgacattggactataggatatttgttgctacatggaatgtgggcggccgttccccgccaaataacatgagcctcgaggactggctccacgctgcacctcctgctgacatctatgtcctcgggtttcaagaaattgttccactcaatgccggtaacgtccttgggacagaggacaatgttccagcgaagaggtgggtgtcactggtcaggaggacactgaacaatttgccaggtactagtggcaacgggagcttccggacaccatctccggctcctaaccctgtggtggagatcgacgatgattttgagggtttgtcatcgaagcagaacagtgcaagtttcttccatcgccggtctttccaggctgggcttagtcggagtttgaggatggagggtgacattcttgctcctcagccaaggctggaacgtcggtacagtgtctgtgaccgagcaatctatggccgtaggcctagcgactatgagaacaactaccgatggggtggatcgtcagatgatgagaataatactggagagtcaccgagcactgtgtattcaccagtgtcgtacggttacggcaatgcatcatctctggaagatggtcaaagacggcctggccaaactagatactgtctggtggcaagcaagcaaatggtagggttgtttctgatgatttgggctcggaaggacataagagatgacataagaaatctgaaagtttcttgtgttgggagaggactgatgggctaccttgggaataaggttagtcatagcgtgtctttttttttgtcgtttttcc

SEQ ID NO: 84911 - DNA, 4249 bp, Zea Mays
atggagatttctggaagggctgcggcggcggaggcggaggcgctgattgcgggcgggatgcgggacggggtgcggctgcggcagcggcagaacaatgaggtatcgataggggcctacattcgaatcactggaaatcaacgacaattgttcagttacttgcccaaacaacgaacgacttattgccacagagctaaggatgacagtgtgagtatcccctgctgtgtcgataggtcaagtaggcgctgcagcctgcatgtcattcatgtccacggattctcaacagcttctctgccaggacatgcagaaaaactgttcatatcaacagaaaacccattatttactgctgatgatgttgtgcaagatactgtggatagcagttactcgtctccgacggacatggactggactgtctcaagcttcgaagcccacgaaccctatgactatgagcacagaacaggaaccacaggatcgagggaaccattcaaagctgtcctttgtgcacatctgggaatcaaatctccccactcttccacaaaggctcgggttttctcttttaagctggagctgtggagcatggcagctgctgcacaagatggacggacggacggaccacacaagaatccaatccagccctcgcgtggctgtactgtactatcggttcgccccgtcgagaagggtgagcagagaattgtccaacggtgggcggcggcggcgagggtatgccggtatgccatcttggccgtccttgcacgtcctccgttgtctccacctccacctgaacggaatctggaatcgccatcacctgccacgcgcgtcgcctccctcgccctcggcgcagggagcacatgctactgataagtagcggcggctggtttcctcatctattctatacttctggaactgatcggcggtgatcgcgacggatttgaagaaatagactgcgggcttgactaattggtaatctgggattggttcttcccccataccctctgctgagcatttaacctgtcttgagtagcgagaatggtgattggcataattgttgttgctgtcccaaaacacccttggattttttaatgacttgctttctctgcagagggcatgggattcatctgggaggatgcagttccttttatatattttttatttattctctgcatttaggatccaggaaattcattgtgctgtaactcagttcatctgatgtaaattaggttcataaatttcaataatgcttggtctctgaagcacatactcagttttctgtcggttgtgttgcagacgaacgacttattgccacagagctaaggccgtttgcagcagtctacccaaagtttatccaaaagcactattctgcattgttatacactgtagactacactgttcgcagagtgaagtttgaatataactatgagatgggtaagctgctggagatagcctaaagatgtcagtataagtatcccagcataaggatgtcagtataagtatcccctgatgtgtcgataggtcaagtaggcgctgcagcctgcagtgagtccatggccaggatgaatagcatgggcaatagttggtctccttgccagactcctgatctaccaaatcctgtctctcaaatttgaagactatactccccaacaaatttgtgtttgatccaactgccctcatcttacagctttgtcatcaggagttcaagtgcagctgtacgttccttggaaggtaccctggtgttcgctttctagttccaacaagcttgcacccatcatatattggtgaatggttggttacacatgccaacaacaactgatcatgtgggcaggttgctctgtgacaggggacaaattagtgtgcggtgtgccatagaagcttgttatattagaaagtacgtttttttgcaggtacaatgtcaggagcctataattgccatatgtcttgtagatcttatggattttttttttgttcttcctgaagtgtcattcatgtccacggattctcaacagcttctctgccaggacatgcagaaaaaactgttcatatcaacagaaacccattacttacacagtcagatagtccgctcttctactgtcttgactgctgatgatgttgtgcttgtgcaagatactgtggatagcagctactcgtctccgatggacatggactggactgtctcaagcttcgaagcccacggaccctatgagcacagaacaggaaccacatgaccgaggctcgggttttctcttttaagctggagctgtggagcatggcagctgctgcacaagatggacggacggacggaccacacaagaatccaatccagccctcgcgtggctgtactgtactgtacgtgcgctgcgcagaaagcactgtacgccgacggactggtcgcttctgctaaggccgccgtcctgccgtctgagcagacgatcattgaaaatggatgccacgtgattggcacaaaggttctgctgtcctcttcctcaagggatagcgatgcaagatccagcaggctggccggagagggagagaccagtctctcctcgagcccaagtacgaaagcgtatcaaaagaagaaaggaacaaggtgggggaaaaaaactaggggggccgtatcatatatctggtgccgaaaaacgcccttggaacggagaaaagcaaggtcgcggtgaagtgtgagcagcctctcctctagtggttctgctgggacgacaccaccagcactgcagtaccactactagttatatcaatgtggctgtccctcctcttttccgctgatggagttgagatgttctgcactacttttccaccccgaatccggatggcacccgtaccgtagtgcttagttttgaagcagggaggaaggaagacagagcagaagcagagcgctctccgtctccggtccagtatctccgctcgccctcctccctcctcctcctccttcgcttcaggttcaggagccagttagaacattggtgttagcgcgcgctctttcctccaagcagaatcaagattttgttcccatcctcaaggaaaaaaaaacaaacaaacaaacagttgtctctgcgcccgcccgcccgccttggcttcttctacctacatcagctgtccatttcgcagcacgcagcagcagtctctacgctacggctgcatgagtgttagctagcagcaaggatgagagatggcagcaacaccaccaagaagagcaagctgtcgtggtccaagagcttggtgaggaagtggttcaacatcaggagcaaggcccacgacttccacgccgacgatgtggccgcgattggtaggacagttgcaggagggggcgatgacgagtggaggaggggcagcagcttcacccgtagggagccgagcacagtgaagaagagcaagacagagaggtcctcgaggaggagcaatgggcactcgaggcggggaaagattgaccttgatgccgccgaagccacagtgacattggactataggatatttgttgctacatggaatgtgggcggccgttccccgccaaataacatgagcctcgaggactggctccacgctgcacctcctgctgacatctatgtcctcgggtttcaagaaattgttccactcaatgccggtaacgtccttgggacagaggacaatgttccagcgaagaggtgggtgtcactggtcaggaggacactgaacaatttgccaggtactagtggcaacgggagcttccggacaccatctccggctcctaaccctgtggtggagatcgacgatgattttgagggtttgtcatcgaagcagaacagtgcaagtttcttccatcgccggtctttccaggctgggcttagtcggagtttgaggatggagggtgacattcttgctcctcagccaaggctggaacgtcggtacagtgtctgtgaccgagcaatctatggccgtaggcctagcgactatgagaacaactaccgatggggtggatcgtcagatgatgagaataatactggagagtcaccgagcactgtgtattcaccagtgtcgtacggttacggcaatgcatcatctctggaagatggtcaaagacggcctggccaaactagatactgtctggtggcaagcaagcaaatggtagggttgtttctgatgatttgggctcggaaggacataagagatgacataagaaatctgaaagtttcttgtgttgggagaggactgatgggctaccttgggaataaggttagtcatagcgtgtctttttttttgtcgtttttcc

SEQ ID NO: 84912 - DNA, 4077 bp, Zea Mays
atggagatttctggaagggctgcggcggcggaggcggaggcgctgattgcgggcgggatgcgggacggggtgcggctgcggcagcggcagaacaatgagttactcgtctccgacggacatggactggactgtctcaagcttcgaagcccacgaaccctatgactatgagcacagaacaggaaccacaggatcgagggaaccattcaaagctgtcctttgtgcacatctgggaatcaaatctccccactcttccacaaaggctcgggttttctcttttaagctggagctgtggagcatggcagctgctgcacaagatggacggacggacggaccacacaagaatccaatccagccctcgcgtggctgtactgtactatcggttcgccccgtcgagaagggtgagcagagaattgtccaacggtgggcggcggcggcgagggtatgccggtatgccatcttggccgtccttgcacgtcctccgttgtctccacctccacctgaacggaatctggaatcgccatcacctgccacgcgcgtcgcctccctcgccctcggcgcagggagcacatgctactgataagtagcggcggctggtttcctcatctattctatacttctggaactgatcggcggtgatcgcgacggatttgaagaaatagactgcgggcttgactaattggtaatctgggattggttcttcccccataccctctgctgagcatttaacctgtcttgagtagcgagaatggtgattggcataattgttgttgctgtcccaaaacacccttggattttttaatgacttgctttctctgcagagggcatgggattcatctgggaggatgcagttccttttatatattttttatttattctctgcatttaggatccaggaaattcattgtgctgtaactcagttcatctgatgtaaattaggttcataaatttcaataatgcttggtctctgaagcacatactcagttttctgtcggttgtgttgcagacgaacgacttattgccacagagctaaggccgtttgcagcagtctacccaaagtttatccaaaagcactattctgcattgttatacactgtagactacactgttcgcagagtgaagtttgaatataactatgagatgggtaagctgctggagatagcctaaagatgtcagtataagtatcccagcataaggatgtcagtataagtatcccctgatgtgtcgataggtcaagtaggcgctgcagcctgcagtgagtccatggccaggatgaatagcatgggcaatagttggtctccttgccagactcctgatctaccaaatcctgtctctcaaatttgaagactatactccccaacaaatttgtgtttgatccaactgccctcatcttacagctttgtcatcaggagttcaagtgcagctgtacgttccttggaaggggacaaattagtgtgcggtgtgccatagaagcttgttatattagaaagtacgtttttttgcaggtacaatgtcaggagcctataattgccatatgtcttgtagatcttatggattttttttttgttcttcctgaagtgtcattcatgtccacggattctcaacagcttctctgccaggacatgcagaaaaaactgttcatatcaacagaaacccattacttacacagtcagatagtccgctcttctactgtcttgactgctgatgatgttgtgcttgtgcaagatactgtggatagcagctactcgtctccgatggacatggactggactgtctcaagcttcgaagcccacggaccctatgagcacagaacaggaaccacatgaccgaggctcgggttttctcttttaagctggagctgtggagcatggcagctgctgcacaagatggacggacggacggaccacacaagaatccaatccagccctcgcgtggctgtactgtactgtacgtgcgctgcgcagaaagcactgtacgccgacggactggtcgcttctgctaaggccgccgtcctgccgtctgagcagacgatcattgaaaatggatgccacgtgattggcacaaaggttctgctgtcctcttcctcaagggatagcgatgcaagatccagcaggctggccggagagggagagaccagtctctcctcgagcccaagtacgaaagcgtatcaaaagaagaaaggaacaaggtgggggaaaaaaactaggggggccgtatcatatatctggtgccgaaaaacgcccttggaacggagaaaagcaaggtcgcggtgaagtgtgagcagcctctcctctagtggttctgctgggacgacaccaccagcactgcagtaccactactagttatatcaatgtggctgtccctcctcttttccgctgatggagttgagatgttctgcactacttttccaccccgaatccggatggcacccgtaccgtagtgcttgtatgccttctttccctttcttctacttgtacctacatgctactacaggtgtactacgtattttgctccccccacttggttttgcaagcaagaccagcgtaaaagcagaggagactgtcagattcctctttcgctttattctcccgcccagcctcacacacacgtagttagtgttgggctactcacacatgacacaacttcgcctccctccaaatacccagagttttgaagcagggaggaaggaagacagagcagaagcagagcgctctccgtctccggtccagtatctccgctcgccctcctccctcctcctcctccttcgcttcaggttcaggagccagttagaacattggtgttagcgcgcgctctttcctccaagcagaatcaagattttgttcccatcctcaaggaaaaaaaaacaaacaaacaaacagttgtctctgcgcccgcccgcccgccttggcttcttctacctacatcagctgtccatttcgcagcacgcagcagcagtctctacgctacggctgcatgagtgttagctagcagcaaggatgagagatggcagcaacaccaccaagaagagcaagctgtcgtggtccaagagcttggtgaggaagtggttcaacatcaggagcaaggcccacgacttccacgccgacgatgtggccgcgattggtaggacagttgcaggagggggcgatgacgagtggaggaggggcagcagcttcacccgtagggagccgagcacagtgaagaagagcaagacagagaggtcctcgaggaggagcaatgggcactcgaggcggggaaagattgaccttgatgccgccgaagccacagtgacattggactataggatatttgttgctacatggaatgtgggcggccgttccccgccaaataacatgagcctcgaggactggctccacgctgcacctcctgctgacatctatgtcctcgggtttcaagaaattgttccactcaatgccggtaacgtccttgggacagaggacaatgttccagcgaagaggtgggtgtcactggtcaggaggacactgaacaatttgccaggtactagtggcaacgggagcttccggacaccatctccggctcctaaccctgtggtggagatcgacgatgattttgagggtttgtcatcgaagcagaacagtgcaagtttcttccatcgccggtctttccaggctgggcttagtcggagtttgaggatggagggtgacattcttgctcctcagccaaggctggaacgtcggtacagtgtctgtgaccgagcaatctatggccgtaggcctagcgactatgagaacaactaccgatggggtggatcgtcagatgatgagaataatactggagagtcaccgagcactgtgtattcaccagtgtcgtacggttacggcaatgcatcatctctggaagatggtcaaagacggcctggccaaactagatactgtctggtggcaagcaagcaaatggtagggttgtttctgatgatttgggctcggaaggacataagagatgacataagaaatctgaaagtttcttgtgttgggagaggactgatgggctaccttgggaataaggttagtcatagcgtgtctttttttttgtcgtttttcc

SEQ ID NO: 84913 - DNA, 2871 bp, Zea Mays
atggagatttctggaagggctgcggcggcggaggcggaggcgctgattgcgggcgggatgcgggacggggtgcggctgcggcagcggcagaacaatgagggagcacatgctactgataagtagcggcggctggtttcctcatctattctatacttctggaactgatcggcggtgatcgcgacggatttgaagaaatagactgcgggcttgactaattgacgaacgacttattgccacagagctaaggccgtttgcagcagtctacccaaagtttatccaaaagcactattctgcattgttatacactgtagactacactgttcgcagagtgaagtttgaatataactatgagatgggtaagctgctggagatagcctaaagatgtcagtataagtatcccagcataaggatgtcagtataagtatcccctgatgtgtcgataggtcaagtaggcgctgcagcctgcagtgagtccatggccaggatgaatagcatgggcaatagttggtctccttgccagactcctgatctaccaaatcctgtctctcaaatttgaagactatactccccaacaaatttgtgtttgatccaactgccctcatcttacagctttgtcatcaggagttcaagtgcagctgtacgttccttggaaggtaccctggtgttcgctttctagttccaacaagcttgcacccatcatatattggtgaatggttggttacacatgccaacaacaactgatcatgtgggcaggttgctctgtgacaggggacaaattagtgtgcggtgtgccatagaagcttgttatattagaaagtacgtttttttgcaggtacaatgtcaggagcctataattgccatatgtcttgtagatcttatggattttttttttgttcttcctgaagtgtcattcatgtccacggattctcaacagcttctctgccaggacatgcagaaaaaactgttcatatcaacagaaacccattacttacacagtcagatagtccgctcttctactgtcttgactgctgatgatgttgtgcttgtgcaagatactgtggatagcagctactcgtctccgatggacatggactggactgtctcaagcttcgaagcccacggaccctatgagcacagaacaggaaccacatgaccgaggctcgggttttctcttttaagctggagctgtggagcatggcagctgctgcacaagatggacggacggacggaccacacaagaatccaatccagccctcgcgtggctgtactgtactgtacgtgcgctgcgcagaaagcactgtacgccgacggactggtcgcttctgctaaggccgccgtcctgccgtctgagcagacgatcattgaaaatggatgccacgtgattggcacaaaggttctgctgtcctcttcctcaagggatagcgatgcaagatccagcaggctggccggagagggagagaccagtctctcctcgagcccaagtacgaaagcgtatcaaaagaagaaaggaacaaggtgggggaaaaaaactaggggggccgtatcatatatctggtgccgaaaaacgcccttggaacggagaaaagcaaggtcgcggtgaagtgtgagcagcctctcctctagtggttctgctgggacgacaccaccagcactgcagtaccactactagttattgagatgttctgcactacttttccaccccgaatccggatggcacccgtaccgtagtgcttcacgcagcagcagtctctacgctacggctgcatgagtgttagctagcagcaaggatgagagatggcagcaacaccaccaagaagagcaagctgtcgtggtccaagagcttggtgaggaagtggttcaacatcaggagcaaggcccacgacttccacgccgacgatgtggccgcgattggtaggacagttgcaggagggggcgatgacgagtggaggaggggcagcagcttcacccgtagggagccgagcacagtgaagaagagcaagacagagaggtcctcgaggaggagcaatgggcactcgaggcggggaaagattgaccttgatgccgccgaagccacagtgacattggactataggatatttgttgctacatggaatgtgggcggccgttccccgccaaataacatgagcctcgaggactggctccacgctgcacctcctgctgacatctatgtcctcgggtttcaagaaattgttccactcaatgccggtaacgtccttgggacagaggacaatgttccagcgaagaggtgggtgtcactggtcaggaggacactgaacaatttgccaggtactagtggcaacgggagcttccggacaccatctccggctcctaaccctgtggtggagatcgacgatgattttgagggtttgtcatcgaagcagaacagtgcaagtttcttccatcgccggtctttccaggctgggcttagtcggagtttgaggatggagggtgacattcttgctcctcagccaaggctggaacgtcggtacagtgtctgtgaccgagcaatctatggccgtaggcctagcgactatgagaacaactaccgatggggtggatcgtcagatgatgagaataatactggagagtcaccgagcactgtgtattcaccagtgtcgtacggttacggcaatgcatcatctctggaagatggtcaaagacggcctggccaaactagatactgtctggtggcaagcaagcaaatggtagggttgtttctgatgatttgggctcggaaggacataagagatgacataagaaatctgaaagtttcttgtgttgggagaggactgatgggctaccttgggaataaggttagtcatagcgtgtctttttttttgtcgtttttcc

SEQ ID NO: 84914 - DNA, 1111 bp, Zea Mays
gcaaactactagcaatagcaagcaaagagaggcagccagcactcccgcgcccccaccaggccagaaggcccgagcgaggccgccgccgctccctcccttcttgagcgcgcggccgtccacatgggccagcgacgacggaacctgtccgccgcggtgctcctcctcgtcctccacctgctgctacttttctccgcccccgggacgtgcacgccggcgagggggagaggcggggtggcgccgacgaagggggaggaggacggctactcctggttctgggccacggcggcgcgccgggcgctggtggggccggggtcgtcaccgcccacgtgccgcagcagctgccggggctgccacccctgccgccccgtccacgtcgccatccagcccggccggagcttcccgctcgagtactacccggaggcctggcgctgcaagtgcggcaacaagctcttcatgccctgacctacaacgccaacgccacctctgcctgctgctgcttcgctcactcactgtcactggtgctctgtccacagcatcatcagtgagtgagagagacctggaaaccatttcttcattgaggccattgcctgtgaatctctatctcatggccagtgcatgtgcatccggttggtacccttcagttcagaaaaatttccccacggagtgaattgaaagctgctggtaccatgcaaacgatgagaaggggggagggcgaataattaacaggaggatacaaatgtaggcatgcattacttgagccctgcttttacagaaagaagctagagaactcccagtcgaaacagaaggaaacaaggctcaaaagctgtccaatgcatacacaatgtcaagcaacagtgagctacttccccggccttctcctcgtctcgtctctgccagtggcactaattttctgctgctctgctcctgctgctgctttactcgcgtcaaatcagcacaagttccctagagacagggtgactgaagaaaatattttcctaatgctttgccgtctggaatggatgcacatcaaattttggtgattagggatccctaggggatccatgggggaggaatcccctcgcaattcaattttgaatagcaagaggatttc

SEQ ID NO: 84915 - DNA, 1980 bp, Zea Mays
gaaggctggcctgtttgtacatctccgcatcggtccctacatttgtggcgagtggaacttcggcggcttcccagtttggttgaagtatgtaccgggcatcagcttcaggacagacaacgaacctttcaagacggccatgcagggtttcactgagaaaattgtgggaatgatgaagagcgaaaacctctttgcatcccaaggtggcccaattatcctctctcaggcaagtataatcttttccttagatttgattgagaatgagtatgggccagaaggcagggagtttggtgccgcaggtcaggcatatatcaactgggcagcaaagatggcagtcggattgggtactggtgtgccgtgggtgatgtgcaaggaggaggatgcacctgatccagtgatcaatgcatgcaatggtttctactgtgatgcattttctcctaacaaaccttacaagcccacaatgtggactgaagcttggagtggctggttcacggaatttggtgggaccatccgccaacgaccggttgaagatcttgcatttgctgttgctagatttgtacaaaagggtggttcttttatcaattactacatgtatcatggaggaacaaattttgggcgcactgctgggggtcccttcatcacaacaagctatgattatgatgctccaattgatgaatatggttggtgttcagacatctcagatgcaaatgtggggagatggtgcctcatcaatgacgtgggagaggtatgatgaggaggttgattctctggcagctgctccattgctcaccacaactggtttgcttgagcagcttaatgtcacgagagacagcagtgattatttgtggtacatcaccagtgttgacataagctcatctgaaaactttctacaaggtggcggcaagcctctgtctctcagtgtgcagtctgctggtcatgccttgcatgtctttgtcaatggacaacttcaaggttctgcttatggtaccagggaagatcgaagaatcaaatataatggcaatgctagccttcgagctggtactaacaaaattgcactgctgagtgttgcctgtggattgccgaatgttggagtgcattatgagacgtggaacactggtgttggtggtcctgttgtgcttcatgggctggatgaaggttcacgagaccttacttggcagacttggtcctatcaggttggcctgaaaggcgaacagatgaatctgaactccatagaaggctcaagctcagttgaatggatgcaagggtcattgatagctcaaaaccagcagccattggcctggtatagggcttactttgagactcccagcggggacgagccattggctttggatatgggtagcatgggcaagggccaaatctggataaatggacaaagcattggacgctactggacagcatatgcagatggggactgcaaagaatgcagttacacgggaaccttccgggcacccaaatgtcaatcaggctgtggtcagcccacgcaacgatggtatcatgtgccaaagtcctggctgcagcccaccagaaacctgctggtagtcttcgaggaacttggtggggattcatcgaagatcgccctagtgaagaggtcagtctcaagtgtctgtgctgatgtatctgaggatcacccaaacatcaagaactggcagatcgaaagctacggcgagcgcgagtaccacagggcccaaagtgcacttaagatgtgcacgtgggcagtccatttccgcaatcaaattcgcaagctttgggacacctacgggaacctgtggagatttccagcaaggagattgccactcagctaactctcacacagtcctagagaagaaatgcattgggctccaaagatgcgtcgtcgccatctcccccgagagctttggaggagacccctgcccgagcgtgacgaaaagggtggcggtccaggcagtatgttctcccgtcgcgtagccttacttctccaagcaa

SEQ ID NO: 84916 - DNA, 2254 bp, Zea Mays
gtccagaaggctggcctgtttgtacatctccgcatcggtccctacatttgtggcgagtggaacttcggcggcttcccagtttggttgaagtatgtaccgggcatcagcttcaggacagacaacgaacctttcaagggtttcactgagaaaattgtgggaatgatgaagagcgaaaacctctttgcatcccaaggtggcccaattatcctctctcaggcaagtataatcttttccttagatttgattgagaatgagtatgggccagaaggcagggagtttggtgccgcaggtcaggcatatatcaactgggcagcaaagatggcagtcggattgggtactggtgtgccgtgggtgatgtgcaaggaggaggatgcacctgatccagtgatcaatgcatgcaatggtttctactgtgatgcattttctcctaacaaaccttacaagcccacaatgtggactgaagcttggagtggctggttcacggaatttggtgggaccatccgccaacgaccggttgaagatcttgcatttgctgttgctagatttgtacaaaagggtggttcttttatcaattactacatgtatcatggaggaacaaattttgggcgcactgctgggggtcccttcatcacaacaagctatgattatgatgctccaattgatgaatatggacttgttagagaaccaaagcacagtcatcttaaagaactccacagagctgttaagttatgcgagcaggctttggtttctgttgacccagcaattactacccttggtaccatgcaagaggcccgcgtcttccaatctccatctggttgtgcagctttccttgcaaactacaattctaactcctatgcgaaagttgtgttcaacaatgagcaatacagcctaccaccttggtcgattagcatccttcctgattgcaaaaatgttgtttttaacagtgccacagttggtgttcagacatctcagatgcaaatgtggggagatggtgcctcatcaatgacgtgggagaggtatgatgaggaggttgattctctggcagctgctccattgctcaccacaactggtttgcttgagcagcttaatgtcacgagagacagcagtgattatttgtggtacatcaccagtgttgacataagctcatctgaaaactttctacaaggtggcggcaagcctctgtctctcagtgtgcagtctgctggtcatgccttgcatgtctttgtcaatggacaacttcaaggttctgcttatggtaccagggaagatcgaagaatcaaatataatggcaatgctagccttcgagctggtactaacaaaattgcactgctgagtgttgcctgtggattgccgaatgttggagtgcattatgagacgtggaacactggtgttggtggtcctgttgtgcttcatgggctggatgaaggttcacgagaccttacttggcagacttggtcctatcaggttggcctgaaaggcgaacagatgaatctgaactccatagaaggctcaagctcagttgaatggatgcaagggtcattgatagctcaaaaccagcagccattggcctggtatagggcttactttgagactcccagcggggacgagccattggctttggatatgggtagcatgggcaagggccaaatctggataaatggacaaagcattggacgctactggacagcatatgcagatggggactgcaaagaatgcagttacacgggaaccttccgggcacccaaatgtcaatcaggctgtggtcagcccacgcaacgatggtatcatgtgccaaagtcctggctgcagcccaccagaaacctgctggtagtcttcgaggaacttggtggggattcatcgaagatcgccctagtgaagaggtcagtctcaagtgtctgtgctgatgtatctgaggatcacccaaacatcaagaactggcagatcgaaagctacggcgagcgcgagtaccacagggcccaaagtgcacttaagatgtgcacgtgggcagtccatttccgcaatcaaattcgcaagctttgggacacctacgggaacctgtggagatttccagcaaggagattgccactcagctaactctcacacagtcctagagaagaaatgcattgggctccaaagatgcgtcgtcgccatctcccccgagagctttggaggagacccctgcccgagcgtgacgaaaagggtggcggtccaggcagtatgttctcccgtcgcgtagccttacttctccaagcaa

SEQ ID NO: 84917 - DNA, 2231 bp, Zea Mays
gtccagaaggctggcctgtttgtacatctccgcatcggtccctacatttgtggcgagtggaacttcggcggcttcccagtttggttgaagtatgtaccgggcatcagcttcaggacagacaacgaacctttcaagacggccatgcagggtttcactgagaaaattgtgggaatgatgaagagcgaaaacctctttgcatcccaaggtggcccaattatcctctctcaggcaagtataatcttttccttagatttgattgagaatgagtatgggccagaaggcagggagtttggtgccgcaggtcaggcatatatcaactgggcagcaaagatggcagtcggattgggtactggtgtgccgtgggtgatgtgcaaggaggaggatgcacctgatccagtgatcaatgcatgcaatggtttctactgtgatgcattttctcctaacaaaccttacaagcccacaatgtggactgaagcttggagtggctggttcacggaatttggtgggaccatccgccaacgaccggttgaagatcttgcatttgctgttgctagatttgtacaaaagggtggttcttttatcaattactacatgtatcatggaggaacaaattttgggcgcactgctgggggtcccttcatcacaacaagctatgattatgatgctccaattgatgaatatggacttgttagagaaccaaagcacagtcatcttaaagaactccacagagctgttaagttatgcgagcaggctttggtttctgttgacccagcaattactacccttggtaccatgcaagaggcccgcgtcttccaatctccatctggttgtgcagctttccttgcaaactacaattctaactcctatgcgaaagttgtgttcaacaatgagcaatacagcctaccaccttggtcgattagcatccttcctgattgcaaaaatgttgtttttaacagtgccacagttggtgttcagacatctcagatgcaaatgtggggagatggtgcctcatcaatgacgtgggagaggtatgatgaggaggttgattctctggcagctgctccattgctcaccacaactggtttgcttgagcagcttaatgtcacgagagacagcagtgattatttgtggtacatcaccaggtggcggcaagcctctgtctctcagtgtgcagtctgctggtcatgccttgcatgtctttgtcaatggacaacttcaaggttctgcttatggtaccagggaagatcgaagaatcaaatataatggcaatgctagccttcgagctggtactaacaaaattgcactgctgagtgttgcctgtggattgccgaatgttggagtgcattatgagacgtggaacactggtgttggtggtcctgttgtgcttcatgggctggatgaaggttcacgagaccttacttggcagacttggtcctatcaggttggcctgaaaggcgaacagatgaatctgaactccatagaaggctcaagctcagttgaatggatgcaagggtcattgatagctcaaaaccagcagccattggcctggtatagggcttactttgagactcccagcggggacgagccattggctttggatatgggtagcatgggcaagggccaaatctggataaatggacaaagcattggacgctactggacagcatatgcagatggggactgcaaagaatgcagttacacgggaaccttccgggcacccaaatgtcaatcaggctgtggtcagcccacgcaacgatggtatcatgtgccaaagtcctggctgcagcccaccagaaacctgctggtagtcttcgaggaacttggtggggattcatcgaagatcgccctagtgaagaggtcagtctcaagtgtctgtgctgatgtatctgaggatcacccaaacatcaagaactggcagatcgaaagctacggcgagcgcgagtaccacagggcccaaagtgcacttaagatgtgcacgtgggcagtccatttccgcaatcaaattcgcaagctttgggacacctacgggaacctgtggagatttccagcaaggagattgccactcagctaactctcacacagtcctagagaagaaatgcattgggctccaaagatgcgtcgtcgccatctcccccgagagctttggaggagacccctgcccgagcgtgacgaaaagggtggcggtccaggcagtatgttctcccgtcgcgtagccttacttctccaagcaa

SEQ ID NO: 84918 - DNA, 2003 bp, Zea Mays
ggtccagaaggctggcctgtttgtacatctccgcatcggtccctacatttgtggcgagtggaacttcggcggcttcccagtttggttgaagtatgtaccgggcatcagcttcaggacagacaacgaacctttcaagatcaatgcatgcaatggtttctactgtgatgcattttctcctaacaaaccttacaagcccacaatgtggactgaagcttggagtggctggttcacggaatttggtgggaccatccgccaacgaccggttgaagatcttgcatttgctgttgctagatttgtacaaaagggtggttcttttatcaattactacatgtatcatggaggaacaaattttgggcgcactgctgggggtcccttcatcacaacaagctatgattatgatgctccaattgatgaatatggacttgttagagaaccaaagcacagtcatcttaaagaactccacagagctgttaagttatgcgagcaggctttggtttctgttgacccagcaattactacccttggtaccatgcaagaggcccgcgtcttccaatctccatctggttgtgcagctttccttgcaaactacaattctaactcctatgcgaaagttgtgttcaacaatgagcaatacagcctaccaccttggtcgattagcatccttcctgattgcaaaaatgttgtttttaacagtgccacagttggtgttcagacatctcagatgcaaatgtggggagatggtgcctcatcaatgacgtgggagaggtatgatgaggaggttgattctctggcagctgctccattgctcaccacaactggtttgcttgagcagcttaatgtcacgagagacagcagtgattatttgtggtacatcaccagtgttgacataagctcatctgaaaactttctacaaggtggcggcaagcctctgtctctcagtgtgcagtctgctggtcatgccttgcatgtctttgtcaatggacaacttcaaggttctgcttatggtaccagggaagatcgaagaatcaaatataatggcaatgctagccttcgagctggtactaacaaaattgcactgctgagtgttgcctgtggattgccgaatgttggagtgcattatgagacgtggaacactggtgttggtggtcctgttgtgcttcatgggctggatgaaggttcacgagaccttacttggcagacttggtcctatcaggttggcctgaaaggcgaacagatgaatctgaactccatagaaggctcaagctcagttgaatggatgcaagggtcattgatagctcaaaaccagcagccattggcctggtatagggcttactttgagactcccagcggggacgagccattggctttggatatgggtagcatgggcaagggccaaatctggataaatggacaaagcattggacgctactggacagcatatgcagatggggactgcaaagaatgcagttacacgggaaccttccgggcacccaaatgtcaatcaggctgtggtcagcccacgcaacgatggtatcatgtgccaaagtcctggctgcagcccaccagaaacctgctggtagtcttcgaggaacttggtggggattcatcgaagatcgccctagtgaagaggtcagtctcaagtgtctgtgctgatgtatctgaggatcacccaaacatcaagaactggcagatcgaaagctacggcgagcgcgagtaccacagggcccaaagtgcacttaagatgtgcacgtgggcagtccatttccgcaatcaaattcgcaagctttgggacacctacgggaacctgtggagatttccagcaaggagattgccactcagctaactctcacacagtcctagagaagaaatgcattgggctccaaagatgcgtcgtcgccatctcccccgagagctttggaggagacccctgcccgagcgtgacgaaaagggtggcggtccaggcagtatgttctcccgtcgcgtagccttacttctccaagcaa

SEQ ID NO: 84919 - DNA, 2439 bp, Zea Mays
aaattgttttagccgcccctctttcttccacgatgtgggaagggctgattcagaaagctaaagacggaggcttggatgtcattcagacctatgtcttttggaacggacatgagcctacgcctggaaattactatttcgaggagaggtacgatttagtcaggttcataaagacggtccagaaggctggcctgtttgtacatctccgcatcggtccctacatttgtggcgagtggaacttcggcggcttcccagtttggttgaagtatgtaccgggcatcagcttcaggacagacaacgaacctttcaagacggccatgcagggtttcactgagaaaattgtgggaatgatgaagagcgaaaacctctttgcatcccaaggtggcccaattatcctctctcaggcaagtataatcttttccttagatttgattgagaatgagtatgggccagaaggcagggagtttggtgccgcaggtcaggcatatatcaactgggcagcaaagatggcagtcggattgggtactggtgtgccgtgggtgatgtgcaaggaggaggatgcacctgatccagtgatcaatgcatgcaatggtttctactgtgatgcattttctcctaacaaaccttacaagcccacaatgtggactgaagcttggagtggctggttcacggaatttggtgggaccatccgccaacgaccggttgaagatcttgcatttgctgttgctagatttgtacaaaagggtggttcttttatcaattactacatgtatcatggaggaacaaattttgggcgcactgctgggggtcccttcatcacaacaagctatgattatgatgctccaattgatgaatatggacttgttagagaaccaaagcacagtcatcttaaagaactccacagagctgttaagttatgcgagcaggctttggtttctgttgacccagcaattactacccttggtaccatgcaagaggcccgcgtcttccaatctccatctggttgtgcagctttccttgcaaactacaattctaactcctatgcgaaagttgtgttcaacaatgagcaatacagcctaccaccttggtcgattagcatccttcctgattgcaaaaatgttgtttttaacagtgccacagttggtgttcagacatctcagatgcaaatgtggggagatggtgcctcatcaatgacgtgggagaggtatgatgaggaggttgattctctggcagctgctccattgctcaccacaactggtttgcttgagcagcttaatgtcacgagagacagcagtgattatttgtggtacatcaccagtgttgacataagctcatctgaaaactttctacaaggtggcggcaagcctctgtctctcagtgtgcagtctgctggtcatgccttgcatgtctttgtcaatggacaacttcaaggttctgcttatggtaccagggaagatcgaagaatcaaatataatggcaatgctagccttcgagctggtactaacaaaattgcactgctgagtgttgcctgtggattgccgaatgttggagtgcattatgagacgtggaacactggtgttggtggtcctgttgtgcttcatgggctggatgaaggttcacgagaccttacttggcagacttggtcctatcaggttggcctgaaaggcgaacagatgaatctgaactccatagaaggctcaagctcagttgaatggatgcaagggtcattgatagctcaaaaccagcagccattggcctggtatagggcttactttgagactcccagcggggacgagccattggctttggatatgggtagcatgggcaagggccaaatctggataaatggacaaagcattggacgctactggacagcatatgcagatggggactgcaaagaatgcagttacacgggaaccttccgggcacccaaatgtcaatcaggctgtggtcagcccacgcaacgatggtatcatgtgccaaagtcctggctgcagcccaccagaaacctgctggtagtcttcgaggaacttggtggggattcatcgaagatcgccctagtgaagaggtcagtctcaagtgtctgtgctgatgtatctgaggatcacccaaacatcaagaactggcagatcgaaagctacggcgagcgcgagtaccacagggcccaaagtgcacttaagatgtgcacgtgggcagtccatttccgcaatcaaattcgcaagctttgggacacctacgggaacctgtggagatttccagcaaggagattgccactcagctaactctcacacagtcctagagaagaaatgcattgggctccaaagatgcgtcgtcgccatctcccccgagagctttggaggagacccctgcccgagcgtgacgaaaagggtggcggtccaggcagtatgttctcccgtcgcgtagccttacttctccaagcaa

SEQ ID NO: 84920 - DNA, 2335 bp, Zea Mays
atgcaatgctctcaaaagcaaattgttttagccgcccctctttcttccacgatgtgggaagggctgattcagaaagctaaagacggaggcttggatgtcattcagacctatgtcttttggaacggacatgagcctacgcctggaaattactatttcgaggagagcggcttcccagtttggttgaagtatgtaccgggcatcagcttcaggacagacaacgaacctttcaagacggccatgcagggtttcactgagaaaattgtgggaatgatgaagagcgaaaacctctttgcatcccaaggtggcccaattatcctctctcagattgagaatgagtatgggccagaaggcagggagtttggtgccgcaggtcaggcatatatcaactgggcagcaaagatggcagtcggattgggtactggtgtgccgtgggtgatgtgcaaggaggaggatgcacctgatccagtgatcaatgcatgcaatggtttctactgtgatgcattttctcctaacaaaccttacaagcccacaatgtggactgaagcttggagtggctggttcacggaatttggtgggaccatccgccaacgaccggttgaagatcttgcatttgctgttgctagatttgtacaaaagggtggttcttttatcaattactacatgtatcatggaggaacaaattttgggcgcactgctgggggtcccttcatcacaacaagctatgattatgatgctccaattgatgaatatggacttgttagagaaccaaagcacagtcatcttaaagaactccacagagctgttaagttatgcgagcaggctttggtttctgttgacccagcaattactacccttggtaccatgcaagaggcccgcgtcttccaatctccatctggttgtgcagctttccttgcaaactacaattctaactcctatgcgaaagttgtgttcaacaatgagcaatacagcctaccaccttggtcgattagcatccttcctgattgcaaaaatgttgtttttaacagtgccacagttggtgttcagacatctcagatgcaaatgtggggagatggtgcctcatcaatgacgtgggagaggtatgatgaggaggttgattctctggcagctgctccattgctcaccacaactggtttgcttgagcagcttaatgtcacgagagacagcagtgattatttgtggtacatcaccagtgttgacataagctcatctgaaaactttctacaaggtggcggcaagcctctgtctctcagtgtgcagtctgctggtcatgccttgcatgtctttgtcaatggacaacttcaaggttctgcttatggtaccagggaagatcgaagaatcaaatataatggcaatgctagccttcgagctggtactaacaaaattgcactgctgagtgttgcctgtggattgccgaatgttggagtgcattatgagacgtggaacactggtgttggtggtcctgttgtgcttcatgggctggatgaaggttcacgagaccttacttggcagacttggtcctatcaggttggcctgaaaggcgaacagatgaatctgaactccatagaaggctcaagctcagttgaatggatgcaagggtcattgatagctcaaaaccagcagccattggcctggtatagggcttactttgagactcccagcggggacgagccattggctttggatatgggtagcatgggcaagggccaaatctggataaatggacaaagcattggacgctactggacagcatatgcagatggggactgcaaagaatgcagttacacgggaaccttccgggcacccaaatgtcaatcaggctgtggtcagcccacgcaacgatggtatcatgtgccaaagtcctggctgcagcccaccagaaacctgctggtagtcttcgaggaacttggtggggattcatcgaagatcgccctagtgaagaggtcagtctcaagtgtctgtgctgatgtatctgaggatcacccaaacatcaagaactggcagatcgaaagctacggcgagcgcgagtaccacagggcccaaagtgcacttaagatgtgcacgtgggcagtccatttccgcaatcaaattcgcaagctttgggacacctacgggaacctgtggagatttccagcaaggagattgccactcagctaactctcacacagtcctagagaagaaatgcattgggctccaaagatgcgtcgtcgccatctcccccgagagctttggaggagacccctgcccgagcgtgacgaaaagggtggcggtccaggcagtatgttctcccgtcgcgtagccttacttctccaagcaa

SEQ ID NO: 84921 - DNA, 3021 bp, Zea Mays
ctcttttccaagcccactcttttttctcctctccacttcgttacgcggacagtgggaggagccacagccattataatagcacgccatacgccaaaagctccactggagccgagcagctactcctcccagtcccaggctcactgtcgctcctcccaagaacccgcccaaagaatcctagaaatccaagaaagggagcaaccaaaacaggaggaggtctgcaggaggaggagcaggtcagcaggaggaggtggtgctgaaggggaagatctcacaagtgtgtgaagaccacacagtctcgcgcactcgcaaacccagtgcgcgctgcggtcttcctcttcgcccaccttcttggagcggggaggttggccatgaggaggtggtggccggctgccctgctgggctgcgcagtggcggtgtccgttctggtggccgccgtggaatgcgctgtgacttacgacaagaaggcggtgctgattgatgggcagaggcggattctcttctccggatccatacactaccccaggagcacccctgatgtaactgcattctacaaaatctcttctccccccactattccctggagaggtttatggctgcgaatctatggatctgaaatgtgggaagggctgattcagaaagctaaagacggaggcttggatgtcattcagacctatgtcttttggaacggacatgagcctacgcctggaaattactatttcgaggagaggtacgatttagtcaggttcataaagacggtccagaaggctggcctgtttgtacatctccgcatcggtccctacatttgtggcgagtggaacttcggcggcttcccagtttggttgaagtatgtaccgggcatcagcttcaggacagacaacgaacctttcaagacggccatgcagggtttcactgagaaaattgtgggaatgatgaagagcgaaaacctctttgcatcccaaggtggcccaattatcctctctcaggcaagtataatcttttccttagatttgattgagaatgagtatgggccagaaggcagggagtttggtgccgcaggtcaggcatatatcaactgggcagcaaagatggcagtcggattgggtactggtgtgccgtgggtgatgtgcaaggaggaggatgcacctgatccagtgatcaatgcatgcaatggtttctactgtgatgcattttctcctaacaaaccttacaagcccacaatgtggactgaagcttggagtggctggttcacggaatttggtgggaccatccgccaacgaccggttgaagatcttgcatttgctgttgctagatttgtacaaaagggtggttcttttatcaattactacatgtatcatggaggaacaaattttgggcgcactgctgggggtcccttcatcacaacaagctatgattatgatgctccaattgatgaatatggacttgttagagaaccaaagcacagtcatcttaaagaactccacagagctgttaagttatgcgagcaggctttggtttctgttgacccagcaattactacccttggtaccatgcaagaggcccgcgtcttccaatctccatctggttgtgcagctttccttgcaaactacaattctaactcctatgcgaaagttgtgttcaacaatgagcaatacagcctaccaccttggtcgattagcatccttcctgattgcaaaaatgttgtttttaacagtgccacagttggtgttcagacatctcagatgcaaatgtggggagatggtgcctcatcaatgacgtgggagaggtatgatgaggaggttgattctctggcagctgctccattgctcaccacaactggtttgcttgagcagcttaatgtcacgagagacagcagtgattatttgtggtacatcaccagtgttgacataagctcatctgaaaactttctacaaggtggcggcaagcctctgtctctcagtgtgcagtctgctggtcatgccttgcatgtctttgtcaatggacaacttcaaggttctgcttatggtaccagggaagatcgaagaatcaaatataatggcaatgctagccttcgagctggtactaacaaaattgcactgctgagtgttgcctgtggattgccgaatgttggagtgcattatgagacgtggaacactggtgttggtggtcctgttgtgcttcatgggctggatgaaggttcacgagaccttacttggcagacttggtcctatcaggttggcctgaaaggcgaacagatgaatctgaactccatagaaggctcaagctcagttgaatggatgcaagggtcattgatagctcaaaaccagcagccattggcctggtatagggcttactttgagactcccagcggggacgagccattggctttggatatgggtagcatgggcaagggccaaatctggataaatggacaaagcattggacgctactggacagcatatgcagatggggactgcaaagaatgcagttacacgggaaccttccgggcacccaaatgtcaatcaggctgtggtcagcccacgcaacgatggtatcatgtgccaaagtcctggctgcagcccaccagaaacctgctggtagtcttcgaggaacttggtggggattcatcgaagatcgccctagtgaagaggtcagtctcaagtgtctgtgctgatgtatctgaggatcacccaaacatcaagaactggcagatcgaaagctacggcgagcgcgagtaccacagggcccaaagtgcacttaagatgtgcacgtgggcagtccatttccgcaatcaaattcgcaagctttgggacacctacgggaacctgtggagatttccagcaaggagattgccactcagctaactctcacacagtcctagagaagaaatgcattgggctccaaagatgcgtcgtcgccatctcccccgagagctttggaggagacccctgcccgagcgtgacgaaaagggtggcggtccaggcagtatgttctcccgtcgcgtagccttacttctccaagcaa

SEQ ID NO: 84922 - DNA, 2931 bp, Zea Mays
ctcttttccaagcccactcttttttctcctctccacttcgttacgcggacagtgggaggagccacagccattataatagcacgccatacgccaaaagctccactggagccgagcagctactcctcccagtcccaggctcactgtcgctcctcccaagaacccgcccaaagaatcctagaaatccaagaaagggagcaaccaaaacaggaggaggtctgcaggaggaggagcaggtcagcaggaggaggtggtgctgaaggggaagatctcacaagtgtgtgaagaccacacagtctcgcgcactcgcaaacccagtgcgcgctgcggtcttcctcttcgcccaccttcttggagcggggaggttggccatgaggaggtggtggccggctgccctgctgggctgcgcagtggcggtgtccgttctggtggccgccgtggaatgcgctgtgacttacgacaagaaggcggtgctgattgatgggcagaggcggattctcttctccggatccatacactaccccaggagcacccctgatgtaactgcattctacaaaatctcttctccccccactattccctggagaggtttatggctgcgaatctatggatctgaaatgtgggaagggctgattcagaaagctaaagacggaggcttggatgtcattcagacctatgtcttttggaacggacatgagcctacgcctggaaatgattcggatggtattttttttcgcttcgagcagtactatttcgaggagagcggcttcccagtttggttgaagtatgtaccgggcatcagcttcaggacagacaacgaacctttcaagacggccatgcagggtttcactgagaaaattgtgggaatgatgaagagcgaaaacctctttgcatcccaaggtggcccaattatcctctctcagattgagaatgagtatgggccagaaggcagggagtttggtgccgcaggtcaggcatatatcaactgggcagcaaagatggcagtcggattgggtactggtgtgccgtgggtgatgtgcaaggaggaggatgcacctgatccagtgatcaatgcatgcaatggtttctactgtgatgcattttctcctaacaaaccttacaagcccacaatgtggactgaagcttggagtggctggttcacggaatttggtgggaccatccgccaacgaccggttgaagatcttgcatttgctgttgctagatttgtacaaaagggtggttcttttatcaattactacatgtatcatggaggaacaaattttgggcgcactgctgggggtcccttcatcacaacaagctatgattatgatgctccaattgatgaatatggacttgttagagaaccaaagcacagtcatcttaaagaactccacagagctgttaagttatgcgagcaggctttggtttctgttgacccagcaattactacccttggtaccatgcaagaggcccgcgtcttccaatctccatctggttgtgcagctttccttgcaaactacaattctaactcctatgcgaaagttgtgttcaacaatgagcaatacagcctaccaccttggtcgattagcatccttcctgattgcaaaaatgttgtttttaacagtgccacagttggtgttcagacatctcagatgcaaatgtggggagatggtgcctcatcaatgacgtgggagaggtatgatgaggaggttgattctctggcagctgctccattgctcaccacaactggtttgcttgagcagcttaatgtcacgagagacagcagtgattatttgtggtacatcaccagtgttgacataagctcatctgaaaactttctacaaggtggcggcaagcctctgtctctcagtgtgcagtctgctggtcatgccttgcatgtctttgtcaatggacaacttcaaggttctgcttatggtaccagggaagatcgaagaatcaaatataatggcaatgctagccttcgagctggtactaacaaaattgcactgctgagtgttgcctgtggattgccgaatgttggagtgcattatgagacgtggaacactggtgttggtggtcctgttgtgcttcatgggctggatgaaggttcacgagaccttacttggcagacttggtcctatcaggttggcctgaaaggcgaacagatgaatctgaactccatagaaggctcaagctcagttgaatggatgcaagggtcattgatagctcaaaaccagcagccattggcctggtatagggcttactttgagactcccagcggggacgagccattggctttggatatgggtagcatgggcaagggccaaatctggataaatggacaaagcattggacgctactggacagcatatgcagatggggactgcaaagaatgcagttacacgggaaccttccgggcacccaaatgtcaatcaggctgtggtcagcccacgcaacgatggtatcatgtgccaaagtcctggctgcagcccaccagaaacctgctggtagtcttcgaggaacttggtggggattcatcgaagatcgccctagtgaagaggtcagtctcaagtgtctgtgctgatgtatctgaggatcacccaaacatcaagaactggcagatcgaaagctacggcgagcgcgagtaccacagggcccaaagtgcacttaagatgtgcacgtgggcagtccatttccgcaatcaaattcgcaagctttgggacacctacgggaacctgtggagatttccagcaaggagattgccactcagctaactctcacacagtcctagagaagaaatgcattgggctccaaagatgcgtcgtcgccatctcccccgagagctttggaggagacccctgcccgagcgtgacgaaaagggtggcggtccaggcagtatgttctcccgtcgcgtagccttacttctccaagcaa

SEQ ID NO: 84923 - DNA, 2897 bp, Zea Mays
ctcttttccaagcccactcttttttctcctctccacttcgttacgcggacagtgggaggagccacagccattataatagcacgccatacgccaaaagctccactggagccgagcagctactcctcccagtcccaggctcactgtcgctcctcccaagaacccgcccaaagaatcctagaaatccaagaaagggagcaaccaaaacaggaggaggtctgcaggaggaggagcaggtcagcaggaggaggtggtgctgaaggggaagatctcacaagtgtgtgaagaccacacagtctcgcgcactcgcaaacccagtgcgcgctgcggtcttcctcttcgcccaccttcttggagcggggaggttggccatgaggaggtggtggccggctgccctgctgggctgcgcagtggcggtgtccgttctggtggccgccgtggaatgcgctgtgacttacgacaagaaggcggtgctgattgatgggcagaggcggattctcttctccggatccatacactaccccaggagcacccctgatatgtgggaagggctgattcagaaagctaaagacggaggcttggatgtcattcagacctatgtcttttggaacggacatgagcctacgcctggaaattactatttcgaggagaggtacgatttagtcaggttcataaagacggtccagaaggctggcctgtttgtacatctccgcatcggtccctacatttgtggcgagtggaacttcggtttggttgaagtatgtaccgggcatcagcttcaggacagacaacgaacctttcaagacggccatgcagggtttcactgagaaaattgtgggaatgatgaagagcgaaaacctctttgcatcccaaggtggcccaattatcctctctcaggcaagtataatcttttccttagatttgattgagaatgagtatgggccagaaggcagggagtttggtgccgcaggtcaggcatatatcaactgggcagcaaagatggcagtcggattgggtactggtgtgccgtgggtgatgtgcaaggaggaggatgcacctgatccagtgatcaatgcatgcaatggtttctactgtgatgcattttctcctaacaaaccttacaagcccacaatgtggactgaagcttggagtggctggttcacggaatttggtgggaccatccgccaacgaccggttgaagatcttgcatttgctgttgctagatttgtacaaaagggtggttcttttatcaattactacatgtatcatggaggaacaaattttgggcgcactgctgggggtcccttcatcacaacaagctatgattatgatgctccaattgatgaatatggacttgttagagaaccaaagcacagtcatcttaaagaactccacagagctgttaagttatgcgagcaggctttggtttctgttgacccagcaattactacccttggtaccatgcaagaggcccgcgtcttccaatctccatctggttgtgcagctttccttgcaaactacaattctaactcctatgcgaaagttgtgttcaacaatgagcaatacagcctaccaccttggtcgattagcatccttcctgattgcaaaaatgttgtttttaacagtgccacagttggtgttcagacatctcagatgcaaatgtggggagatggtgcctcatcaatgacgtgggagaggtatgatgaggaggttgattctctggcagctgctccattgctcaccacaactggtttgcttgagcagcttaatgtcacgagagacagcagtgattatttgtggtacatcaccaggtggcggcaagcctctgtctctcagtgtgcagtctgctggtcatgccttgcatgtctttgtcaatggacaacttcaaggttctgcttatggtaccagggaagatcgaagaatcaaatataatggcaatgctagccttcgagctggtactaacaaaattgcactgctgagtgttgcctgtggattgccgaatgttggagtgcattatgagacgtggaacactggtgttggtggtcctgttgtgcttcatgggctggatgaaggttcacgagaccttacttggcagacttggtcctatcaggttggcctgaaaggcgaacagatgaatctgaactccatagaaggctcaagctcagttgaatggatgcaagggtcattgatagctcaaaaccagcagccattggcctggtatagggcttactttgagactcccagcggggacgagccattggctttggatatgggtagcatgggcaagggccaaatctggataaatggacaaagcattggacgctactggacagcatatgcagatggggactgcaaagaatgcagttacacgggaaccttccgggcacccaaatgtcaatcaggctgtggtcagcccacgcaacgatggtatcatgtgccaaagtcctggctgcagcccaccagaaacctgctggtagtcttcgaggaacttggtggggattcatcgaagatcgccctagtgaagaggtcagtctcaagtgtctgtgctgatgtatctgaggatcacccaaacatcaagaactggcagatcgaaagctacggcgagcgcgagtaccacagggcccaaagtgcacttaagatgtgcacgtgggcagtccatttccgcaatcaaattcgcaagctttgggacacctacgggaacctgtggagatttccagcaaggagattgccactcagctaactctcacacagtcctagagaagaaatgcattgggctccaaagatgcgtcgtcgccatctcccccgagagctttggaggagacccctgcccgagcgtgacgaaaagggtggcggtccaggcagtatgttctcccgtcgcgtagccttacttctccaagcaa

SEQ ID NO: 84924 - DNA, 2476 bp, Zea Mays
ctcttttccaagcccactcttttttctcctctccacttcgttacgcggacagtgggaggagccacagccattataatagcacgccatacgccaaaagctccactggagccgagcagctactcctcccagtcccaggctcactgtcgctcctcccaagaacccgcccaaagaatcctagaaatccaagaaagggagcaaccaaaacaggaggaggtctgcaggaggaggagcaggtcagcaggaggaggtggtgctgaaggggaagatctcacaagtgtgtgaagaccacacagtctcgcgcactcgcaaacccagtgcgcgctgcggtcttcctcttcgcccaccttcttggagcggggaggttggccatgaggaggtggtggccggctgccctgctgggctgcgcagtggcggtgtccgttctggtggccgccgtggaatgcgctgtgacttacgacaagaaggcggtgctgattgatgggcagaggcggattctcttctccggatccatacactaccccaggagcacccctgatgtaactgcattctacaaaatctcttctccccccactattccctggagaggtttatggctgcgaatctatggatctgaaatgtgggaagggctgattcagaaagctaaagacggaggcttggatgtcattcagacctatgtcttttggaacggacatgagcctacgcctggaaattactatttcgaggagaggtacgatttagtcaggttcataaagacggtccagaaggctggcctgtttgtacatctccgcatcggtccctacatttgtggcgagtggaacttcggcggcttcccagtttggttgaagtatgtaccgggcatcagcttcaggacagacaacgaacctttcaagatcaatgcatgcaatggtttctactgtgatgcattttctcctaacaaaccttacaagcccacaatgtggactgaagcttggagtggctggttcacggaatttggtgggaccatccgccaacgaccggttgaagatcttgcatttgctgttgctagatttgtacaaaagggtggttcttttatcaattactacatgtatcatggaggaacaaattttgggcgcactgctgggggtcccttcatcacaacaagctatgattatgatgctccaattgatgaatatggttggtgttcagacatctcagatgcaaatgtggggagatggtgcctcatcaatgacgtgggagaggtatgatgaggaggttgattctctggcagctgctccattgctcaccacaactggtttgcttgagcagcttaatgtcacgagagacagcagtgattatttgtggtacatcaccagtgttgacataagctcatctgaaaactttctacaaggtggcggcaagcctctgtctctcagtgtgcagtctgctggtcatgccttgcatgtctttgtcaatggacaacttcaaggttctgcttatggtaccagggaagatcgaagaatcaaatataatggcaatgctagccttcgagctggtactaacaaaattgcactgctgagtgttgcctgtggattgccgaatgttggagtgcattatgagacgtggaacactggtgttggtggtcctgttgtgcttcatgggctggatgaaggttcacgagaccttacttggcagacttggtcctatcaggttggcctgaaaggcgaacagatgaatctgaactccatagaaggctcaagctcagttgaatggatgcaagggtcattgatagctcaaaaccagcagccattggcctggtatagggcttactttgagactcccagcggggacgagccattggctttggatatgggtagcatgggcaagggccaaatctggataaatggacaaagcattggacgctactggacagcatatgcagatggggactgcaaagaatgcagttacacgggaaccttccgggcacccaaatgtcaatcaggctgtggtcagcccacgcaacgatggtatcatgtgccaaagtcctggctgcagcccaccagaaacctgctggtagtcttcgaggaacttggtggggattcatcgaagatcgccctagtgaagaggtcagtctcaagtgtctgtgctgatgtatctgaggatcacccaaacatcaagaactggcagatcgaaagctacggcgagcgcgagtaccacagggcccaaagtgcacttaagatgtgcacgtgggcagtccatttccgcaatcaaattcgcaagctttgggacacctacgggaacctgtggagatttccagcaaggagattgccactcagctaactctcacacagtcctagagaagaaatgcattgggctccaaagatgcgtcgtcgccatctcccccgagagctttggaggagacccctgcccgagcgtgacgaaaagggtggcggtccaggcagtatgttctcccgtcgcgtagccttacttctccaagcaa

SEQ ID NO: 84925 - DNA, 2847 bp, Zea Mays
ctcttttccaagcccactcttttttctcctctccacttcgttacgcggacagtgggaggagccacagccattataatagcacgccatacgccaaaagctccactggagccgagcagctactcctcccagtcccaggctcactgtcgctcctcccaagaacccgcccaaagaatcctagaaatccaagaaagggagcaaccaaaacaggaggaggtctgcaggaggaggagcaggtcagcaggaggaggtggtgctgaaggggaagatctcacaagtgtgtgaagaccacacagtctcgcgcactcgcaaacccagtgcgcgctgcggtcttcctcttcgcccaccttcttggagcggggaggttggccatgaggaggtggtggccggctgccctgctgggctgcgcagtggcggtgtccgttctggtggccgccgtggaatgcgctgtgacttacgacaagaaggcggtgctgattgatgggcagaggcggattctcttctccggatccatacactaccccaggagcacccctgatatgtgggaagggctgattcagaaagctaaagacggaggcttggatgtcattcagacctatgtcttttggaacggacatgagcctacgcctggaaattactatttcgaggagagcggcttcccagtttggttgaagtatgtaccgggcatcagcttcaggacagacaacgaacctttcaagacggccatgcagggtttcactgagaaaattgtgggaatgatgaagagcgaaaacctctttgcatcccaaggtggcccaattatcctctctcaggcaagtataatcttttccttagatttgattgagaatgagtatgggccagaaggcagggagtttggtgccgcaggtcaggcatatatcaactgggcagcaaagatggcagtcggattgggtactggtgtgccgtgggtgatgtgcaaggaggaggatgcacctgatccagtgatcaatgcatgcaatggtttctactgtgatgcattttctcctaacaaaccttacaagcccacaatgtggactgaagcttggagtggctggttcacggaatttggtgggaccatccgccaacgaccggttgaagatcttgcatttgctgttgctagatttgtacaaaagggtggttcttttatcaattactacatgtatcatggaggaacaaattttgggcgcactgctgggggtcccttcatcacaacaagctatgattatgatgctccaattgatgaatatggacttgttagagaaccaaagcacagtcatcttaaagaactccacagagctgttaagttatgcgagcaggctttggtttctgttgacccagcaattactacccttggtaccatgcaagaggcccgcgtcttccaatctccatctggttgtgcagctttccttgcaaactacaattctaactcctatgcgaaagttgtgttcaacaatgagcaatacagcctaccaccttggtcgattagcatccttcctgattgcaaaaatgttgtttttaacagtgccacagttggtgttcagacatctcagatgcaaatgtggggagatggtgcctcatcaatgacgtgggagaggtatgatgaggaggttgattctctggcagctgctccattgctcaccacaactggtttgcttgagcagcttaatgtcacgagagacagcagtgattatttgtggtacatcaccagtgttgacataagctcatctgaaaactttctacaaggtggcggcaagcctctgtctctcagtgtgcagtctgctggtcatgccttgcatgtctttgtcaatggacaacttcaaggttctgcttatggtaccagggaagatcgaagaatcaaatataatggcaatgctagccttcgagctggtactaacaaaattgcactgctgagtgttgcctgtggattgccgaatgttggagtgcattatgagacgtggaacactggtgttggtggtcctgttgtgcttcatgggctggatgaaggttcacgagaccttacttggcagacttggtcctatcaggttggcctgaaaggcgaacagatgaatctgaactccatagaaggctcaagctcagttgaatggatgcaagggtcattgatagctcaaaaccagcagccattggcctggtatagggcttactttgagactcccagcggggacgagccattggctttggatatgggtagcatgggcaagggccaaatctggataaatggacaaagcattggacgctactggacagcatatgcagatggggactgcaaagaatgcagttacacgggaaccttccgggcacccaaatgtcaatcaggctgtggtcagcccacgcaacgatggtatcatgtgccaaagtcctggctgcagcccaccagaaacctgctggtagtcttcgaggaacttggtggggattcatcgaagatcgccctagtgaagaggtcagtctcaagtgtctgtgctgatgtatctgaggatcacccaaacatcaagaactggcagatcgaaagctacggcgagcgcgagtaccacagggcccaaagtgcacttaagatgtgcacgtgggcagtccatttccgcaatcaaattcgcaagctttgggacacctacgggaacctgtggagatttccagcaaggagattgccactcagctaactctcacacagtcctagagaagaaatgcattgggctccaaagatgcgtcgtcgccatctcccccgagagctttggaggagacccctgcccgagcgtgacgaaaagggtggcggtccaggcagtatgttctcccgtcgcgtagccttacttctccaagcaa

SEQ ID NO: 84926 - DNA, 3039 bp, Zea Mays
ccatggtcagccacccagcagcatgatgagctgccatctttgtactgctcctcccctccggcgcggcggtgccccgcccgcctccgtacacacacacacgggtcgcggctagccggctagagtctcttttccaagcccactcttttttctcctctccacttcgttacgcggacagtgggaggagccacagccattataatagcacgccatacgccaaaagctccactggagccgagcagctactcctcccagtcccaggctcactgtcgctcctcccaagaacccgcccaaagaatcctagaaatccaagaaagggagcaaccaaaacaggaggaggtctgcaggaggaggagcaggtcagcaggaggaggtggtgctgaaggggaagatctcacaagtgtgtgaagaccacacagtctcgcgcactcgcaaacccagtgcgcgctgcggtcttcctcttcgcccaccttcttggagcggggaggttggccatgaggaggtggtggccggctgccctgctgggctgcgcagtggcggtgtccgttctggtggccgccgtggaatgcgctgtgacttacgacaagaaggcggtgctgattgatgggcagaggcggattctcttctccggatccatacactaccccaggagcacccctgatatgtgggaagggctgattcagaaagctaaagacggaggcttggatgtcattcagacctatgtcttttggaacggacatgagcctacgcctggaaattactatttcgaggagaggtacgatttagtcaggttcataaagacggtccagaaggctggcctgtttgtacatctccgcatcggtccctacatttgtggcgagtggaacttcggcggcttcccagtttggttgaagtatgtaccgggcatcagcttcaggacagacaacgaacctttcaagacggccatgcagggtttcactgagaaaattgtgggaatgatgaagagcgaaaacctctttgcatcccaaggtggcccaattatcctctctcagattgagaatgagtatgggccagaaggcagggagtttggtgccgcaggtcaggcatatatcaactgggcagcaaagatggcagtcggattgggtactggtgtgccgtgggtgatgtgcaaggaggaggatgcacctgatccagtgatcaatgcatgcaatggtttctactgtgatgcattttctcctaacaaaccttacaagcccacaatgtggactgaagcttggagtggctggttcacggaatttggtgggaccatccgccaacgaccggttgaagatcttgcatttgctgttgctagatttgtacaaaagggtggttcttttatcaattactacatgtatcatggaggaacaaattttgggcgcactgctgggggtcccttcatcacaacaagctatgattatgatgctccaattgatgaatatggacttgttagagaaccaaagcacagtcatcttaaagaactccacagagctgttaagttatgcgagcaggctttggtttctgttgacccagcaattactacccttggtaccatgcaagaggcccgcgtcttccaatctccatctggttgtgcagctttccttgcaaactacaattctaactcctatgcgaaagttgtgttcaacaatgagcaatacagcctaccaccttggtcgattagcatccttcctgattgcaaaaatgttgtttttaacagtgccacagttggtgttcagacatctcagatgcaaatgtggggagatggtgcctcatcaatgacgtgggagaggtatgatgaggaggttgattctctggcagctgctccattgctcaccacaactggtttgcttgagcagcttaatgtcacgagagacagcagtgattatttgtggtacatcaccagtgttgacataagctcatctgaaaactttctacaaggtggcggcaagcctctgtctctcagtgtgcagtctgctggtcatgccttgcatgtctttgtcaatggacaacttcaaggttctgcttatggtaccagggaagatcgaagaatcaaatataatggcaatgctagccttcgagctggtactaacaaaattgcactgctgagtgttgcctgtggattgccgaatgttggagtgcattatgagacgtggaacactggtgttggtggtcctgttgtgcttcatgggctggatgaaggttcacgagaccttacttggcagacttggtcctatcaggttggcctgaaaggcgaacagatgaatctgaactccatagaaggctcaagctcagttgaatggatgcaagggtcattgatagctcaaaaccagcagccattggcctggtatagggcttactttgagactcccagcggggacgagccattggctttggatatgggtagcatgggcaagggccaaatctggataaatggacaaagcattggacgctactggacagcatatgcagatggggactgcaaagaatgcagttacacgggaaccttccgggcacccaaatgtcaatcaggctgtggtcagcccacgcaacgatggtatcatgtgccaaagtcctggctgcagcccaccagaaacctgctggtagtcttcgaggaacttggtggggattcatcgaagatcgccctagtgaagaggtcagtctcaagtgtctgtgctgatgtatctgaggatcacccaaacatcaagaactggcagatcgaaagctacggcgagcgcgagtaccacagggcccaaagtgcacttaagatgtgcacgtgggcagtccatttccgcaatcaaattcgcaagctttgggacacctacgggaacctgtggagatttccagcaaggagattgccactcagctaactctcacacagtcctagagaagaaatgcattgggctccaaagatgcgtcgtcgccatctcccccgagagctttggaggagacccctgcccgagcgtgacgaaaagggtggcggtccaggcagtatgttctcccgtcgcgtagccttacttctccaagcaa

SEQ ID NO: 84927 - DNA, 1761 bp, Zea Mays
ctctgttctacattggctagaggtttctgtaagcacttcaaatgggacagaagtgtatgggactggacttaaaaatgctgctggtgaatacaattgttttttgaatgtgattattcagtcattgtggcatataaggcggtttcgggacgagtttcttaaaacatcattactgcacaagcatgttgaagatccttgtgctgtctgcgctttatatggtatcttcattgacctgagcaaagcatccaagggacaaagagaagctgttgcacctacttcgttgaggattgctttgagcaaatcctacccaaacagcaaattctttcaggagatgaatgatgcatctgaggtactgggtgtaatctttgagtgtttgcataagtcatacacttctcgtactgtctaccatggtgtatcccacgagaaaaattctattggatcatgggattgtgcaaatatttcttgcataacacataatctttttgggatggacgtatatgaacggatgaactgtcacaattgtaagatggagtctaggcagctcaagtatacttcatttttccacaatatcaatgctagttcactccgaactgcgaagatgatgtgtccagattcttcatttgatgaacttttgaaggttgttataatgaatgatcaactagcttgtgatcaagacgttggcggctgtggaacaccgaatcatatagaccacatcctttctaattccccacatgtctttactgttgttttgggatggcagaacaacaaagagagggtggatgacatatctgcaactttggctggtatttcaactgagatagacattagcatattctaccgtggtctagatcaaggaggcaaacacaccctggggtcagtggtttgttactatggccagcattaccattgttttgccttcaaggatggacggtgggtcatgtatgatgaccagacagtcaaggttattggtagttggggtgatgtgctcgtgatgtgtgaaaagggccatttgcaaccccaagtgcttttctttgaggctgcaaattaattattcttcagagtcgcaaaacgcgctacagcggttaacatgccctcaaatataggttttttccctgcggccatgaagattagaaatagggtagcagattcgttttgagcggggatatatagtactagcattcaacggtgcttttcgttgtgagtccgtaataagcagtcatctgagcattctagagcaaaaaagggagctgtttatcccccccttttttgctttaacctttggtgtaggcgctgaacttctgatctcatctgccaataaatcttcactgccgatcaagcgggtggagcattcgacttgaactgccatccaacagttgtagccgaatctgcatgaactcttcgttatacaccaatcatctatagaattttctgcttacattgggccgggcgggcgttctctctctctctgttttttttttggggtgggggtctggtataggagtgacagttttgaggccaccagatatagaatggaatgatatgggaatgggtgatgcggtgtgaactgtattttgctgtggatgatcttttgaaaagagtaaagctatctggaatatggatatggtaagaaatctgtagtacacgagtctatatatacaatgactcaatgggattatgcgagatgattataacgatgaataccaaaatctttatcacaactgttggttacattgatctctctttgacaggagcattgaatgatcg

SEQ ID NO: 84928 - DNA, 2540 bp, Zea Mays
gaactctccttggatgctaagaagaatgcaagcaaaggggctgatatgaaacaatcccatgaaaaatcaaaggataaaaagaagttcaaggattctcgaaaatcaaaggagctcaaggattcaagctggagcaaccagtctctcattcaccaagacagtaccgatgagggaacatcagagacatctcaaatgcttgctgattgtgatgatctgtgttgcaaatgctcgacaagtgaggattacttcaatgaacaagaggaagaacttaggcatagggtacaacttgaagcagaggaaagaaaattggaagaggctctagaatatcaacggtggatagaggaggaagcaaagcagaaacatcttgcagaacaatgtagaagtacacatgcatcttctgttattggcataaagtttggtgactttagctacaccgagaacgagaacaatttcagccagaaactcaatggaatcgagttcgactcatctgatgcacatgcattaaccagcagtgatatgagtgtttctatgttgacgttgaaaatgaatggggtttgcaataatgcacaacctataaagcctcttggtaattttggcacccaaaatcccaagagaagttctagtgaaccacaaaggtattctcaaggtcactctgcaggaatagagaagccaaattttgagaaagttggcagtggtgcaataccatcaacggatgtgtgcatcgaggatgattttgataaaaggtttcaagaagatcttgatgaagcagtgcgccaaagccttggatgcgatgcttatcctgctggtacagtaagcacttcaaatgggacagaagtgtatgggactggacttaaaaatgctgctggtgaatacaattgttttttgaatgtgattattcagtcattgtggcatataaggcggtttcgggacgagtttcttaaaacatcattactgcacaagcatgttgaagatccttgtgctgtctgcgctttatatggtatcttcattgacctgagcaaagcatccaagggacaaagagaagctgttgcacctacttcgttgaggattgctttgagcaaatcctacccaaacagcaaattctttcaggagatgaatgatgcatctgaggtactgggtgtaatctttgagtgtttgcataagtcatacacttctcgtactgtctaccatggtgtatcccacgagaaaaattctattggatcatgggattgtgcaaatatttcttgcataacacataatctttttgggatggacgtatatgaacggatgaactgtcacaattgtaagatggagtctaggcagctcaagtatacttcatttttccacaatatcaatgctagttcactccgaactgcgaagatgatgtgtccagattcttcatttgatgaacttttgaaggttgttataatgaatgatcaactagcttgtgatcaagacgttggcggctgtggaacaccgaatcatatagaccacatcctttctaattccccacatgtctttactgttgttttgggatggcagaacaacaaagagagggtggatgacatatctgcaactttggctggtatttcaactgagatagacattagcatattctaccgtggtctagatcaaggaggcaaacacaccctggggtcagtggtttgttactatggccagcattaccattgttttgccttcaaggatggacggtgggtcatgtatgatgaccagacagtcaaggttattggtagttggggtgatgtgctcgtgatgtgtgaaaagggccatttgcaaccccaagtgcttttctttgaggctgcaaattaattattcttcagagtcgcaaaacgcgctacagcggttaacatgccctcaaatataggttttttccctgcggccatgaagattagaaatagggtagcagattcgttttgagcggggatatatagtactagcattcaacggtgcttttcgttgtgagtccgtaataagcagtcatctgagcattctagagcaaaaaagggagctgtttatcccccccttttttgctttaacctttggtgtaggcgctgaacttctgatctcatctgccaataaatcttcactgccgatcaagcgggtggagcattcgacttgaactgccatccaacagttgtagccgaatctgcatgaactcttcgttatacaccaatcatctatagaattttctgcttacattgggccgggcgggcgttctctctctctctgttttttttttggggtgggggtctggtataggagtgacagttttgaggccaccagatatagaatggaatgatatgggaatgggtgatgcggtgtgaactgtattttgctgtggatgatcttttgaaaagagtaaagctatctggaatatggatatggtaagaaatctgtagtacacgagtctatatatacaatgactcaatgggattatgcgagatgattataacgatgaataccaaaatctttatcacaactgttggttacattgatctctctttgacaggagcattgaatgatcg

SEQ ID NO: 84929 - DNA, 5214 bp, Zea Mays
tcccaaatctcattcccatgggccgtaaaaagcgaacatctacaccaaaccctacttcgccaccgtcgtacgccccccgccggccggcgggggctaaggtggctggcaacggcggggaagatgatggcgtgcgcgccgaggtcgaaaaggcactcgcctgcctgcagcgggggaaccacgcgcgggcggtgcgcctcatgagggacgccatcgcccaccacggggaggcctccacgccgcttctcctgcgggcgcatggtactgtcctcgcccgcgccgcctccgtccttgacgacccggccgcccgcgcgcgccgccaccgggcagcgctccaggcggcccagcgcgccgtcgagctcgcgccggactccatcgagctctcccactttcatgccatgctgctcttcgacgccgccaccgacacccgcgcctacgaggaggtcgtcgccgagtgcgagcgcggcctcagcatcgaggccccttccgaccccgcgccccactccctcaggctgcccggccccgacgtcgaccaggtccagtccgagctccgcaacctgatccagaaggccaatctcgcctcagtatctacctggtttaaaaccctgcgtagcgcgggcgacgataagtttcgcctcatccccgtgcaccgttttgccgacgaaccaatggaggcccggctcgtcccctcggcgccctctccgcgccgctcaaacgagatcaagaaggcgaccaagacctccgaggagcgccgccaggagatcgaggtacgcctggctgccatgaggctgctgcagcagcagaaggagcagagcaatggtgttgtgtctgccacccctgcctcttcccagtcacagggagatgaggccccctcatcgtctctgtcattggtgggtggacatcgagctgacaggagaaaaggcgggtctaggaaagcaacaggcttatctgcatctgaacgcactgaccaggcgcgtgcctactggggttcgataccagtggatcaaaggcttgcgttcttaaacactagcatttctgagctcaagtcacactatgcttctgcaatccataaggagaaagatgttgccagtgcagcatctgatgtgctgaatgaggtgatacgatttgccaacaagcatggcaactgggagttcatggtatgtggtaggtgtcggggacagtttacagatgttgaggcacaccggtggcatgtcatgggggaacatgttgggctactctcatctgagctgcaggaaatggtgccgcaggagattgatgctgactgggtagaaatgctcattggttggaactggagtccattggatgctactgcagcactgaaactgtttgaggaagatcaaactgacaatcttggaacagataggggcaaagaatcggatccgacggataattggagtaacaaagacaaccctgacatgtcagaatcctctgcctcgccacacaacggggagtgtaatggctttggagtggtggtgagggaaggtgacggtacgtggccactatcagatgatgacgaaagggcaaaaattttagaaaggatccattcattgttcaaaattcttgtgaagaaccataatctttcagtgtgcaatctaaacagggtgattcgatttgctgtagaggaactcagggggttgtcatctgggtcactactgcttaatcactcattggacaagtcgccgctttgcatttgcttcttggaggcatcgtcactgtggaaagtagctaaattcttgcaggatttagtgcaggcctctggaattaatagaaacctggagaatgatggactaggtgacagggatagttccccccaaaaccacaatgtactggagaaggttattcttagttctgattcttctgaactgatcattgatgggcaaacttttggtggaaagtttgactctgagagtgttgatactgacacactgttttcatggttgtacgctggatcctcaattggtgagcagctattggcttggaaccgtatgattgacgaaaggtcaaatcagtgcatggaccttattcgggcacttgggagggagttcaacaacttgcaaaactcatgtgaacggaagcttgaacagctgagaaatgaggaggcttttatttctgtagaggacctcttatgcgaagagcaaacacgaagggagcaggtggagcagtatgggttccaaagttttgaggagatcctcaggaagcggcaggcggagttgttggaacgcaatactgaggtgcagtccgacagtaacagatccgagatagatgcaatctcagctgttttgaagaaactccacacttcacacttcggttatgatgatgccttttctggaatggccccacgcctttttgacttggacggggtcgaagatgaatggaggctgcatgattttatacatccaaatgattcaatggtacacactgttatatcaaagatgaaggaaaaagttactgtggagattagcaagatagatgctcagattatgcgaaatttatctgtgatgcggcatctagagcacaagcttggacctgcttctgctcttgattatcgaatgattcttttaccccttatgagatcgttcttacaaagccatttgggagagctggtggataaggatgccaaagagagatctgatgctgcaagggaagccttcctggctgaactctccttggatgctaagaagaatgcaagcaaaggggctgatatgaaacaatcccatgaaaaatcaaaggataaaaagaagttcaaggattctcgaaaatcaaaggagctcaaggattcaagctggagcaaccagtctctcattcaccaagacagtaccgatgagggaacatcagagacatctcaaatgcttgctgattgtgatgatctgtgttgcaaatgctcgacaagtgaggattacttcaatgaacaagaggaagaacttaggcatagggtacaacttgaagcagaggaaagaaaattggaagaggctctagaatatcaacggtggatagaggaggaagcaaagcagaaacatcttgcagaacaatgtagaagtacacatgcatcttctgttattggcataaagtttggtgactttagctacaccgagaacgagaacaatttcagccagaaactcaatggaatcgagttcgactcatctgatgcacatgcattaaccagcagtgatatgagtgtttctatgttgacgttgaaaatgaatggggtttgcaataatgcacaacctataaagcctcttggtaattttggcacccaaaatcccaagagaagttctagtgaaccacaaaggtattctcaaggtcactctgcaggaatagagaagccaaattttgagaaagttggcagtggtgcaataccatcaacggatgtgtgcatcgaggatgattttgataaaaggtttcaagaagatcttgatgaagcagtgcgccaaagccttggatgcgatgcttatcctgctggtacagtaagcacttcaaatgggacagaagtgtatgggactggacttaaaaatgctgctggtgaatacaattgttttttgaatgtgattattcagtcattgtggcatataaggcggtttcgggacgagtttcttaaaacatcattactgcacaagcatgttgaagatccttgtgctgtctgcgctttatatggtatcttcattgacctgagcaaagcatccaagggacaaagagaagctgttgcacctacttcgttgaggattgctttgagcaaatcctacccaaacagcaaattctttcaggagggacagatgaatgatgcatctgaggtactgggtgtaatctttgagtgtttgcataagtcatacacttctcgtactgtctaccatggtgtatcccacgagaaaaattctattggatcatgggattgtgcaaatatttcttgcataacacataatctttttgggatggacgtatatgaacggatgaactgtcacaattgtaagatggagtctaggcagctcaagtatacttcatttttccacaatatcaatgctagttcactccgaactgcgaagatgatgtgtccagattcttcatttgatgaacttttgaaggttgttataatgaatgatcaactagcttgtgatcaagacgttggcggctgtggaacaccgaatcatatagaccacatcctttctaattccccacatgtctttactgttgttttgggatggcagaacaacaaagagagggtggatgacatatctgcaactttggctggtatttcaactgagatagacattagcatattctaccgtggtctagatcaaggaggcaaacacaccctggggtttgttactatggccagcattaccattgttttgccttcaaggatggacggtgggtcatgtatgatgaccagacagtcaaggttattggtagttggggtgatgtgctcgtgatgtgtgaaaagggccatttgcaaccccaagtgcttttctttgaggctgcaaattaattattcttcagagtcgcaaaacgcgctacagcggttaacatgccctcaaatataggttttttccctgcggccatgaagattagaaatagggtagcagattcgttttgagcggggatatatagtactagcattcaacggtgcttttcgttgtgagtccgtaataagcagtcatctgagcattctagagcaaaaaagggagctgtttatcccccccttttttgctttaacctttggtgtaggcgctgaacttctgatctcatctgccaataaatcttcactgccgatcaagcgggtggagcattcgacttgaactgccatccaacagttgtagccgaatctgcatgaactcttcgttatacaccaatcatctatagaattttctgcttacattgggccgggcgggcgttctctctctctctgttttttttttggggtgggggtctggtataggagtgacagttttgaggccaccagatatagaatggaatgatatgggaatgggtgatgcggtgtgaactgtattttgctgtggatgatcttttgaaaagagtaaagctatctggaatatggatatggtaagaaatctgtagtacacgagtctatatatacaatgactcaatgggattatgcgagatgattataacgatgaataccaaaatctttatcacaactgttggttacattgatctctctttgacaggagcattgaatgatcg

SEQ ID NO: 84930 - DNA, 5214 bp, Zea Mays
tcccaaatctcattcccatgggccgtaaaaagcgaacatctacaccaaaccctacttcgccaccgtcgtacgccccccgccggccggcgggggctaaggtggctggcaacggcggggaagatgatggcgtgcgcgccgaggtcgaaaaggcactcgcctgcctgcagcgggggaaccacgcgcgggcggtgcgcctcatgagggacgccatcgcccaccacggggaggcctccacgccgcttctcctgcgggcgcatggtactgtcctcgcccgcgccgcctccgtccttgacgacccggccgcccgcgcgcgccgccaccgggcagcgctccaggcggcccagcgcgccgtcgagctcgcgccggactccatcgagctctcccactttcatgccatgctgctcttcgacgccgccaccgacacccgcgcctacgaggaggtcgtcgccgagtgcgagcgcggcctcagcatcgaggccccttccgaccccgcgccccactccctcaggctgcccggccccgacgtcgaccaggtccagtccgagctccgcaacctgatccagaaggccaatctcgcctcagtatctacctggtttaaaaccctgcgtagcgcgggcgacgataagtttcgcctcatccccgtgcaccgttttgccgacgaaccaatggaggcccggctcgtcccctcggcgccctctccgcgccgctcaaacgagatcaagaaggcgaccaagacctccgaggagcgccgccaggagatcgaggtacgcctggctgccatgaggctgctgcagcagcagaaggagcagagcaatggtgttgtgtctgccacccctgcctcttcccagtcacagggagatgaggccccctcatcgtctctgtcattggtgggtggacatcgagctgacaggagaaaaggcgggtctaggaaagcaacaggcttatctgcatctgaacgcactgaccaggcgcgtgcctactggggttcgataccagtggatcaaaggcttgcgttcttaaacactagcatttctgagctcaagtcacactatgcttctgcaatccataaggagaaagatgttgccagtgcagcatctgatgtgctgaatgaggtgatacgatttgccaacaagcatggcaactgggagttcatggtatgtggtaggtgtcggggacagtttacagatgttgaggcacaccggtggcatgtcatgggggaacatgttgggctactctcatctgagctgcaggaaatggtgccgcaggagattgatgctgactgggtagaaatgctcattggttggaactggagtccattggatgctactgcagcactgaaactgtttgaggaagatcaaactgacaatcttggaacagataggggcaaagaatcggatccgacggataattggagtaacaaagacaaccctgacatgtcagaatcctctgcctcgccacacaacggggagtgtaatggctttggagtggtggtgagggaaggtgacggtacgtggccactatcagatgatgacgaaagggcaaaaattttagaaaggatccattcattgttcaaaattcttgtgaagaaccataatctttcagtgtgcaatctaaacagggtgattcgatttgctgtagaggaactcagggggttgtcatctgggtcactactgcttaatcactcattggacaagtcgccgctttgcatttgcttcttggaggcatcgtcactgtggaaagtagctaaattcttgcaggatttagtgcaggcctctggaattaatagaaacctggagaatgatggactaggtgacagggatagttccccccaaaaccacaatgtactggagaaggttattcttagttctgattcttctgaactgatcattgatgggcaaacttttggtggaaagtttgactctgagagtgttgatactgacacactgttttcatggttgtacgctggatcctcaattggtgagcagctattggcttggaaccgtatgattgacgaaaggtcaaatcagtgcatggaccttattcgggcacttgggagggagttcaacaacttgcaaaactcatgtgaacggaagcttgaacagctgagaaatgaggaggcttttatttctgtagaggacctcttatgcgaagagcaaacacgaagggagcaggtggagcagtatgggttccaaagttttgaggagatcctcaggaagcggcaggcggagttgttggaacgcaatactgaggtgcagtccgacagtaacagatccgagatagatgcaatctcagctgttttgaagaaactccacacttcacacttcggttatgatgatgccttttctggaatggccccacgcctttttgacttggacggggtcgaagatgaatggaggctgcatgattttatacatccaaatgattcaatggtacacactgttatatcaaagatgaaggaaaaagttactgtggagattagcaagatagatgctcagattatgcgaaatttatctgtgatgcggcatctagagcacaagcttggacctgcttctgctcttgattatcgaatgattcttttaccccttatgagatcgttcttacaaagccatttgggagagctggtggataaggatgccaaagagagatctgatgctgcaagggaagccttcctggctgaactctccttggatgctaagaagaatgcaagcaaaggggctgatatgaaacaatcccatgaaaaatcaaaggataaaaagaagttcaaggattctcgaaaatcaaaggagctcaaggattcaagctggagcaaccagtctctcattcaccaagacagtaccgatgagggaacatcagagacatctcaaatgcttgctgattgtgatgatctgtgttgcaaatgctcgacaagtgaggattacttcaatgaacaagaggaagaacttaggcatagggtacaacttgaagcagaggaaagaaaattggaagaggctctagaatatcaacggtggatagaggaggaagcaaagcagaaacatcttgcagaacaatgtagaagtacacatgcatcttctgttattggcataaagtttggtgactttagctacaccgagaacgagaacaatttcagccagaaactcaatggaatcgagttcgactcatctgatgcacatgcattaaccagcagtgatatgagtgtttctatgttgacgttgaaaatgaatggggtttgcaataatgcacaacctataaagcctcttggtaattttggcacccaaaatcccaagagaagttctagtgaaccacaaaggtattctcaaggtcactctgcaggaatagagaagccaaattttgagaaagtggtgcaataccatcaacggatgtgtgcatcgaggatgattttgataaaaggtttcaagaagatcttgatgaagcagtgcgccaaagccttggatgcgatgcttatcctgctggtacagtaagcacttcaaatgggacagaagtgtatgggactggacttaaaaatgctgctggtgaatacaattgttttttgaatgtgattattcagtcattgtggcatataaggcggtttcgggacgagtttcttaaaacatcattactgcacaagcatgttgaagatccttgtgctgtctgcgctttatatggtatcttcattgacctgagcaaagcatccaagggacaaagagaagctgttgcacctacttcgttgaggattgctttgagcaaatcctacccaaacagcaaattctttcaggagggacagatgaatgatgcatctgaggtactgggtgtaatctttgagtgtttgcataagtcatacacttctcgtactgtctaccatggtgtatcccacgagaaaaattctattggatcatgggattgtgcaaatatttcttgcataacacataatctttttgggatggacgtatatgaacggatgaactgtcacaattgtaagatggagtctaggcagctcaagtatacttcatttttccacaatatcaatgctagttcactccgaactgcgaagatgatgtgtccagattcttcatttgatgaacttttgaaggttgttataatgaatgatcaactagcttgtgatcaagacgttggcggctgtggaacaccgaatcatatagaccacatcctttctaattccccacatgtctttactgttgttttgggatggcagaacaacaaagagagggtggatgacatatctgcaactttggctggtatttcaactgagatagacattagcatattctaccgtggtctagatcaaggaggcaaacacaccctggggtcagtggtttgttactatggccagcattaccattgttttgccttcaaggatggacggtgggtcatgtatgatgaccagacagtcaaggttattggtagttggggtgatgtgctcgtgatgtgtgaaaagggccatttgcaaccccaagtgcttttctttgaggctgcaaattaattattcttcagagtcgcaaaacgcgctacagcggttaacatgccctcaaatataggttttttccctgcggccatgaagattagaaatagggtagcagattcgttttgagcggggatatatagtactagcattcaacggtgcttttcgttgtgagtccgtaataagcagtcatctgagcattctagagcaaaaaagggagctgtttatcccccccttttttgctttaacctttggtgtaggcgctgaacttctgatctcatctgccaataaatcttcactgccgatcaagcgggtggagcattcgacttgaactgccatccaacagttgtagccgaatctgcatgaactcttcgttatacaccaatcatctatagaattttctgcttacattgggccgggcgggcgttctctctctctctgttttttttttggggtgggggtctggtataggagtgacagttttgaggccaccagatatagaatggaatgatatgggaatgggtgatgcggtgtgaactgtattttgctgtggatgatcttttgaaaagagtaaagctatctggaatatggatatggtaagaaatctgtagtacacgagtctatatatacaatgactcaatgggattatgcgagatgattataacgatgaataccaaaatctttatcacaactgttggttacattgatctctctttgacaggagcattgaatgatcg

SEQ ID NO: 84931 - DNA, 1539 bp, Zea Mays
ccccatcccctccagtctccagtgccacgtgcatcttttgcgtgacgcgaaggggtcgccgggtccggggcaaatccggatagctactggacacggcccgacgaacttgcccagcccgggcaggttcacgatctggtgtggcacgtcgtcgcgctcgctgctaagtacctgctctgctgctggttataaacaacagcgacagctccccttcctcgccgtggtgtcgacctgaccgtacgtattccgcggcgaatcatcgacccgggagagcttcgtctatcattagctacagcgtctacctggaggaggagctagtaggaagctaagaggcatggatcagctggtcgccatggcgatggctcagccgtcgagcccgacctcgctgcacgtcgcgcacaagatcccggccggcgacgggccttacgcaagggccaaacacttccagctggtggagaaggacctggacgcgtcgatcgcgtggttctggaaggcgatcggcacgggcgacaaggtggacagcgcgctcaaggacatggcggtggtgatgaagcagcgcgggtacctggcggaggccatcggcgccgtccggtcgctgcggcacctgtgcccgaagcagtcgcaggagtcgctggacaacatcctcctcgacctctacaaggccagcgggcggaccaaggaggagatcgagctgctcaagcagaagctccgcaagatctaccttggcgaggcgttccatggcaagaccaccaagcgcgcccgctcgcacggccgcaagatccacgtctccatcaagcaagagacctcgcgcgtcctgggcaacctcgcgtgggcgtacatgcagcagcgcaacttcatggcggcggaggtggtgtaccggaaggcgcagatgatcgacccggacgccaacaaggcgtgcaacctcgcgctctgcctcatcgagcaggcccggctcgccgacgcccagctcgtcctcaccgacgtgctcgctgggaggtaccaggcgcgcgaccagcaggacggcaagatcgtccggaaagtggaggaactgctggcccggatcatggcgcagacgtggcagggcggcggcggcggtcgacgacgccgggacgagagcgacgacgacgactgggttgagaaccagatgctggctctgctggacgtggcggtgccgtaccggaagaccagcaggaggctgcccgtcttcgaggagatctcgcctatctacaaggagcaggtggcttgctagaagctacactacatatatagatcagtagcagcagcatcttttgatcgagtcgagtgtgtgccgaatttttgtctagctcacagcttttggatcaactccgtagcaacagcagtagcatcagctcatgctcaagcatacatgtgtgcagtgcatatttatgtcatatatagtcgtgtatgtgcttgatgtgtacatatctttgttcattccatttctccgctagtcatcagtcagaaagtgttacggaagcagattgagatggattacaggagaaatttgttcgttttgccgtc

SEQ ID NO: 84932 - DNA, 1186 bp, Zea Mays
atccgaattcggagcagcagccgccgcggatgccgttaaaccctaactcccaacctcttctttgtcacactatttctagggttttacatgcaccaacaggagccccttccgtcacttcgcctccaacaacagcagcgccgccgccgccgccgccgccacttaatcgccgggatcgtcgccggaggaaagcgccatggatcggtaccagcgggtggagaagccgccgcccgagcccgccgccatcggcgagaatgaggtccgcatcaccactcagggcctcgtccgcaactacgtcacctacgccacctccctcgtccaggaaaaacaggtgaaggaaattgtgttgaaggctatgggacaggctataagcaaggcagtggctattgctgagatcataaagaagaggattcctggtttgcatcaagatacaataatcagttctgtcagtattactgatgtatgggagcccattgaggaaggacttgtaccattggagatgactcgtcatgtttcaatgatatcgatttccttgtcacctaaggagcataacaagaattcacctgggtatcaagctcctctacattcggatcttaagccacaaagatatcagcaacctcagcaatatcaacagtaccagccaagacaacatcaagttcaaacggattcatatggacgcggccgaggcagaagcaggggccgaggaaggggctggggtactaggggtgggtacggcggaggctatggtggatatgaatatgataacaaccaagtaggttatggtgggtatgaacaccacggtggatatggacatcaaggtggatatggaaaccagggaggatatggccacaaccaaggtggctatggccacgaccaaggtggctatggcggttatggttacaaccaaggtggatatggaggatatgaaaatggaggctggaactacaaccggaacagaggcggtggcggccgaggacgaggcaattggggctatggtggtcctggatatgaccgtggtggcagaggcgcaggtggccctggcggcaggggctatgttcgaggccgtggacgaatgggtggcggccgtggacggggcaaccaaaactactattagagcaagggcattttccacggccgtattgctgattcatttggcgagctggcatgagggtggtgagcacggaggaag

SEQ ID NO: 84933 - DNA, 1405 bp, Zea Mays
atccgaattcggagcagcagccgccgcggatgccgttaaaccctaactcccaacctcttctttgtcacactatttctagggttttacatgcaccaacaggagccccttccgtcacttcgcctccaacaacagcagcgccgccgccgccgccgccgccacttaatcgccgggatcgtcgccggaggaaagcgccatggatcggtaccagcgggtggagaagccgccgcccgagcccgccgccatcggcgagaatgaggtccgcatcaccactcagggcctcgtccgcaactacgtcacctacgccacctccctcgtccaggtgaaggaaattgtgttgaaggctatgggacaggctataagcaaggcagtggctattgctgagatcataaagaagaggattcctggtttgcatcaagatacaataatcagttctgtcagtattactgatgtatgggagcccattgaggaaggacttgtaccattggagatgactcgtcatgtttcaatgatatcgatttccttgtcacctaaggagcataacaagaattcacctgggtatcaagctcctctacattcggatcttaagccacaaagatatcagcaacctcagcaatatcaacagtaccagccaagacaacatcaagttcaaacggattcatatggacgcggccgaggcagaagcaggggccgaggaaggggctggggtactaggggtgggtacggcggaggctatggtggatatgaatatgataacaaccaagtaggttatggtgggtatgaacaccacggtggatatggacatcaaggtggatatggaaaccagggaggatatggccacaaccaaggtggctatggccacgaccaaggtggctatggcggttatggttacaaccaaggtggatatggaggatatgaaaatggaggctggaactacaaccggaacagaggcggtggcggccgaggacgaggcaattggggctatggtggtcctggatatgaccgtggtggcagaggcgcaggtggccctggcggcaggggctatgttcgaggccgtggacgaatgggtggcggccgtggacggggcaaccaaaactactattagagcaagggcattttccacggccgtattgctgtatgtttcctctagtcctcccagattttagtataatcgccaatggtgcctgtaccattgcatcaattccgtgggattttgacattagtccttcagttttccctgggacatctttcctgtatttaagagtgcatttttgatagttcatcagcatccagttacgcgtttctccgcactgtgtattttggtgatagtttaagagcccagctgtttgtaccttggctccagaagaactggaacctgttgactgttgtgctgtagtgattctacggc

SEQ ID NO: 84934 - DNA, 1325 bp, Zea Mays
atccgaattcggagcagcagccgccgcggatgccgttaaaccctaactcccaacctcttctttgtcacactatttctagggttttacatgcaccaacaggagccccttccgtcacttcgcctccaacaacagcagcgccgccgccgccgccgccgccacttaatcgccgggatcgtcgccggaggaaagcgccatggatcggtaccagcgggtggagaagccgccgcccgagcccgccgccatcggcgagaatgaggtccgcatcaccactcagggcctcgtccgcaactacgtcacctacgccacctccctcgtccaggaaaaacaggtgaaggaaattgtgttgaaggctatgggacaggctataagcaaggcagtggctattgctgagatcataaagattggagatgactcgtcatgtttcaatgatatcgatttccttgtcacctaaggagcataacaagaattcacctgggtatcaagctcctctacattcggatcttaagccacaaagatatcagcaacctcagcaatatcaacagtaccagccaagacaacatcaagttcaaacggattcatatggacgcggccgaggcagaagcaggggccgaggaaggggctggggtactaggggtgggtacggcggaggctatggtggatatgaatatgataacaaccaagtaggttatggtgggtatgaacaccacggtggatatggacatcaaggtggatatggaaaccagggaggatatggccacaaccaaggtggctatggccacgaccaaggtggctatggcggttatggttacaaccaaggtggatatggaggatatgaaaatggaggctggaactacaaccggaacagaggcggtggcggccgaggacgaggcaattggggctatggtggtcctggatatgaccgtggtggcagaggcgcaggtggccctggcggcaggggctatgttcgaggccgtggacgaatgggtggcggccgtggacggggcaaccaaaactactattagagcaagggcattttccacggccgtattgctgtatgtttcctctagtcctcccagattttagtataatcgccaatggtgcctgtaccattgcatcaattccgtgggattttgacattagtccttcagttttccctgggacatctttcctgtatttaagagtgcatttttgatagttcatcagcatccagttacgcgtttctccgcactgtgtattttggtgatagtttaagagcccagctgtttgtaccttggctccagaagaactggaacctgttgactgttgtgctgtagtgattctacggc

SEQ ID NO: 84935 - DNA, 4691 bp, Zea Mays
caggaccacacaacaaccagcggcgtgcacacggagcgttctgccatcacgttctgccatcgcgccccgccccgcaatccccgccgccgagcacagccgcccgcagtcctgcaattccgccgcccgcattcaccgcgccacattcaccgtgccatcgcgcccgcattcccctccctgcgcccgcagttcccgccccgccccgcagtccacgccgccgagcacagccgcccatcgcgcccgcagtcccctccccgcgcccgcagcccatcgcgccttcagtccgccctcccctcgccgcctccccagaccgcagtctctcctcaacctccctccccaaggagctggcggcagcgcggctgcgtcgggaggaggaggacgccgcgcgggggctgcggcaggagctcgactccgagcgggcctccccggagatggcagccagatccggccattgagccccctaaccgagcggatccaaggtactacacggtcttgccctcgcccttttgcttgctttgtcgtcctctcctcaccgtggggggacccggcgtacgagcaggaggtgttcctcgccacgcggcgcggcaggcgcatgctcgacctgtcccggttccgcgaccgcgaccgcgcgcggtgccacgactggtgcttcgccgcgttcgtgcacgcctacgccacgtacctcgacgaccggctcaaagaacggatgcaggcccgcagagcaggcggggccagcccgggcaaatggcacgtcgacggcgaccctgtcgggatggcgtgccaggtggccgaggcctgggagctcgtgccgcagggaaggtcggcgtcggcgacggagacgacggcggcagaggatgtcatcgggaaggcgcagcagctgaagcacctcctaggccggttcatccagtgccggccgacggggaaggcgatgacgaacccggtggtgacagcggcgctgtacagactggtgaaggagagcgcggcgatgtactgcgagctcacggagatgtcgggacctaataaatctccatttagtggagtggctgatgatttgaaaggaagagcaggttgctacaaacaagactggaaccatggatttcgttctggtttaaggatactggcacctacgctctacatattctttgcatctacagtccctgttatagcctttggggagcaattgagcaaagatacagatagtgcactaaccacagttgagacattagcatcagcggctatttgtggcatcgtacattcaataataggtggacaaccactattgatcgtgggtgttgcagaaccgacaattatcatgtacacttatatctacaattttgccaaaaatcagccaaacctgggagaaaaaatgtttctgccatgggctgcctgggtttgcatctggacagctgttatgctgttcctcatggcaattttcaacgttgcagctattctaaacaaatttaccagtttttttatgcaagaggcgataaaggggatggttggtgaattcagtgcccctgacggtagtaatcaaagtcaatcaacattccagttccagtggctatatattaatggtttgcttggatttatcttttcaatgggtgtactatatactgcattagctagcaggagcataatacctgcagcatggcaaaggagcttaattgcggactacggtgttccactgatggtgatactttggacatcattgtcatattcattgccaagcaggatcccttcaggggtccctaggaggctcttcaccccacttccttgggaacccaagtcgctccagcattggacagtagcaaaagatctgttttcagtccctacagtacatatattcctggctattgtgcctgccaccatggtcgcagggctctctttctttgaccacagtgtagcttcccagatgagtcagcagaaaccttgatctgtggtgtggtcttcttggcattcctccatctaatggagtactcccccagtctccgatgcatacaagaagcctagcggtcctcaagaggcagttgctttgcaagaagatggtccaaactgccaaggagggcatgatgaataatgctaccagttccgaagtttatgtcaaaatgcaagatgttttcataaaaatggaccacggaggcgacactgtttctgctcacaaagaactgaaggacctgaaggatgcaattattccagaagggaatggatcaagaacagtgcctgaagtatttgatcctgaaaagcatgtagatgcttacttgcctgtccgggtgaatgagcagagagtaagcaatctgttgcagtccctgttgattactggttgtattggagttacaccgctcattcagaagataccaacatcagtcctctggggttacttcgcctatatgtccatcgacagccttcctggaaaccagttctgggagaggatacagcttcttttcatcacgcctcaaagacgctacaaggttcttgaaggagcacatgcatccttcatggagtcagtgcctttcaacacaatatgcaccttcacactcttccagctaatctatctgttgatcgtctttgggatgacatggataccagtagcaggaatcctcttcccactgctcttcttcttcctcattatcatcagccacctgagggaattagatgcagccgagtacgaagaactgaaaggttttacacctgatccatcagtgtgtgaggacgagtctgttcgcagcggagatgctcagcctggatatgcttccgaaatactcgaggaattcacgactcaccgtggagagctgaagcgcaggaactctaccttccatgatgggagactacttcagcttaactctgtcaagatgacgagagagctttctcgggttccttcttggcttacaagaatcctggaagaatacgcggtttctgaatccgagctccaattaagcatgggggtgcgaagtctcatagcctcattgcttacagagtattctctgaagcaagcaactcattttaggtactgactttgggggcaaatacacggggatgagcagaggaatgtagcagagctagaaaatgtttgtaaaaaataaagacaaaaagaaatgcatgttaaacacatctaagcttcaattcagttttgtgattttttattttttattttttatttttgcatattatagtgatgtttgttgttccttatctatgttttataccaactttttttacttccgttgcaacgcacgggcacatacctagtatatatatatatataggtaacaaaggaacttcacacatcgaaatagacgaggacttccatgaagactaaattttgcagataaaaaaaaggcatattttctgtagtgctcttaacatgcttctgcagccccttcaaaaccagtacttttggtttacctccataaagactgaacattgcagttcaaaataacacatattttctgtagcgctcattagcttgcttttctggcctttaagaccagcgttttttgttcgtataaatgtaggtacgcctactataatataatctccaagatcctgatgctgctacgtttccaaaaacttcaatccttcatcacatacacttttctggccttcaatgcttttatgttcatgccttatcaagctgagctgcaattctgttggttgaatcgtgatgccggcatgccgctatgttgttgactgtccagctttgcaccaaaccgtgaaatgctttcgttcatattgaaagtatgttcataaaaatgtcatgtcatgtcaacctccggtgcagggatttgggttaccctcctatttgacgcgtattaattcaactgtttacatgtgtcgtttgtaaaaactggcgagaaccacgagccctttaatagtaaaagaaaggttggagcactcaagagaccagtaagatgtgtagaaagagaaagtgggccgaaaatggaggaagttgaggggaaatcgaactcattttcactgaattacctaaaatcccaaaaattgtgaacatttaaaatttgcttgtgtgtagttcggaagtgtaccatcgtttactgaaccaatggacacgagagaccgtccaacacatgaacgagcgtccaaaggttcacccaataacgatggacatacatattatgtacctaaagtttacggggacactgtttaaagagagagcacaaagtcctgcttttttgctttagggtacctttcaaattccaaatgttttacaacaatcgatgcagaaactagcacacatgatggatcagatttctggcttgggaccctcctccgcagaggaggcgtcgcagttgcgcacagtataatcatagtcgatcagctggggaaaggatcctcatctccatcgtcaaaaccacaacaacaacaaaaaaaaagaacaaaataagaagggtgcacaaagaaggatgttttcaggaggaggcgggcgttgttgtttcgatcagaacatctggcttaggagcgccttctccgaagagaagagctcgaaaaatcgcacagtataatcatagtcgataatttggggaaaggatcatcacctcaaaacaacttgggatccgaaaaaacaaggaaataaaacgaaatcgatacttattaacaggagattagatctaccggtaccacgcccgcagctttgacgatgtgtatgagggacgggtttggagagacgcagtgcggcgtcg

SEQ ID NO: 84936 - DNA, 598 bp, Zea Mays
tggactctgtaaacttttgaacgttatttcacgccaactgatgttgagaactacatgatctctgcaccttgccatggagctgtgctaggagcgtggctcggtgcttggcctatgccacttgactgggagagaccatggcaggaatggccaatctgtgtcacttatggtgcagttgctgggtatttgttcggaatggcagtgtcattggtcctaacagcactttacaaaagaagggttcgtgcaaaagctgactagccgttcttcccacaaagcaatgtatttgctgataacatttcttgttcctgcgagtactcatcactttcagtagccttttcacccaggttcacattgttgtattcttttgaagcccccctcattttttttgcagttgtacattgttttcttgaatgtaatgtgaaggactcagtttattactgtaaaacacacgtttgttgagagagtgcgtgttacacaaagttacctgctttattacgtacttcctccgttcttttttatctgttgagttttagttcaaaattgaactaacggatgacaaatattcgaaaacggaggtagcatgttatattatgaataaacg

SEQ ID NO: 84937 - DNA, 1697 bp, Zea Mays
aatggtaatgatttacactatagtacctgctataacaagtttaaataggccaatatccatttttagtgttgtatctaattacagttgaacttaacaaacataatttaacgttatcacgccactttttttttttgatcgtcttcatcccgcatccggcacaaaccaactgcatcaagctccaccagagaagacaggcccgccgacggccgcagccgcgggcggactcgtgagtcgcgactacgccgctgcagttcccaactcagggtgcctgcccgtaacctacccaagagcggccccgccatgcgcgcggaggtcacccagatcagcgccctaaccgccgtggccgcgcacgtgctctgctctgcgggccttgctgccgcccacgccctcgctggccgcggcgcgctcgtctccgaccccgcgctcgcccttcgccttctcgtggtctgtgaagcgcccatagtcatcgcagtgttcagctacctccggcgtgatgctaaaagttgctcgtttttcagggctgttgcaagaggattgatcggcttgcccgtgggagcgttccttaatgcatttggagcaatcattcttggggcacctgttggagtcaagtactggatagctactatttactggtcgcttgtcatgtccctgtttacgtttgttcccgcagcatgtgtctttggagcatccaggatcgattggcaggatgtgctttctcactccatttatttcacgccaactgatgttgagaactacatgatctctgcaccttgccatggagctgtgctaggagcgtggctcggtgcttggcctatgccacttgactgggagagaccatggcaggtagacataccatctttgaatctcaagtagtatgttgccaagtttctaggcatgtgaaagctggatcatgtggatgtgttgacaaatttgacatgacactaaatagctctatggaacatacttatgtttatgatctgactagggtaaacatatgggggatcacaaacagtcaaacatggccagacattaaaacaggagaagtacctgctacaggaaattcattggtttgcctgacatgacgtggagtttttttttttttgaaactctcagtatcctgatgcctcctttttatctattgtcatatgtttgatcatagatcttaccttcaagtgtcacattgatgatgattcctttgctgggatttatgacttggttactactctttgatcttttgcaggaatggccaatctgtgtcacttatggtgcagttgctgggtatttgttcggaatggcagtgtcattggtcctaacagcactttacaaaagaagggttcgtgcaaaagctgactagccgttcttcccacaaagcaatgtatttgctgataacatttcttgttcctgcgagtactcatcactttcagtagccttttcacccaggttcacattgttgtattcttttgaagcccccctcattttttttgcagttgtacattgttttcttgaatgtaatgtgaaggactcagtttattactgtaaaacacacgtttgttgagagagtgcgtgttacacaaagttacctgctttattacgtacttcctccgttcttttttatctgttgagttttagttcaaaattgaactaacggatgacaaatattcgaaaacggaggtagcatgttatattatgaataaacg

SEQ ID NO: 84938 - DNA, 1292 bp, Zea Mays
aatggtaatgatttacactatagtacctgctataacaagtttaaataggccaatatccatttttagtgttgtatctaattacagttgaacttaacaaacataatttaacgttatcacgccactttttttttttgatcgtcttcatcccgcatccggcacaaaccaactgcatcaagctccaccagagaagacaggcccgccgacggccgcagccgcgggcggactcgtgagtcgcgactacgccgctgcagttcccaactcagggtgcctgcccgtaacctacccaagagcggccccgccatgcgcgcggaggtcacccagatcagcgccctaaccgccgtggccgcgcacgtgctctgctctgcgggccttgctgccgcccacgccctcgctggccgcggcgcgctcgtctccgaccccgcgctcgcccttcgccttctcgtggtctgtgaagcgcccatagtcatcgcagtgttcagctacctccggcgtgatgctaaaagttgctcgggctgttgcaagaggattgatcggcttgcccgtgggagcgttccttaatgcatttggagcaatcattcttggggcacctgttggagtcaagtactggatagctactatttactggtcgcttgtcatgtccctgtttacgtttgttcccgcagcatgtgtctttggagcatccaggatcgattggcaggatgtgctttctcactccatttatttcacgccaactgatgttgagaactacatgatctctgcaccttgccatggagctgtgctaggagcgtggctcggtgcttggcctatgccacttgactgggagagaccatggcaggaatggccaatctgtgtcacttatggtgcagttgctgggtatttgttcggaatggcagtgtcattggtcctaacagcactttacaaaagaagggttcgtgcaaaagctgactagccgttcttcccacaaagcaatgtatttgctgataacatttcttgttcctgcgagtactcatcactttcagtagccttttcacccaggttcacattgttgtattcttttgaagcccccctcattttttttgcagttgtacattgttttcttgaatgtaatgtgaaggactcagtttattactgtaaaacacacgtttgttgagagagtgcgtgttacacaaagttacctgctttattacgtacttcctccgttcttttttatctgttgagttttagttcaaaattgaactaacggatgacaaatattcgaaaacggaggtagcatgttatattatgaataaacg

SEQ ID NO: 84939 - DNA, 2189 bp, Zea Mays
aatggtaatgatttacactatagtacctgctataacaagtttaaataggccaatatccatttttagtgttgtatctaattacagttgaacttaacaaacataatttaacgttatcacgccactttttttttttgatcgtcttcatcccgcatccggcacaaaccaactgcatcaagctccaccagagaagacaggcccgccgacggccgcagccgcgggcggactcgtgagtcgcgactacgccgctgcagttcccaactcagggtgcctgcccgtaacctacccaagagcggccccgccatgcgcgcggaggtcacccagatcagcgccctaaccgccgtggccgcgcacgtgctctgctctgcgggccttgctgccgcccacgccctcgctggccgcggcgcgctcgtctccgaccccgcgctcgcccttcgccttctcgtggtctgtgaagcgcccatagtcatcgcagtgttcagctacctccggcgtgatgctaaaagttgctcgtttttcagggctgttgcaagaggattgatcggcttgcccgtgggtttgttctatatcttgactttgattgcaggcttacttttttttgagagagtacaaggacgccgcgaactcacaccactacacaccacacatgtgtgcgcgtccattacacacactaggcctagacctatagtgcgtggaaacacgcaataccgaatgtgcacgcgtgtgtataccctatatctagacccagacacaacctgggaggcaaccagagataaactccaatgtgaggatcgaacccacgccttagctaccaacttagctaagactcatgcttactttgattcattgctctaagagtatgaagccccaaaagaacagctccatgctgcagatctgatctgtagttagtgttggggttaattagatccttgccattataaatttgatgattctgacaaacgccactacttctaacctaataggcctgatgccattataatttctcataagcatcgaaattatactggcatacaattaatccagtccctggtattatcagcatgttggactaccagtaaaaatgccggttctctttaatggaaccagtagtatgagttatcgagattctgtttgttttactccttttatttctttgatcttactgcacatctttttccgatccatgccaggagcgttccttaatgcatttggagcaatcattcttggggcacctgttggagtcaagtactggatagctactatttactggtcgcttgtcatgtccctgtttacgtttgttcccgcagcatgtgtctttggagcatccaggatcgattggcaggatgtgctttctcactccatttatttcacgccaactgatgttgagaactacatgatctctgcaccttgccatggagctgtgctaggagcgtggctcggtgcttggcctatgccacttgactgggagagaccatggcagggtaaacatatgggggatcacaaacagtcaaacatggccagacattaaaacaggagaagtacctgctacaggaaattcattggtttgcctgacatgacgtggagtttttttttttttgaaactctcagtatcctgatgcctcctttttatctattgtcatatgtttgatcatagatcttaccttcaagtgtcacattgatgatgattcctttgctgggatttatgacttggttactactctttgatcttttgcaggaatggccaatctgtgtcacttatggtgcagttgctgggtatttgttcggaatggcagtgtcattggtcctaacagcactttacaaaagaagggttcgtgcaaaagctgactagccgttcttcccacaaagcaatgtatttgctgataacatttcttgttcctgcgagtactcatcactttcagtagccttttcacccaggttcacattgttgtattcttttgaagcccccctcattttttttgcagttgtacattgttttcttgaatgtaatgtgaaggactcagtttattactgtaaaacacacgtttgttgagagagtgcgtgttacacaaagttacctgctttattacgtacttcctccgttcttttttatctgttgagttttagttcaaaattgaactaacggatgacaaatattcgaaaacggaggtagcatgttatattatgaataaacg

SEQ ID NO: 84940 - DNA, 2235 bp, Zea Mays
attagccccactacgtagtggtggtggtggtgggctcagtccatacgcggggggcacacggtacatgccctgatggcaactacttggcacgcctttgatgcgggctagggttctatacttctatcctcgcgggtacacttggtgaaaacttgatcgttcgtcccgactcgtgaacttactcggtgaggtctttgtcatccatgtcgcattgtggatttgcttgacagagactttatatagtccgcctccggcacaaactaacttaggtgttgtttggtttacaaaatgtaatgtaaataataatggtaatgatttacactatagtacctgctataacaagtttaaataggccaatatccatttttagtgttgtatctaattacagttgaacttaacaaacataatttaacgttatcacgccactttttttttttgatcgtcttcatcccgcatccggcacaaaccaactgcatcaagctccaccagagaagacaggcccgccgacggccgcagccgcgggcggactcgtgagtcgcgactacgccgctgcagttcccaactcagggtgcctgcccgtaacctacccaagagcggccccgccatgcgcgcggaggtcacccagatcagcgccctaaccgccgtggccgcgcacgtgctctgctctgcgggccttgctgccgcccacgccctcgctggccgcggcgcgctcgtctccgaccccgcgctcgcccttcgccttctcgtggtctgtgaagcgcccatagtcatcgcagtgttcagctacctccggcgtgatgctaaaagttgctcgtttttcagggctgttgcaagaggattgatcggcttgcccgtgggtttgttctatatcttgactttgattgcaggcttacttttttttgagagagtacaaggacgccgcgaactcacaccactacacaccacacatgtgtgcgcgtccattacacacactaggcctagacctatagtgcgtggaaacacgcaataccgaatgtgcacgcgtgtgtataccctatatctagacccagacacaacctgggaggcaaccagagataaactccaatgtgaggatcgaacccacgccttagctaccaacttagctaagactcatgcttactttgattcattgctctaagagtatgaagccccaaaagaacagctccatgctgcagatctgatctgtagttagtgttggggttaattagatccttgccattataaatttgatgattctgacaaacgccactacttctaacctaataggcctgatgccattataatttctcataagcatcgaaattatactggcatacaattaatccagtccctggtattatcagcatgttggactaccagtaaaaatgccggttctctttaatggaaccagtagtatgagttatcgagattctgtttgttttactccttttatttctttgatcttactgcacatctttttccgatccatgccaggagcgttccttaatgcatttggagcaatcattcttggggcacctgttggagtcaagtactggatagctactatttactggtcgcttgtcatgtccctgtttacgtttgttcccgcagcatgtgtctttggagcatccaggatcgattggcaggatgtgctttctcactccatttatttcacgccaactgatgttgagaactacatgatctctgcaccttgccatggagctgtgctaggagcgtggctcggtgcttggcctatgccacttgactgggagagaccatggcaggaatggccaatctgtgtcacttatggtgcagttgctgggtatttgttcggaatggcagtgtcattggtcctaacagcactttacaaaagaagggttcgtgcaaaagctgactagccgttcttcccacaaagcaatgtatttgctgataacatttcttgttcctgcgagtactcatcactttcagtagccttttcacccaggttcacattgttgtattcttttgaagcccccctcattttttttgcagttgtacattgttttcttgaatgtaatgtgaaggactcagtttattactgtaaaacacacgtttgttgagagagtgcgtgttacacaaagttacctgctttattacgtacttcctccgttcttttttatctgttgagttttagttcaaaattgaactaacggatgacaaatattcgaaaacggaggtagcatgttatattatgaataaacg

SEQ ID NO: 84941 - DNA, 914 bp, Zea Mays
cgacgagctctggtcctgggcatggcggcgcatccgcactccgcctccatgttctgtgccatggatccgtgcagtgcctctgcccctcgccggctagctgacagctacacctctcatgtctccacgacggctccacacaaccacgtctatgaacagtaaacaggattgagcgttccttaatgcatttggagcaatcattcttggggcacctgttggagtcaagtactggatagctactatttactggtcgcttgtcatgtccctgtttacgtttgttcccgcagcatgtgtctttggagcatccaggatcgattggcaggatgtgctttctcactccatttatttcacgccaactgatgttgagaactacatgatctctgcaccttgccatggagctgtgctaggagcgtggctcggtgcttggcctatgccacttgactgggagagaccatggcaggaatggccaatctgtgtcacttatggtgcagttgctgggtatttgttcggaatggcagtgtcattggtcctaacagcactttacaaaagaagggttcgtgcaaaagctgactagccgttcttcccacaaagcaatgtatttgctgataacatttcttgttcctgcgagtactcatcactttcagtagccttttcacccaggttcacattgttgtattcttttgaagcccccctcattttttttgcagttgtacattgttttcttgaatgtaatgtgaaggactcagtttattactgtaaaacacacgtttgttgagagagtgcgtgttacacaaagttacctgctttattacgtacttcctccgttcttttttatctgttgagttttagttcaaaattgaactaacggatgacaaatattcgaaaacggaggtagcatgttatattatgaataaacg

SEQ ID NO: 84942 - DNA, 3943 bp, Zea Mays
cgcactccacccaccgccacctactcgctacactctccatggctgccagataacggctggtgcttaaactactccggccgagctggccgtgctaatgccgctgcggctgcgtgcggtggcacagcgcggcctgcccctgtcgcgatgacacgccgcccggcctcctccgcgccttcggcggcccggctcctcctcctcctcctgcttcttctgctgctgcactgccagtgccaccgcgccggcgcggcgacggacgcggagcggcgggcgctgctggacttcaaggcggcggtgacggcggacccggggggcgtgctggcgtcgtggacgcccacgggggacccctgcggcttcgtcggggtcacctgcgacgcgtccacgggcgccgtgaagcggctgcgcgtccacggcgccgggctggccggcgcgctctcgccctccctcgcgcgcctccccgcgctcgagtccgtctcgctcttcggcaacgccctcacgggcggcgtcccgccgagcctccgcttgctggcgcccacgctccgcaagctcaacctcagccggaacgcgctggccggcgagatcccgccgttcctcggcgccttcccgtggctccgcctgctcgacctctcccacaaccgcttcgccggcgggatccccgccgcgctcttcgacccctgcccccgcctccgctacgtctcgctcgcgcacaaccacctcaccggccccgtcccgcccgccatcgccaactgctcgcgcctcgccggcttcgacttctcctacaaccgcctctccggcgagttcccggaccgggcctgcgcgccgccggagatgagctacatctccgtccgcggcaacgcgctctccggggacatagccgccaagctcgcctcctgcggcagcattgacctcttcgacgtcgggagcaacagcttcaccggagctgcgccctttgcgctccttgcatcggtaaacatcacctacttcaatgtctcctccaacgcctttgacggtgaaatccccagcattgcgacttgcggcaccagattctcgtacctggacgcgtccggcaaccgcctcacggggccggtgccggagagcgtggtgaactgccgtggcctcagggttctggatttgggggcgaatgctcttgctggagctgtaccgcctgtgattgggacactgcggtcgctctccgttctccggctcgcgggcaaccctcgcatttccggttccattccggctgagcttggagggattgagatgctcgtcacgctcgacctcgcgggccttgctctcacaggagagattccagggtcactcagccagtgccagttcctgcttgaactgaatctgtccggcaacaagctgcaaggagtcatcccaggcacactcaacaacataacctacctcaagatgcttgatctccacgggaaccagctccaagggggcattcccgtcacgcttgggcagctcacaaaccttgttctcctagacctctcggagaaccagctgactgggccaatccctcaagagcttgggaacctctctaacctgacacacttcaacgtgtccttcaacaacctatctggcatgatcccttccgagccagcattgcagaaatttgatttcaccgcatacatggataacccgttactatgtggctctccactgcccaataactgtgggcctgggactgggatgaagcaccggaaacgattgcgtgtgcctgtcataatcgccattgttgctgcagccctgatacttgttggaatatgcattgtttgcgcgttaaacatcaaggcttacacacgtaagggcacagacggggacgggaaggaagaggaagaggttcttgtgtccgagagcacccctccagctgcctctccaggctcgaatgcaatcatcgggaaactggtgcttttcagcaagagcttgccttcaaggtatgaagactgggaaactgggaccaaggcgctacttgataaagactgtctcatcggtggtgggtcgattggtacggtgtacaaggccacttttgagaacggcctgtccattgctgtgaagaaactggagacagcagggagggtgagaggccaggatgagttcgagcatcagatgagccagcttggtaacctcagccaccccaacctggtcgcttttcagggctactactggtcatcctcgatgcagttgcttctgtcagaattcatggccaacgggagcttgtacgaccacctccacggctaccgtcctcctcctcgcgctctctctgagagcagcagcagcagcagaggtggtggaggtgaactgttctgggaacggaggttcaacattgcgctcggagcagcccgtgcactcgcttaccttcaccatgattgctggccacagatcctgcacctcaacatcaagtcctccaacatcatgttagatgggagatacgaagctagactgtctgactacgggttggggaagctgctgccgatactaggaagcattgagctgagcagaattcacaccgcgatcgggtacattgcgccggagctggcatctccgacactgagatatagcgacaagagtgacgtgtttagctttggggtggttttgcttgagatcgtgacggggaggaaacctgtagacagccctgggataggagctacagctgtggttctccgtgactacgtgagagggatattggaggacggaactgcgtcggactgcttcgatcgaagcctgagggggtttgtcgaagctgagctggttcaagtgctcaaactgggcctggtgtgcacttccaacacaccgtcaagccgacctagcatggcagaagtggtacagttcttggagtccgttagggttagctcttgaccttctgctgtcggatcggaacatagcagcagaattaggatgttaacatggaaaggattttctgattttttcaacagatgaaggcatagcaaaggaccaggagtttcagtttccccgggcgccatcagagaagagcttggaggtggccagcgacgaggaccagctgaacaaggacagtcagtccatggaagcccattgagaccgaggtgtgcgtacaagctctgtccgttgaggaaaagtatcacatcgctgcagcatattcagacaaaaattcataccacatcgctacgggaacgggggtccattgcatctgcagtccgctgagacaacaggcaagccacggatgcttcttctcattggcaggcgcaggttgttttttagtattgtattattgccattgtatgatgctgacaccacaaccgctcccgctaaacgctaatgacagtgggttttcccagctcttgctctgtctgatgtttcaggggctcatgaaggagctcttcaccatcgcgtgttctttagctgcacggctccggcctccggggctgctgcacatggacgtgccaaacggtgcagaatgcacgtgaggccataatggagagaggaagcatggcaaggtagaaagcctagccgtcgggcgtcgggtgactggtgttgtaccgtcgtctcgtgaaaatattggtccttttttttttaaatggaacggtatgcaggagaggagacgcactgcaactttctttgtacagcagattcgaaagaaatgtcctgctgctggtccatattatcattcattcatgtggtatggaagcacttggtattgaacgtgtgaacttttgttgcaccgtctgaaagaccatcagactatctccagcggctcacccattcttatacttgtatttaaactttactttacaaacaatacaatttatagtgcaaaacaatgttttgggtgaccatatagatgaaccgttggacacggtctcactagagttcatgtgaaactagtgaacttttgttacaccgtctcaaagaccatgtactagagttcatgtgaaactagtgaaatcctgttacaccatct

SEQ ID NO: 84943 - DNA, 4273 bp, Zea Mays
cctcccgacctgccccgccccgggcgggcgaccagaacacatccgacaccaaaactaggcgcccgcttcgacgcaccataacgcactccacccaccgccacctactcgctacactctccatggctgccagataacggctggtgcttaaactactccggccgagctggccgtgctaatgccgctgcggctgcgtgcggtggcacagcgcggcctgcccctgtcgcgatgacacgccgcccggcctcctccgcgccttcggcggcccggctcctcctcctcctcctgcttcttctgctgctgcactgccagtgccaccgcgccggcgcggcgacggacgcggagcggcgggcgctgctggacttcaaggcggcggtgacggcggacccggggggcgtgctggcgtcgtggacgcccacgggggacccctgcggcttcgtcggggtcacctgcgacgcgtccacgggcgccgtgaagcggctgcgcgtccacggcgccgggctggccggcgcgctctcgccctccctcgcgcgcctccccgcgctcgagtccgtctcgctcttcggcaacgccctcacgggcggcgtcccgccgagcctccgcttgctggcgcccacgctccgcaagctcaacctcagccggaacgcgctggccggcgagatcccgccgttcctcggcgccttcccgtggctccgcctgctcgacctctcccacaaccgcttcgccggcgggatccccgccgcgctcttcgacccctgcccccgcctccgctacgtctcgctcgcgcacaaccacctcaccggccccgtcccgcccgccatcgccaactgctcgcgcctcgccggcttcgacttctcctacaaccgcctctccggcgagttcccggaccgggcctgcgcgccgccggagatgagctacatctccgtccgcggcaacgcgctctccggggacatagccgccaagctcgcctcctgcggcagcattgacctcttcgacgtcgggagcaacagcttcaccggagctgcgccctttgcgctccttgcatcggtaaacatcacctacttcaatgtctcctccaacgcctttgacggtgaaatccccagcattgcgacttgcggcaccagattctcgtacctggacgcgtccggcaaccgcctcacggggccggtgccggagagcgtggtgaactgccgtggcctcagggttctggatttgggggcgaatgctcttgctggagctgtaccgcctgtgattgggacactgcggtcgctctccgttctccggctcgcgggcaaccctcgcatttccggttccattccggctgagcttggagggattgagatgctcgtcacgctcgacctcgcgggccttgctctcacaggagagattccagggtcactcagccagtgccagttcctgcttgaactgaatctgtccggcaacaagctgcaaggagtcatcccaggcacactcaacaacataacctacctcaagatgcttgatctccacgggaaccagctccaagggggcattcccgtcacgcttgggcagctcacaaaccttgttctcctagacctctcggagaaccagctgactgggccaatccctcaagagcttgggaacctctctaacctgacacacttcaacgtgtccttcaacaacctatctggcatgatcccttccgagccagcattgcagaaatttgatttcaccgcatacatggataacccgttactatgtggctctccactgcccaataactgtgggcctgggactgggatgaagcaccggaaacgattgcgtgtgcctgtcataatcgccattgttgctgcagccctgatacttgttggaatatgcattgtttgcgcgttaaacatcaaggcttacacacgtaagggcacagacggggacgggaaggaagaggaagaggttcttgtgtccgagagcacccctccagctgcctctccaggctcgaatgcaatcatcgggaaactggtgcttttcagcaagagcttgccttcaaggtatgaagactgggaaactgggaccaaggcgctacttgataaagactgtctcatcggtggtgggtcgattggtacggtgtacaaggccacttttgagaacggcctgtccattgctgtgaagaaactggagacagcagggagggtgagaggccaggatgagttcgagcatcagatgagccagcttggtaacctcagccaccccaacctggtcgcttttcagggctactactggtcatcctcgatgcagttgcttctgtcagaattcatggccaacgggagcttgtacgaccacctccacggctaccgtcctcctcctcgcgctctctctgagagcagcagcagcagcagaggtggtggaggtgaactgttctgggaacggaggttcaacattgcgctcggagcagcccgtgcactcgcttaccttcaccatgattgctggccacagatcctgcacctcaacatcaagtcctccaacatcatgttagatgggagatacgaagctagactgtctgactacgggttggggaagctgctgccgatactaggaagcattgagctgagcagaattcacaccgcgatcgggtacattgcgccggagctggcatctccgacactgagatatagcgacaagagtgacgtgtttagctttggggtggttttgcttgagatcgtgacggggaggaaacctgtagacagccctgggataggagctacagctgtggttctccgtgactacgtgagagggatattggaggacggaactgcgtcggactgcttcgatcgaagcctgagggggtttgtcgaagctgagctggttcaagtgctcaaactgggcctggtgtgcacttccaacacaccgtcaagccgacctagcatggcagaagtggtacagttcttggagtccgttagggttagctcttgaccttctgctgtcggatcggaacatagcagcagaattaggatgttaacatggaaaggattttctgattttttcaacagatgaaggtcacattctctttttttttaaatttttttggttctttactgtggcgcagcttcatttgtaaattgtatttagatttgttactgaataagtcattgttttggtcgaattactacatccatgtctatgattttgtcctttcggtcttcggtctatgtaaggctctttctatgttgtccgaagaccattttgcttcatggtgtgggcttaaagatgagttggtacagtctaattgtatatctagtttgcaggcatagcaaaggaccaggagtttcagtttccccgggcgccatcagagaagagcttggaggtggccagcgacgaggaccagctgaacaaggacagtcagtccatggaagcccattgagaccgaggtgtgcgtacaagctctgtccgttgaggaaaagtatcacatcgctgcagcatattcagacaaaaattcataccacatcgctacgggaacgggggtccattgcatctgcagtccgctgagacaacaggcaagccacggatgcttcttctcattggcaggcgcaggttgttttttagtattgtattattgccattgtatgatgctgacaccacaaccgctcccgctaaacgctaatgacagtgggttttcccagctcttgctctgtctgatgtttcaggggctcatgaaggagctcttcaccatcgcgtgttctttagctgcacggctccggcctccggggctgctgcacatggacgtgccaaacggtgcagaatgcacgtgaggccataatggagagaggaagcatggcaaggtagaaagcctagccgtcgggcgtcgggtgactggtgttgtaccgtcgtctcgtgaaaatattggtccttttttttttaaatggaacggtatgcaggagaggagacgcactgcaactttctttgtacagcagattcgaaagaaatgtcctgctgctggtccatattatcattcattcatgtggtatggaagcacttggtattgaacgtgtgaacttttgttgcaccgtctgaaagaccatcagactatctccagcggctcacccattcttatacttgtatttaaactttactttacaaacaatacaatttatagtgcaaaacaatgttttgggtgaccatatagatgaaccgttggacacggtctcactagagttcatgtgaaactagtgaacttttgttacaccgtctcaaagaccatgtactagagttcatgtgaaactagtgaaatcctgttacaccatct

SEQ ID NO: 84944 - DNA, 3619 bp, Zea Mays
agggggctgcttaggggcggcgttgcagttagtctaagcaggagcaggcaggaggccgcgcggcgcgcgggcagggtgctgcggcaacagagccacagcgggcaacgacaagggaacgggaaaagccagccagatgcgacggcaaaacggcacgagggaggaagaagggcactggggacagtgggacatgatggactcgggaggcgccgccgtccataaaatggagggagagaggccgtcgactcaactgacgggcctcaggccgagccaagcagaccacgcgaccccagctagctactccagttaccaggcacagcacaggcgcccacgcgctccagcagtgagggagggaggccctgccacccgtgcgtgccgtgccgtcctggtcccgcccctcccctgcggccaagagagagagagagagcgccgagcccgccccgccagcgccgcgcgattcgccgatggccagccatgaggcgtgctgcggcaccatgttctgggtgtacctcatgtcctgcgtcggcctcgtcatgttcgccggcctcatgtcggggctcaccctcggcctcatgtccctcagcctcgtcgacctcgaggtgctcgccaaggccggcacgcccaaggacaagctcaacgccgccaggatcctcccggtcgtcaagaaccagcacctgctcctctgcacgctcctcatcggcaactcgctcgccatggaggcgctgcccatattcctcgacacgctcgtgccgccctacgtcgccgtcctcatctccgtcacgctcatcctcgccttcggggagatcatgccgcaagccatctgcacgcgctacgggctcagcgtgggggccaaggcggcgcccgtggtccggctgctgctcatcctcttcttccccgtcgcctacccgatcagcaagttattggactggctcctgggaaagggacattttgcactaatgagaagagctgagctaaagacgttagttgatatgcatggcaatgaggctggaaaaggtggagagctgactcatgatgaaaccactatcattacaggagctctggagctgactcaaaagattgcaaaagatgccatgactgctatatctgaaacattctcacttgacataaatgctaagctggacttacacacaatgggcatgataatgactagagggcatagtcgtgttcctatatactctgggatgccaagcaatattatcggccttatattggtaaaaaacttgattacttgccgcgctgaagatgaagtgcccattcgtaatcttactatcagaaaaattccaagggtggctgatgatcttcctctctatgacattctaaatgagttccagaaaggtcacagccacatggctgtggtaattaaacgaacaaaggaagcaggagtatccactgaaaagcaaaagagcacaactgccgattataaaataaaccccaaagatgctcgtgctgatggctcatccccttcttatggtagcactgccgtaagtcgtagaattaacatagagaagcatggagatgggcgcccatacaataagaaatcagaaaggaagcgggaaaacattcttgattttaacaacgatccacttccaagctattcaatggatgaggaggcagtgggaataatcacaatggaagatgtcatggaagaacttctacaggaagaaatctatgatgaaacagatgagtatgttgatgtacataacaagatcaggataaacatgttgactccaggcaaatcgctgtcacctgctatatctcctggtggtgggcccttatctcaggggtttcgaaggactcctatggcatctccgttctcaccataccaccatggtagttctgtcttgcgttccccggcttcgaaccatggtcagtcacctgggactttaccgacaatactgtcccctggaagatcacctactgcacagacacctgggcaaagttcaccaaacggaagtcaggtttcaataaactccaacggtcaacataaaaaggacggtgagagctaacatcccagaagattggttctcggatgaaggtctcgtctcaagacggcatgcgtgatcaaattatgacattgctagcgtaggattaagctgcgagtataagtagcacagctctcttggcccatagttttgatcgcttgcctgtacatatatgcttcagcatccggacctttagtatgtcctaatcctcgctctgtattgtagaggtcacatcttatatagttataatatatctggtgagggggaaaagagctaagcgttggactgaatatattaaagaaaaaatcaagctgattttgcgacttgtgatcgatcactgttttcatggactcggtggagacgataacaactcagatgcatatcaggtcaagccgatggttgctgtcagttcagcagcatcaatagagaatgatcagagtgttgcagtcacccatcttctaggttcgtagcgttgtatacccggccgtatgcttgcgacccaaggcacgcacgcggcgatgctcgcactcccgctgcctctgcctggcttctagattccagccgtgccccctgcccccacgcagacgcagcgcactcgtccgttggttgtttcgtgagccgaagatccaggcctggcctgccgccctgccgtgtatcgctggcggtgcgtccctgcgtgcgtggcctcccgcgccaccgccacgttccaagtcgccggctcgcaggtcgcacccatccactgatcaccgtcgaggtgggggtgaccgagaccgacggaggactaggcatatgctgcaggcgagctcggatcggccagcgggcctgctgtgggtgcccgggatgagcccgtgtccgacgacgggcgcggggccgtcggagagggcgcaggagatcgcgcggcggcgggaggagatgctgcacgacctccccgagtccgagtacgagctctcgctcaccgacctcgtcgagaaggccgcgggcgggggcgactgtggcgaagccgcgcccgcgcccatggcagaggggaaggacccgggcgcctcacggccggcgcccggcgggcagctgccgcccgcggcagcgaggagggcgtcggcgcggcggcgggacagcgggggcagcttccgcttccgcagcagcagcgacggcgtcctgctcaacttctacatgccgcggtcgctcacccggagcttcaccgcgccgcgccccgcccggacgccgtcgtccgcatccggctgccggagccccaccatcgcatccgactgcagcaagagggagagggactcggacgccgagaccgtcaagtgctggtcgttgctgtgggatcggcggtggcgcaagtccagccggcgggacccgggcgcgccgcccagcgagagcgagtccgccatccgcgccgcgtcggtcgtcaaagcgaagcggccaagcactccgctccgccggcccatatctgagccgactttttttcgtccgtctcctgccccgcctgccggataagttgtcgcatccagttttgtatgttaataaaaactaggtacctagcgctcatgtatccaatcacacctatagtattactatataatattaaattaaaataatttatcatattgatattcctg

SEQ ID NO: 84945 - DNA, 1743 bp, Zea Mays
ggcgcggccccggcgtttatagttattggactggctcctgggaaagggacattttgcactaatgagaagagctgagctaaagacgttagttgatatgcatggcaatgaggctggaaaaggtggagagctgactcatgatgaaaccactatcattacaggagctctggagctgactcaaaagattgcaaaagatgccatgactgctatatctgaaacattctcacttgacataaatgctaagctggacttacacacaatgggcatgataatgactagagggcatagtcgtgttcctatatactctgggatgccaagcaatattatcggccttatattggtaaaaaacttgattacttgccgcgctgaagatgaagtgcccattcgtaatcttactatcagaaaaattccaagggtggctgatgatcttcctctctatgacattctaaatgagttccagaaaggtcacagccacatggctgtggtaattaaacgaacaaaggaagcaggagtatccactgaaaagcaaaagagcacaactgccgattataaaataaaccccaaagatgctcgtgctgatggctcatccccttcttatggtagcactgccgtaagtcgtagaattaacatagagaagcatggagatgggcgcccatacaataagaaatcagaaaggaagcgggaaaacattcttgattttaacaacgatccacttccaagctattcaatggatgaggaggcagtgggaataatcacaatggaagatgtcatggaagaacttctacaggaagaaatctatgatgaaacagatgagtatgttgatgtacataacaagatcaggataaacatgttgactccaggcaaatcgctgtcacctgctatatctcctggtggtgggcccttatctcaggggtttcgaaggactcctatggcatctccgttctcaccataccaccatggtagttctgtcttgcgttccccggcttcgaaccatggtcagtcacctgggactttaccgacaatactgtcccctggaagatcacctactgcacagacacctgggcaaagttcaccaaacggaagtcaggtttcaataaactccaacggtcaacataaaaaggacggtgagagctaacatcccagaagattggttctcggatgaaggtctcgtctcaagacggcatgcgtgatcaaattatgacattgctagcgtaggattaagctgcgagtataagtagcacagctctcttggcccatagttttgatcgcttgcctgtacatatatgcttcagcatccggacctttagtatgtcctaatcctcgctctgtattgtagaggtcacatcttatatagttataatatatctggtgagggggaaaagagctaagcgttggactgaatatattaaagaaaaaatcaagctgattttgcgacttgtgatcgatcactgttttcatggactcggtggagacgataacaactcagatgcatatcaggtcaagccgatggttgctgtcagttcagcagcatcaatagagaatgatcagagtgttgcagtcacccatcttctaggttcgtagcgttgtatacccggccgtatgcttgcgacccaaggcacgcacgcggcgatgctcgcactcccgctgcctctgcctggcttctagattccagccgtgccccctgcccccacgcagacgcagcgcactcgtccgttggttgtttcgtgagccgaagatccaggcctg

SEQ ID NO: 84946 - DNA, 2468 bp, Zea Mays
agggggctgcttaggggcggcgttgcagttagtctaagcaggagcaggcaggaggccgcgcggcgcgcgggcagggtgctgcggcaacagagccacagcgggcaacgacaagggaacgggaaaagccagccagatgcgacggcaaaacggcacgagggaggaagaagggcactggggacagtgggacatgatggactcgggaggcgccgccgtccataaaatggagggagagaggccgtcgactcaactgacgggcctcaggccgagccaagcagaccacgcgaccccagctagctactccagttaccaggcacagcacaggcgcccacgcgctccagcagtgagggagggaggccctgccacccgtgcgtgccgtgccgtcctggtcccgcccctcccctgcggccaagagagagagagagagcgccgagcccgccccgccagcgccgcgcgattcgccgatggccagccatgaggcgtgctgcggcaccatgttctgggtgtacctcatgtcctgcgtcggcctcgtcatgttcgccggcctcatgtcggggctcaccctcggcctcatgtccctcagcctcgtcgacctcgaggtgctcgccaaggccggcacgcccaaggacaagctcaacgccgccaggatcctcccggtcgtcaagaaccagcacctgctcctctgcacgctcctcatcggcaactcgctcgccatggaggcgctgcccatattcctcgacacgctcgtgccgccctacgtcgccgtcctcatctccgtcacgctcatcctcgccttcggggagatcatgccgcaagccatctgcacgcgctacgggctcagcgtgggggccaaggcggcgcccgtggtccggctgctgctcatcctcttcttccccgtcgcctacccgatcagcaagttattggactggctcctgggaaagggacattttgcactaatgagaagagctgagctaaagacgttagttgatatgcatggcaatgaggctggaaaaggtggagagctgactcatgatgaaaccactatcattacaggagctctggagctgactcaaaagattgcaaaagatgccatgactgctatatctgaaacattctcacttgacataaatgctaagctggacttacacacaatgggcatgataatgactagagggcatagtcgtgttcctatatactctgggatgccaagcaatattatcggccttatattggtaaaaaacttgattacttgccgcgctgaagatgaagtgcccattcgtaatcttactatcagaaaaattccaaggctcatccccttcttatggtagcactgccgtaagtcgtagaattaacatagagaagcatggagatgggcgcccatacaataagaaatcagaaaggaagcgggaaaacattcttgattttaacaacgatccacttccaagctattcaatggatgaggaggcagtgggaataatcacaatggaagatgtcatggaagaacttctacaggaagaaatctatgatgaaacagatgagtatgttgatgtacataacaagatcaggataaacatgttgactccaggcaaatcgctgtcacctgctatatctcctggtggtgggcccttatctcaggggtttcgaaggactcctatggcatctccgttctcaccataccaccatggtagttctgtcttgcgttccccggcttcgaaccatggtcagtcacctgggactttaccgacaatactgtcccctggaagatcacctactgcacagacacctgggcaaagttcaccaaacggaagtcaggtttcaataaactccaacggtcaacataaaaaggacggtgagagctaacatcccagaagattggttctcggatgaaggtctcgtctcaagacggcatgcgtgatcaaattatgacattgctagcgtaggattaagctgcgagtataagtagcacagctctcttggcccatagttttgatcgcttgcctgtacatatatgcttcagcatccggacctttagtatgtcctaatcctcgctctgtattgtagaggtcacatcttatatagttataatatatctggtgagggggaaaagagctaagcgttggactgaatatattaaagaaaaaatcaagctgattttgcgacttgtgatcgatcactgttttcatggactcggtggagacgataacaactcagatgcatatcaggtcaagccgatggttgctgtcagttcagcagcatcaatagagaatgatcagagtgttgcagtcacccatcttctaggttcgtagcgttgtatacccggccgtatgcttgcgacccaaggcacgcacgcggcgatgctcgcactcccgctgcctctgcctggcttctagattccagccgtgccccctgcccccacgcagacgcagcgcactcgtccgttggttgtttcgtgagccgaagatccaggcctg

SEQ ID NO: 84947 - DNA, 2589 bp, Zea Mays
agggggctgcttaggggcggcgttgcagttagtctaagcaggagcaggcaggaggccgcgcggcgcgcgggcagggtgctgcggcaacagagccacagcgggcaacgacaagggaacgggaaaagccagccagatgcgacggcaaaacggcacgagggaggaagaagggcactggggacagtgggacatgatggactcgggaggcgccgccgtccataaaatggagggagagaggccgtcgactcaactgacgggcctcaggccgagccaagcagaccacgcgaccccagctagctactccagttaccaggcacagcacaggcgcccacgcgctccagcagtgagggagggaggccctgccacccgtgcgtgccgtgccgtcctggtcccgcccctcccctgcggccaagagagagagagagagcgccgagcccgccccgccagcgccgcgcgattcgccgatggccagccatgaggcgtgctgcggcaccatgttctgggtgtacctcatgtcctgcgtcggcctcgtcatgttcgccggcctcatgtcggggctcaccctcggcctcatgtccctcagcctcgtcgacctcgaggtgctcgccaaggccggcacgcccaaggacaagctcaacgccgccaggatcctcccggtcgtcaagaaccagcacctgctcctctgcacgctcctcatcggcaactcgctcgccatggaggcgctgcccatattcctcgacacgctcgtgccgccctacgtcgccgtcctcatctccgtcacgctcatcctcgccttcggggagatcatgccgcaagccatctgcacgcgctacgggctcagcgtgggggccaaggcggcgcccgtggtccggctgctgctcatcctcttcttccccgtcgcctacccgatcagcaagttattggactggctcctgggaaagggacattttgcactaatgagaagagctgagctaaagacgttagttgatatgcatggcaatgaggctggaaaaggtggagagctgactcatgatgaaaccactatcattacaggagctctggagctgactcaaaagattgcaaaagatgccatgactgctatatctgaaacattctcacttgacataaatgctaagctggacttacacacaatgggcatgataatgactagagggcatagtcgtgttcctatatactctgggatgccaagcaatattatcggccttatattggtaaaaaacttgattacttgccgcgctgaagatgaagtgcccattcgtaatcttactatcagaaaaattccaagaaaggtcacagccacatggctgtggtaattaaacgaacaaaggaagcaggagtatccactgaaaagcaaaagagcacaactgccgattataaaataaaccccaaagatgctcgtgctgatggctcatccccttcttatggtagcactgccgtaagtcgtagaattaacatagagaagcatggagatgggcgcccatacaataagaaatcagaaaggaagcgggaaaacattcttgattttaacaacgatccacttccaagctattcaatggatgaggaggcagtgggaataatcacaatggaagatgtcatggaagaacttctacaggaagaaatctatgatgaaacagatgagtatgttgatgtacataacaagatcaggataaacatgttgactccaggcaaatcgctgtcacctgctatatctcctggtggtgggcccttatctcaggggtttcgaaggactcctatggcatctccgttctcaccataccaccatggtagttctgtcttgcgttccccggcttcgaaccatggtcagtcacctgggactttaccgacaatactgtcccctggaagatcacctactgcacagacacctgggcaaagttcaccaaacggaagtcaggtttcaataaactccaacggtcaacataaaaaggacggtgagagctaacatcccagaagattggttctcggatgaaggtctcgtctcaagacggcatgcgtgatcaaattatgacattgctagcgtaggattaagctgcgagtataagtagcacagctctcttggcccatagttttgatcgcttgcctgtacatatatgcttcagcatccggacctttagtatgtcctaatcctcgctctgtattgtagaggtcacatcttatatagttataatatatctggtgagggggaaaagagctaagcgttggactgaatatattaaagaaaaaatcaagctgattttgcgacttgtgatcgatcactgttttcatggactcggtggagacgataacaactcagatgcatatcaggtcaagccgatggttgctgtcagttcagcagcatcaatagagaatgatcagagtgttgcagtcacccatcttctaggttcgtagcgttgtatacccggccgtatgcttgcgacccaaggcacgcacgcggcgatgctcgcactcccgctgcctctgcctggcttctagattccagccgtgccccctgcccccacgcagacgcagcgcactcgtccgttggttgtttcgtgagccgaagatccaggcctg

SEQ ID NO: 84948 - DNA, 1183 bp, Zea Mays
aaaaaatctgcagatttgtggattggaacgtgaaacgactccaatcgtgttactatactggcagtatcgtgtctcgcaagtttgctgctcttgagagttgagatgctttgctgacgaaagggggcaggccgagaaggagttcaaggtggaggtggaagcaatcggtcgtgttcggcacaaaaatctcgtcaggttgctcggctactgcgtagagggtgcttacaggatgctcgtgtatgagtatgtggacaatggtaatcttgaccagtggcttcatggtgatgttggcgaagtgagcccactgacatgggacatccttcttgaccagcagtggaacgccaaagtatcggatttcgggctcgcaaagctgttgtgctcggagagaagctacgttacgacccgtgtcatgggaaccttcggttacgtggcgcctgagtacgccagcaccggcatgctgaacgagaggagcgatgtgtatagcttcggcgtgctgataatggagatcatcaccggcagatgtcctgtggattacacaagggcggctggagaggtgcagctggtggagtggctcaagaacatggtggccgagaggaaagcggaggaggtagtggacagtaagatggccgagaggcctcctcccaagacgctgaagcgggcgctcctggtggcgctccgctgcgtggaccctgacgcgaacaagcggcctaagatggggcatgtgatccacatgctcgaaatggacgatctccagttccgagacgataagaggcccggggccgggagagatggtcgtcgtccccagggtccggataggtacagctccaagctaggtggaggaagggagcctcagcaagcgcgagcaccagcgtcggtacagatgagatgattgtcattagagagtagcgatattaaccatgttatttttttcccgtcagtaaatacattctttcccaactcgttccatcgattctcaatggtcttcgattgtattatatatgtggagcaaccatcattctgtgacgatacttgaatcacacacacacacacacacaatgtagtggtaggatggtgctgtgtgacttaacatgcccaggccgaaaacctacagtttgtttacatggacgacagagaagagaagtcgccttcgttttcaacggctagcttgcttgtatataaaaataat

SEQ ID NO: 84949 - DNA, 1380 bp, Zea Mays
aaaaaactaacaatctctttgctggttctaatctaaccgttccttgaatggcatggcttagtgaggttcgaacggatggtactgtcgggcgagtaaaaaaaaaatctgcagatttgtggattggaacgtgaaacgactccaatcgtgttactatactggcagtatcgtgtctcgcaagtttgctgctcttgagagttgagatgctttgctgacgaaagggggcaggccgagaaggagttcaaggtggaggtggaagcaatcggtcgtgttcggcacaaaaatctcgtcaggttgctcggctactgcgtagagggtgcttacaggatgctcgtgtatgagtatgtggacaatggtaatcttgaccagtggcttcatggtgatgttggcgaagtgagcccactgacatgggacatcaggatgaacattatgcttgccacagctaaagggctggcctacctccacgaggggctggaaccgaaggtggtccaccgcgacatcaaggctagcaacatccttcttgaccagcagtggaacgccaaagtatcggatttcgggctcgcaaagctgttgtgctcggagagaagctacgttacgacccgtgtcatgggaaccttcggttacgtggcgcctgagtacgccagcaccggcatgctgaacgagaggagcgatgtgtatagcttcggcgtgctgataatggagatcatcaccggcagatgtcctgtggattacacaagggcggctggagaggtgcagctggtggagtggctcaagaacatggtggccgagaggaaagcggaggaggtagtggacagtaagatggccgagaggcctcctcccaagacgctgaagcgggcgctcctggtggcgctccgctgcgtggaccctgacgcgaacaagcggcctaagatggggcatgtgatccacatgctcgaaatggacgatctccagttccgagacgataagaggcccggggccgggagagatggtcgtcgtccccagggtccggataggtacagctccaagctaggtggaggaagggagcctcagcaagcgcgagcaccagcgtcggtacagatgagatgattgtcattagagagtagcgatattaaccatgttatttttttcccgtcagtaaatacattctttcccaactcgttccatcgattctcaatggtcttcgattgtattatatatgtggagcaaccatcattctgtgacgatacttgaatcacacacacacacacacacaatgtagtggtaggatggtgctgtgtgacttaacatgcccaggccgaaaacctacagtttgtttacatggacgacagagaagagaagtcgccttcgttttcaacggctagcttgcttgtatataaaaataat

SEQ ID NO: 84950 - DNA, 1737 bp, Zea Mays
gcggcttctccatccagcccagaccccagagtcacagtcggggatcgacataataagcgacaggagacggcatggctggctgcgctgcgccggcgacgccaaggtcgtcgctgatcctcccgcgtgcatcctcgcactcccagcccagcgctgtcggcctcacctccgattgcgtcgccgcctcccgtcgccggcgccgcgatttcgttttcgtcgtcaacccctcctgcgccaatggccgcacgggaggaaagcagtggaagcagttgctgccgctcctccgaagtccgaacccgtctcgctgaccagtgcaacatttgcgagtgcatcacaagggatattcacaagggaggtgcgcgtgtgttcccttgtcacaagggaggctataaaggatggggctgatgctgtgatcgctgttggaggtgatggtacgcttcatgaggtgcctatggtttcttttggaaaggaacattgtttcttctatacactggggtttgtttagtagtgaagtaccttgtcctctgacagctcattccacttggaactggctcagattttgcttggacatttggctgggggcaggccgagaaggagttcaaggtggaggtggaagcaatcggtcgtgttcggcacaaaaatctcgtcaggttgctcggctactgcgtagagggtgcttacaggatgctcgtgtatgagtatgtggacaatggtaatcttgaccagtggcttcatggtgatgttggcgaagtgagcccactgacatgggacatcaggatgaacattatgcttgccacagctaaagggctggcctacctccacgaggggctggaaccgaaggtggtccaccgcgacatcaaggctagcaacatccttcttgaccagcagtggaacgccaaagtatcggatttcgggctcgcaaagctgttgtgctcggagagaagctacgttacgacccgtgtcatgggaaccttcggttacgtggcgcctgagtacgccagcaccggcatgctgaacgagaggagcgatgtgtatagcttcggcgtgctgataatggagatcatcaccggcagatgtcctgtggattacacaagggcggctggagaggtgcagctggtggagtggctcaagaacatggtggccgagaggaaagcggaggaggtagtggacagtaagatggccgagaggcctcctcccaagacgctgaagcgggcgctcctggtggcgctccgctgcgtggaccctgacgcgaacaagcggcctaagatggggcatgtgatccacatgctcgaaatggacgatctccagttccgagacgataagaggcccggggccgggagagatggtcgtcgtccccagggtccggataggtacagctccaagctaggtggaggaagggagcctcagcaagcgcgagcaccagcgtcggtacagatgagatgattgtcattagagagtagcgatattaaccatgttatttttttcccgtcagtaaatacattctttcccaactcgttccatcgattctcaatggtcttcgattgtattatatatgtggagcaaccatcattctgtgacgatacttgaatcacacacacacacacacacaatgtagtggtaggatggtgctgtgtgacttaacatgcccaggccgaaaacctacagtttgtttacatggacgacagagaagagaagtcgccttcgttttcaacggctagcttgcttgtatataaaaataat

SEQ ID NO: 84951 - DNA, 1402 bp, Zea Mays
gcggcttctccatccagcccagaccccagagtcacagtcggggatcgacataataagcgacaggagacggcatggctggctgcgctgcgccggcgacgccaaggtcgtcgctgatcctcccgcgtgcatcctcgcactcccagcccagcgctgtcggcctcacctccgattgcgtcgccgcctcccgtcgccggcgccgcgatttcgttttcgtcgtcaacccctcctgcgccaatggccgcacgggaggaaagcagtggaagcagttgctgccgctcctccgaagtccgaacccgtctcgctgaccagtgcaacatttgcgagtgcatcacaagggatattcacaagggaggtgcgcgtgtgttcccttgtcacaagggaggctataaaggatggggctgatgctgtgatcgctgttggaggtgatggtacgcttcatgaggtgcctatggtttcttttggaaaggaacattgtttcttctatacactggggtttgtttagtagtgaagtaccttgtcctctgacagctcattccacttggaactggctcagattttgcttggacatttggctggacaaatgatcctcgtgtcgcaattgatcgaattgtgagaggtttctttcttgataccttctttttattgtgtttgattaaagtgctatactgctatgtctgcctttaaatgtttttttatggaacaagcatgcctttttcctattaagggctagtttgggcatccctgtttttccaatggatttccattttttccaatggaaattagttcattttccatgagaaaataagaatttcttgaaaaaatagagttgtcaaactagccctaaagttgtacatactatgctttaaacagaaccaagcgattgttgtattcttagtttaagagaaacgataaacttccttcagatcaaaggcattcacccagctttattagaaagctcaacaaagaccaatgatccagtgttggggaatccagcttacagatttcaagaagatcttagcaagcagcaagtctagtacatctactcctccttcagctacccagaaaacaaacgaacagtctggcaaagccactcaaaacatccgagtgctatcttaagctagctattggcattttatcgagcatatgtcccaccttgtacattgatttaggcttcagaagaggggacttggtctttaacagcatcattgtcttgtggaaattatatgaattatctaatccactatatttttatgtcatcacaatttaatcttttttttgcagaagtaacatcaaaactagacaggcgtgatggagggtccaaatagagaaccacacttttttattagggctagtttgacaacaaatagacaaaaatctagggaattaatctaccaaggggatt

SEQ ID NO: 84952 - DNA, 1335 bp, Zea Mays
atggcgaatatacaagcttccttgcgtaccatcacaagttcacaacaacagattgggaaaaataagaaaattacacggcgccaatggccgcacgggaggaaagcagtggaagcagttgctgccgctcctccgaagtccgaacccgtctcgctgaccagtgcaacatttgcgagtgcatcacaagggatattcacaagggaggtgcgcgtgtgttcccttgtcacaagggaggtgcgtgcgtgttcccttgtcaaatactgggttcccctcggcgactatttactctaagcactggtgatgatatgcttactctaggctataaaggatggggctgatgctgtgatcgctgttggaggtgatggtacgcttcatgaggtgcctatggtttcttttggaaaggaacattgtttcttctatacactggggtttgtttagtagtgaagtaccttgtcctctgacagctcattccacttggaactggctcagattttgcttggacatttggctggacaaatgatcctcgtgtcgcaattgatcgaattgtgagaggtttctttcttgataccttctttttattgtgtttgattaaagtgctatactgctatgtctgcctttaaatgtttttttatggaacaagcatgcctttttcctattaagggctagtttgggcatccctgtttttccaatggatttccattttttccaatggaaattagttcattttccatgagaaaataagaatttcttgaaaaaatagagttgtcaaactagccctaaagttgtacatactatgctttaaacagaaccaagcgattgttgtattcttagtttaagagaaacgataaacttccttcagatcaaaggcattcacccagctttattagaaagctcaacaaagaccaatgatccagtgttggggaatccagcttacagatttcaagaagatcttagcaagcagcaagtctagtacatctactcctccttcagctacccagaaaacaaacgaacagtctggcaaagccactcaaaacatccgagtgctatcttaagctagctattggcattttatcgagcatatgtcccaccttgtacattgatttaggcttcagaagaggggacttggtctttaacagcatcattgtcttgtggaaattatatgaattatctaatccactatatttttatgtcatcacaatttaatcttttttttgcagaagtaacatcaaaactagacaggcgtgatggagggtccaaatagagaaccacacttttttattagggctagtttgacaacaaatagacaaaaatctagggaattaatctaccaaggggatt

SEQ ID NO: 84953 - DNA, 1040 bp, Zea Mays
atggcgaatatacaagcttccttgcgtaccatcacaagttcacaacaacagattgggaaaaataagaaaattacacggcgccaatggccgcacgggaggaaagcagtggaagcagttgctgccgctcctccgaagtccgaacccgtctcgctgaccagtgcaacatttgcgagtgcatcacaagggatattcacaagggaggtgcgcgtgtgttcccttgtcacaagggaggctataaaggatggggctgatgctgtgatcgctgttggaggtgatggtacgcttcatgaggtgcctatggtttcttttggaaaggaacattgtttcttctatacactggggtttgtttagtagtgaagtaccttgtcctctgacagctcattccacttggaactggctcagattttgcttggacatttggctggtatatttgtttcctttcccacataatctacatatggcttgattatttgttaacctttattttctgtaaatttctattgttgtttatttttactaggacaaatgatcctcgtgtcgcaattgatcgaattgtgagagatcaaaggcattcacccagctttattagaaagctcaacaaagaccaatgatccagtgttggggaatccagcttacagatttcaagaagatcttagcaagcagcaagtctagtacatctactcctccttcagctacccagaaaacaaacgaacagtctggcaaagccactcaaaacatccgagtgctatcttaagctagctattggcattttatcgagcatatgtcccaccttgtacattgatttaggcttcagaagaggggacttggtctttaacagcatcattgtcttgtggaaattatatgaattatctaatccactatatttttatgtcatcacaatttaatcttttttttgcagaagtaacatcaaaactagacaggcgtgatggagggtccaaatagagaaccacacttttttattagggctagtttgacaacaaatagacaaaaatctagggaattaatctaccaaggggatt

SEQ ID NO: 84954 - DNA, 1437 bp, Zea Mays
cgattttgcagaaccaactgagatctgggatgcaactcgctgtaaaagaataaggacaatggaaagccatcgcatgcgtgtaggtgctcttgcatggagttcttcgttgctttcttctggaagccgtgacaagagcatcctccaccatgatatccgtgctcaagaagatcatgttagcaagcttaccgggcataaatctgaggtttgtggactcaagtggtcttatgacaatcgtcagcttgcatcgggtggcaatgacaacagactttttgtttggaatccacattcagtacagccagtactgaagtatactgagcacacagcagctgtcaaagctattgcctggtcacctcatctccatgggctgcttgcatctggtggaggaactgcagatagatgcatacgattttggaatacgaccacaaatgcacacttgagctgtgtggacactggcagccaggtctgcaatctcgcgtggtcaaagaatgtaaatgagcttgttagcacccacggctactctcagaaccaaataattgtttggagatatccaacaatgtcgaagcttgccactttgacagggcatacatacagagtattgtacttagctatttcccctgatggccagaccatagttactggtgctggtgatgaaacgctccggttttggaacgtgttcccctctccaaagtcccagagttctgatagtttaagttgtgtcggaggaacatctttcgttagaagctacatccggtgacaccgagttgtagttttgctgagctcataggactgttgcagcacatgttgatgaccatcaacatcactccatttgcatcaaccatcaaaggtagcccactttttgagatggcgcgatacagtttggtgaaccggcttgcgaatccaggcatggctctttttgctaggagtgtacatatttatcagagcaacggctttataggagtggacatagaggaggggggcttcaagcatcagcattgtcccaactgataagaatacgcccttttgtttgtttgctcaatacgtcggcttgagctgtttgtgtagtgcgcgagcagctaacctattcgaaacatttaccggactgtgaacacgcccacttcatccatgttggcaccatggtgtaaaatgagaacactcgtggctccaggtttattttatagtgtcttggaaggaggggctgattttgccctcacctggcttgtttcacatagagacaaccaagaaacgtgtgttcattgtttattgagatatggataccaaagcaatgctgaacttttagcatatttttttttatcatgcgactatctttgttgtaaagtgatatctcagcattgctaatgcttgcgtctttcgttgtcacttctttgcaacctaatgattggaggcaattattgatggatctatcatactagtgattca

SEQ ID NO: 84955 - DNA, 2430 bp, Zea Mays
ggaaatttggatccataccattaaaagatcaccactttggatccataccattactatctcacttacatgtgggtccacatgagtcaatgacatgtggggtccatgatatatatctaaagtttggattttttaatggtatagatccaattgttaaaaaaaaagagaagtggatggagtaaaataaaagaaagaaagagaagagcgactactagtagaaataatctcccgaggccgaggcgagccgagaggggaaggtggagagagaaaaaacgcggtggcgcgaacgggagggaagccttgctatcctatccggctatccccgccccgtcgcacgcacacatcacccaccccgtcgcagtcgcacctgcactgcatcctgcgcctgcccgatacccaattattctccctctctatggatcaccaccgcacgccgatggagaactcggcgtcctcgaagccgccgacgccggcgtccacgcccaactcgcgcctcgcatcggcgccgtcaccccgccactccgccacgccgccgcacgcgtccgcgccggcgtccgccccggcgccggcctcgcgcaccgtctacagcgaccgcttcatccccagccgcgccggatccaacctcgcgctcttcgacctcggcccctcgccctcgcccgccgccgccgccgcctcctcgtcctcctcccacgaggccggccccgcggcctcgtccggatctgcgcccgccgcggcgtcgccctactgcgcgctcctccgcgccgcgctcttcgggcccgacacgcccgaccgggtcgcgtcctcggccgccgcgtgctcgtcctcctcctcctccccggggctctcgcctgtgggcacccccgccaccgggaacatcttcagattcaagacggaggtgcgccggaacgccaagagggcgcttttttccggaggggaggaggaggaggacgccctgttccccggcattttcaccaccaggggcgcgggaccaaggaaggtcccgaggtcgccctacaagatctgggatgcaactcgctgtaaaagaataaggacaatggaaagccatcgcatgcgtgtaggtgctcttgcatggagttcttcgttgctttcttctggaagccgtgacaagagcatcctccaccatgatatccgtgctcaagaagatcatgttagcaagcttaccgggcataaatctgaggtttgtggactcaagtggtcttatgacaatcgtcagcttgcatcgggtggcaatgacaacagactttttgtttggaatccacattcagtacagccagtactgaagtatactgagcacacagcagctgtcaaagctattgcctggtcacctcatctccatgggctgcttgcatctggtggaggaactgcagatagatgcatacgattttggaatacgaccacaaatgcacacttgagctgtgtggacactggcagccaggtctgcaatctcgcgtggtcaaagaatgtaaatgagcttgttagcacccacggctactctcagaaccaaataattgtttggagatatccaacaatgtcgaagcttgccactttgacagggcatacatacagagtattgtacttagctatttcccctgatggccagaccatagttactggtgctggtgatgaaacgctccggttttggaacgtgttcccctctccaaagtcccagagttctgatagtttaagttgtgtcggaggaacatctttcgttagaagctacatccggtgacaccgagttgtagttttgctgagctcataggactgttgcagcacatgttgatgaccatcaacatcactccatttgcatcaaccatcaaaggtagcccactttttgagatggcgcgatacagtttggtgaaccggcttgcgaatccaggcatggctctttttgctaggagtgtacatatttatcagagcaacggctttataggagtggacatagaggaggggggcttcaagcatcagcattgtcccaactgataagaatacgcccttttgtttgtttgctcaatacgtcggcttgagctgtttgtgtagtgcgcgagcagctaacctattcgaaacatttaccggactgtgaacacgcccacttcatccatgttggcaccatggtgtaaaatgagaacactcgtggctccaggtttattttatagtgtcttggaaggaggggctgattttgccctcacctggcttgtttcacatagagacaaccaagaaacgtgtgttcattgtttattgagatatggataccaaagcaatgctgaacttttagcatatttttttttatcatgcgactatctttgttgtaaagtgatatctcagcattgctaatgcttgcgtctttcgttgtcacttctttgcaacctaatgattggaggcaattattgatggatctatcatactagtgattca

SEQ ID NO: 84956 - DNA, 2265 bp, Zea Mays
aaaaggccggctagtgaagaggagggggcgtaagttctattcgcgcaaccgcgtagaaaaaaaaaaggtccagtcctcaaactctacagcgggggcgagccgaggaagaagaggtcgccgccgccgccaccgcttccatgtctgggggaatcgcccgcggccgccttgccgaggagcgcaaggcctggcgcaagaaccacccgcacggtttcgtcgcaaagccggagtcgctgcccgacgggacggtgaaccttatgatttggcactgcaccatccccggcaagcaagggactgattgggaaggtggatacttcccactcacccttcatttcagtgaggattaccctagcaagcctcccaagtgcaagttccctcagggtttcttccacccaaatgtctatccttctggaacagtctgtctttcgatccttaatgaagatagtggttggagaccagctattactgttaagcagattctcgtcgggatccaggacttgctagatcagccaaatcctgctgatcctgctcaaacggatggctatcacctttttatccaggatcctacagaatataagaggcgtgttaaactgcaggcgaagcagtatcccgcgttggtctgagaacttcgccctactagggatccaagctgcacattcgcatagttgttgctagtgtcttgaatggaagactaaaggtgctggatgcgcctgcgttgcaggacgacttctacctcaacctcgtcgattggtcttcacataacgtcctcgctgttgggttgggcaattgcgtttacctgtggaatgcatgcagcagcaaggtcaccaagctttgcgatttgggggtggatgacaacgtttgttctgtggggtgggcgcagcgcggcactcaccttgcagtaggaacaaatcaaggaaaagttcagatctgggatgcaactcgctgtaaaagaataaggacaatggaaagccatcgccatgatatccgtgctcaagaagatcatgttagcaagcttaccgggcataaatctgaggtttgtggactcaagtggtcttatgacaatcgtcagcttgcatcgggtggcaatgacaacagactttttgtttggaatccacattcagtacagccagtactgaagtatactgagcacacagcagctgtcaaagctattgcctggtcacctcatctccatgggctgcttgcatctggtggaggaactgcagatagatgcatacgattttggaatacgaccacaaatgcacacttgagctgtgtggacactggcagccaggtctgcaatctcgcgtggtcaaagaatgtaaatgagcttgttagcacccacggctactctcagaaccaaataattgtttggagatatccaacaatgtcgaagcttgccactttgacagggcatacatacagagtattgtacttagctatttcccctgatggccagaccatagttactggtgctggtgatgaaacgctccggttttggaacgtgttcccctctccaaagtcccagagttctgatagtttaagttgtgtcggaggaacatctttcgttagaagctacatccggtgacaccgagttgtagttttgctgagctcataggactgttgcagcacatgttgatgaccatcaacatcactccatttgcatcaaccatcaaaggtagcccactttttgagatggcgcgatacagtttggtgaaccggcttgcgaatccaggcatggctctttttgctaggagtgtacatatttatcagagcaacggctttataggagtggacatagaggaggggggcttcaagcatcagcattgtcccaactgataagaatacgcccttttgtttgtttgctcaatacgtcggcttgagctgtttgtgtagtgcgcgagcagctaacctattcgaaacatttaccggactgtgaacacgcccacttcatccatgttggcaccatggtgtaaaatgagaacactcgtggctccaggtttattttatagtgtcttggaaggaggggctgattttgccctcacctggcttgtttcacatagagacaaccaagaaacgtgtgttcattgtttattgagatatggataccaaagcaatgctgaacttttagcatatttttttttatcatgcgactatctttgttgtaaagtgatatctcagcattgctaatgcttgcgtctttcgttgtcacttctttgcaacctaatgattggaggcaattattgatggatctatcatactagtgattca

SEQ ID NO: 84957 - DNA, 716 bp, Zea Mays
ggagggggcgtaagttctattcgcgcaaccgcgtagaaaaaaaaaaggtccagtcctcaaactctacagcgggggcgagccgaggaagaagaggtcgccgccgccgccaccgcttccatgtctgggggaatcgcccgcggccgccttgccgaggagcgcaaggcctggcgcaagaaccacccgcacggtttcgtcgcaaagccggagtcgctgcccgacgggacggtgaaccttatgatttggcactgcaccatccccggcaagcaagggactgattgggaaggtggatacttcccactcacccttcatttcagtgaggattaccctagcaagcctcccaagtgcaagttccctcagggtttcttccacccaaatgtctatccttctggaacagtctgtctttcgatccttaatgaagatagtggttggagaccagctattactgttaagcagattctcgtcgggatccaggacttgctagatcagccaaatcctgctgatcctgctcaaacggatggctatcacctttttatccaggatcctacagaatataagaggcgtgttaaactgcaggcgaagcagtatcccgcgttggtctgagaacttcgccctactagggatccaagctgcacattcgcatagttgttgctagtgtcttgaatggaagactaaagattatcgtcatattttttcgcgggcgcaatacatattctacc

SEQ ID NO: 84958 - DNA, 960 bp, Zea Mays
ggagggggcgtaagttctattcgcgcaaccgcgtagaaaaaaaaaaggtccagtcctcaaactctacagcgggggcgagccgaggaagaagaggtcgccgccgccgccaccgcttccatgtctgggggaatcgcccgcggccgccttgccgaggagcgcaaggcctggcgcaagaaccacccgcacggtttcgtcgcaaagccggagtcgctgcccgacgggacggtgaaccttatgatttggcactgcaccatccccggcaagcaagggactgattgggaaggtggatacttcccactcacccttcatttcagtgaggattaccctagcaagcctcccaagtgcaagttccctcagggtttcttccacccaaatgtctatccttctggaacagtctgtctttcgatccttaatgaagatagtggttggagaccagctattactgttaagcagattctcgtcgggatccaggacttgctagatcagccaaatcctgctgatcctgctcaaacggatggctatcacctttttatccaggatcctacagaatataagaggcgtgttaaactgcaggcgaagcagtatcccgcgttggtctgagaacttcgccctactagggatccaagctgcacattcgcatagttgttgctagtgtcttgaatggaagactaaagaacaagatcaacatgaggaagactactataaagattgtgagttctaggccattgttgcttcgatcaaccaccatgtggatagtcgttagttttctagcttatgttataaagatattcaatttatgtaataaagtttatgatattggtttgcagagaaatcatcatatttgtataatctggtcttgactcctagctacacagtaaaggttcaagatgttatttttttaaaaaatgacatccagacctcaactaggtaatttttcaaagctagaataaaaaaatgaaa

SEQ ID NO: 84959 - DNA, 942 bp, Zea Mays
gaaacacagaaaaggccggctagtgaagaggagggggcgtaagttctattcgcgcaaccgcgtagaaaaaaaaaaggtccagtcctcaaactctacagcgggggcgagccgaggaagaagaggtcgccgccgccgccaccgcttccatgtctgggggaatcgcccgcggccgccttgccgaggagcgcaaggcctggcgcaagaaccacccgcacggtttcgtcgcaaagccggagtcgctgcccgacgggacggtgaaccttatgatttggcactgcaccatccccggcaagcaagggactgattgggaaggtggatacttcccactcacccttcatttcagtgaggattaccctagcaagcctcccaagtgcaagttccctcagggtttcttccacccaaatgtctatccttctggaacagtctgtctttcgatccttaatgaagatagtggttggagaccagctattactgttaagcagattctcgtcgggatccaggacttgctagatcagccaaatcctgctgatcctgctcaaacggatggctatcacctttttatccaggatcctacagaatataagaggcgtgttaaactgcaggcgaagcagtatcccgcgttggtctgagaacttcgccctactagggatccaagctgcacattcgcatagaggaagactactataaagattgtgagttctaggccattgttgcttcgatcaaccaccatgtggatagtcgttagttttctagcttatgttataaagatattcaatttatgtaataaagtttatgatattggtttgcagagaaatcatcatatttgtataatctggtcttgactcctagctacacagtaaaggttcaagatgttatttttttaaaaaatgacatccagacctcaactaggtaatttttcaaagctagaataaaaaaatgaaa

SEQ ID NO: 84960 - DNA, 570 bp, Zea Mays
agcaggagcagctagctacagggagaagaagtgttcgttctctgagactctgacggacgggacgggatgatacacagactgacaggctcttctcaagcttgacttccaaactgtgcagctcttcaatggagcagtcttccaacctctcacccaaaagtttcctgcaccgcctcaacgcagattagtccgtgggcaggccatccgcatcagcttttactcgctgcagtttaggtccggaccagacaatcttagtatcactactactacatcaaaactaccaaatgtgtcaaggacgtcagagtatgggggcagcttcccttgacgccctatgatgaatgggggagattagaaagaagggagattggagagttggaagaaccaaagttcctaaagaatgaagatgaggggcattagaagagaccacattgcattaccatcgccatgaagaacatgatcaaaagacagcatcgatcgtgttagatggcttggtggtaaactatcttgttctttgtcttcaaaactagaaaaacatcgttcctttatatatgtgtactttggtcttggttttgt

SEQ ID NO: 84961 - DNA, 332 bp, Zea Mays
caacctctcacccaaaagtttcctgcaccgcctcaacgcagattagtccgtgggcagcttttactcgctgcagtttaggtccggaccagacaatcttagtatcactactactacatcaaaactaccaaatgtgtcaaggacgtcagagtatgggggcagcttcccttgacgccctatgatgaatgggggagattagaaagaagggagattggagagtaaactcttttgcttaatccaaaccgagtgcgagtggataaaatggctcctggccactaacaactagatagaaatatcctaaattatagacttgactgaagcttctccaatatgtg

SEQ ID NO: 84962 - DNA, 1202 bp, Zea Mays
gtctccgcctccaaccatccacatgggcatggcgatggtgttaacggacggcgaggtcggtgctctcatcaaggtctccgcggctgtttgggtggcgatgtcctacgcccgcctcgccgcggcgcgtctccgcccaggcgcgcttcgcctcctggcgctgctgcccgtcgtcgcgctcctctgcgcgatccccttcgccttctcgacgtccacgttccgcggcacctcgggcttcttcctcgcctggctcggctccttcaagctgctcctcctcggcgccggcattgggcccctcgacccttccctccgcctctcccacttcgtctgctcggccaccctacccgtgaagctccggcggcagtccaaagagaagagccaagcccccgcccgtggtccggcgaggatactcctctccggcgccgtcatcccgggcgtcatctacgcgtaccagttcaagagctcgatgggcaggtggaccgcccctacctggcgtcgtcgctgcgcgacttctggggccggcggtggaacctcatggtgccctccatcctgcggccgtcggtgttccgccccgtccgcgcgcgcctcggcaacgcggccggcgtccatgcgacgttcctcgtgtccggcctcatgcacgagctcatgttctactacatcatgcggagcgcgcccagcggcgaggtgaccgccttcttcctcctgcacggggcgtgcgcggccgcggaggggtggtgggcgtcgcatgccggctggtggcgcccgccgcgcccggccgccgtgccgctcacgctggccttcgtggccgggacggggttctggctcttcttaccggcaatggtaaagggcggccttgacgagatggttctgcgggagtgccagggcatggtggtgctcatggagcaggccgcccggcggctcgccggcgccacagatctcgtctcgtcaaccatgtgaatttgagcaaacagcatgttgcaagctggctgtctctgctgcttgacgttatctgcaccgcaggatttagatctgacggatgtagtggtggggttggtggatactatactgtttctttcgtgatgggctgtgactgtgattgacaactatccgtaattgaatacattgtctttcagatccggatgataggaatgatatgatagttgggatttgggagagatgcaaatgcaatgcaagttgattaaaat

SEQ ID NO: 84963 - DNA, 1931 bp, Zea Mays
ctcccactttcccgctatctctaggatcccaggcctcgcctatggccgcctatccccttcctcctccttcctgttccatcgcacagtgctgcagctgctgctaatccttaacctttcgactactagtcggagtcctcggctcgacgctgctcgtagtcgtagctccagctgctgctgcgtggacggaggagggtggttcctgttgcaggctcgcaagttgcaacttgcagtgttgcactgcttcagcagcagctgcctcattgcgtgctgcagttattgctaccgctactgtatacgtagagaccgagacgtcttgccatttgctaagctctgatggagaggatgcaactgcaagggcccatcgcctcttcgctgtggacggacaaacagcaggtggtggccagcaccagcgccgcaatggcggcgcagatgcccttcctggcgttgctccagggcgcaggcgtcgtggtggagggggcggagacggagcagcagcagtacgagcacgagcacgacgggcgcaagcggcaggccttggcgcgcgccgtctccaaactcgacctgctcgagagctgtctcacgcaggcggcggctcccgcggcggcggcgtgtgcgccagtggccagcaggacgaccgagaggcggatgaagcggccgaggacccgcgcgcgagccgcgccaccgccggagaagcgcaggaagcccgaggaggccgagagccagcggatgacgcacatcgccgtggagcgcaaccggcggcgcctcatgaacgaccacctggcctcgctccgctcactcatcccctccagctatatcccccgcgtgagccatgcaatgcaaagcccatgcatgcatgctgcgttccgtttcgatctgacgacgcaacggttacatgcaatgcaatgcagggcgaccaggctacggtggtgggcggtgcgatcgactacgtgaagcagctggagcagcagctagtggcgctgcaggcggccgcgggcgcgcggcgcggcagcagtgtcgtgtcggacgacggcgtgttcctcgtgtccccgcagtacgcgagctactcggggtcgcgcggcggcggcgggctcggcgtggacgtggaggcgacgggcgcggtgggcgggcacgtgcgcgtgcgcgtcgcggggaggcggtggtggcccggccggctcgtgcgcgccgtcgccgcgctggagggcctccgcctcgcggtcttgcacctcgccgtcacctccgtcgggcgtgacgccgtcgtgtgctgcttcaacctcaagatggaggaagggtgcgaggtggcgacggcggacgaggtggcgacggtggtgcaccagatcttcgcctactccgccgccggcgcatgctgctgacgacgacgactgactgcgccccgcgcgccgacgccagcggccgtggagcacgggacggggacggtaagtcaaagccgcagaggcgggcggacatgacggcatgtacacgaaacacgacgacgaacgcgcgcgcagaggcggagaggacgacgtacggccggccggcccgggccaccaagagagaagggcatgcgtacgcagaggcgtggatcagcggcagcgctaggccggggaccaagcaagcaaccatggcaagtgatgtgcttgcggtgccatgccatggcaacggctgcactgcgtgccgtggtccagcgcagcgcagcgccgggtggagaggagcaggagaccatctactgtaacttgactagtgtttacttacttggctgggtggctggcaggaccagtactccggtggtgaagggtactgacgactgtagctggactggactgaaggctgaagagagcgtggtacagtacagtacagtagcagtgtttgaatagcatggctatatatctatgtagttttttctcccttgcctttggagagccacgcccacgcac

SEQ ID NO: 84964 - DNA, 2563 bp, Zea Mays
agatgacagtattgtggaggacgctgtggtgcttctggtttcatcacactagatgctggtgtgtgccacggtggggagccaatctgaaacctcaggctgatttctgggcagttgtgtgctcgcctttctgtggaagtttttgttgttgtatcgaccagattgagagttgacttgtagttcacgacattagaccaggcttctgtcagatccggcagttcattggttttatcacttggatttggtgtttaccaacactggttgggagaagaaaagaaaagaatttagttgtttgctggatctgcagagacagtcagcagaggaagatatttagttgtttgcatatctcagcctctcgaatttttttgttggtccatactccaatcaatttctatcctgataaatatggttttcgtgtggtggtcgattactcgatttgttcctgaaccaactagcttgtggcgttcttaaaaaaactcggccggggagggaaagaccgtcctcccggtattatattaagaagagaccgaaacaatggtcccggccgagaaaatccccgaaccctggcccccccatcactaacgggccggcgtcaactgtccactctgcaacgacccaaccggagggtggcgcacaggacatcataacccgagagtggatggggcacaacgaggagatttttttaaccaagcctgaaaattcgcttccgaggggaatcgaacccaggacttggaggtgctacttggtttgtccttttccactaggctagaggccctttcgcagctcgtggcgttcttgctggcttcattttccagttgcctagcttgtggcgtcttcttgggagatgcaatttggttcgttcccgtgaatctctcactgctggaaatgaaccatttacttctgaaggcctccatggctcttcccagttggcttcagtttcgaccgtcttgtttcggatgcgttctgtctttgtgttgtgaaatttggtagaggaaatatgctccgttcgaactgcttgggcaccatgtcctcttcgcgggcgtggaccacgtcctgtgtgttgaatgggattgaagagtcttgccttacagttgaagatgtcagaagcacttgagaaagataaggaaatttgtgaagaggaagaggagtacgtattggtagagttggacatatcactgggtgctccaattgtactctctggtttgcatacattcatctcctaccttaatagtaggtgacagtctgaagatggtaagtcatgctcatgccacggtatttttccaaaaaagtcaagttctggtattgttttctgtactctgccttttgcttgtggactgtagcaggtactgtaatgctgtagtcactttgtgtgttacctgcatagggtgctagtaagtttttgcatttttgctaaacacacaatctaatttactgagtttcgaactctagatcaagtattgtatactttcagtttacctgtattcatcataactgtagtttgtgcctatgaatgctctaacaggacaagatggaaacaaaatgcatttggaacccaaaagttacatataatttcttcagtaccaaacatacatttactactgattagctatttcattgctgatggtggcaacctattttgttaagcatctgtatcccttcttttgttctaatgattttttttctttatacaaagaaaaaaaacttcggaatttccaattcatactttagagtttcaggctctaatctgcttaccaagcctaacgctaacgccttgtgtaataacaggttgtagaatatgaagaaactattggtacatattatctattttgtgaaagtgggcaggaacactgaaactaccctccctaccccacccttataaaagtccagatgttagatggcattgtttgcacataaaactcctaaccggaacccagtcacaaggtcatgattgaactagtgaatatagttttcatcagtatgaaccatctgtcagtcatgctataatcattgtcaactcataggttcattggggaactcatttgcgcagtctgaaaaacgctatttttttttgacgtaatgcatttctttatattagactcattcaatgtttgccccccttttgtcagccaaaactgaaacaaaacctacaaacgatgagatcacaccttctgaagaaaatacagacaaaccagctcacagcagtaacgaagcaccctcgaaggaggtgatccatctcgccatcgttcaaaagatcctcaaatttcggccattcagtgcgggagtatccgcagcatggagcatatcatcacaaggacaaggagctccagataaaaaaaagccgttttcttgttcaatacctccagtgtacatttaggtagctcattgacccgtccaaacgaggtggcttgtatacttgctgagttcatctatatatatctgagctaacatatcgatccgttggtgcttattgttttatttctaagcatccccatggaaatgatataaccgctgctggcacagtgctgtcgatcgatggaacaacagcagtggccaggggctccccgtg

SEQ ID NO: 84965 - DNA, 2968 bp, Zea Mays
cagcccccgccccacacccagcccccgccacctgagtacctgacacacagcgaaacgccgaaaccgcgtcaagttccccttctgcgatcccccaatcgccgtaaccctagactcgccaccgccggcgcgatgctccgctcgccgggcaattcgccccgccgcctctcacgtcgcccacacccgcgcactccacccctcgcccggcctccccgccccctccaccgcccctcctcgaagcgccgccggtcggaagtgctcgacgaggacacctacgtcgccgccatcgagcgcatcatcgagcgcgactacttccccgacctgccccgcctccgggaccgcctcgactggctgcaggccgtgcggtcccacgacccgctcatcctacgcgacgcgcagctcaagatcctagaccgccgccgccgcgcccagcgccacgcggcggggcccgtccccacgccgacgccggccacctccaccgcgctccgctccccgtcctttctcaccacccccgccggatccgtcgccggcggcgtgggaggtcccgacgccgaccacgacgacgacgtcgcggccgcggtctccctcgacggcttcttccgccgcttcaccagcgaggacaacgactccttctcgcgcatcctagacaaggtgaaccagcgccgccgcgagcgctacgcgcacctgctggagccgccgccgcctaccgaggcggggagcaaagcgtcagagggcgccaagcgcgacaggatcacggacgggtacggtacatcggggcagccaccgagtacgctcgagggcgccaagttcacggcaaagaaccagctcatgtactacccggctgaccagggggaagcgcccctcacggaggaggagcgcgcagagcggctcagggggatgaccaaggagataaacaagccgaacaccaggctacatggcagagccacggctgatgacgcgaggcccaaggaggagggggctgccatactttacgcgctagttgcaggctctactccgggagggatggcctaccacgaccctgacaagttgaagaagtacgatctggaggacctgaggaagaccccgaaccctttctacctcgagtcggacaagaaggccggcaacgggtacagttttgtgaggacgccgtcgccggcacccggcgtggacgagtcgccgttcatgacgtggggtgagatcgatggaacgccgctgaggctggactcggatgagacgccgggcggtagcgagagagcgcatttcaagatgccgccgcctcctgctcgcgatgtcaaggcgcacctgctttcgagggacgccgctcggaaaataaaggagcggtctaataccttccataggccgcccctaccctcccctgcgaggggtgtcagcgcaagccctagaaccctctcgcgggccgcacaaaaattcgtgaggaacgccatcaccaagtcggcaaagtcctccagcgccattgacgaatctctccgtgcaagctacagaggctcgaccccatctgcgagcactcccaagtcaaggttttcaaaagaccctggcctcgcatcgcgttctccatccacaaggcagggttccacccctccctgggtttgcatacattcatctcctaccttaatagtaggtgacagtctgaagatggtaagtcatgctcatgccacggtatttttccaaaaaagtcaagttctggtattgttttctgtactctgccttttgcttgtggactgtagcaggtactgtaatgctgtagtcactttgtgtgttacctgcatagggtgctagtaagtttttgcatttttgctaaacacacaatctaatttactgagtttcgaactctagatcaagtattgtatactttcagtttacctgtattcatcataactgtagtttgtgcctatgaatgctctaacaggacaagatggaaacaaaatgcatttggaacccaaaagttacatataatttcttcagtaccaaacatacatttactactgattagctatttcattgctgatggtggcaacctattttgttaagcatctgtatcccttcttttgttctaatgattttttttctttatacaaagaaaaaaaacttcggaatttccaattcatactttagagtttcaggctctaatctgcttaccaagcctaacgctaacgccttgtgtaataacaggttgtagaatatgaagaaactattggtacatattatctattttgtgaaagtgggcaggaacactgaaactaccctccctaccccacccttataaaagtccagatgttagatggcattgtttgcacataaaactcctaaccggaacccagtcacaaggtcatgattgaactagtgaatatagttttcatcagtatgaaccatctgtcagtcatgctataatcattgtcaactcataggttcattggggaactcatttgcgcagtctgaaaaacgctatttttttttgacgtaatgcatttctttatattagactcattcaatgtttgccccccttttgtcagccaaaactgaaacaaaacctacaaacgatgagatcacaccttctgaagaaaatacagacaaaccagctcacagcagtaacgaagcaccctcgaaggaggtgatccatctcgccatcgttcaaaagatcctcaaatttcggccattcagtgcgggagtatccgcagcatggagcatatcatcacaaggacaaggagctccagataaaaaaaagccgttttcttgttcaatacctccagtgtacatttaggtagctcattgacccgtccaaacgaggtggcttgtatacttgctgagttcatctatatatatctgagctaacatatcgatccgttggtgcttattgttttatttctaagcatccccatggaaatgatataaccgctgctggcacagtgctgtcgatcgatggaacaacagcagtggccaggggctccccgtg

SEQ ID NO: 84966 - DNA, 2093 bp, Zea Mays
cagcccccgccccacacccagcccccgccacctgagtacctgacacacagcgaaacgccgaaaccgcgtcaagttccccttctgcgatcccccaatcgccgtaaccctagactcgccaccgccggcgcgatgctccgctcgccgggcaattcgccccgccgcctctcacgtcgcccacacccgcgcactccacccctcgcccggcctccccgccccctccaccgcccctcctcgaagcgccgccggtcggaagtgctcgacgaggacacctacgtcgccgccatcgagcgcatcatcgagcgcgactacttccccgacctgccccgcctccgggaccgcctcgactggctgcaggccgtgcggtcccacgacccgctcatcctacgcgacgcgcagctcaagatcctagaccgccgccgccgcgcccagcgccacgcggcggggcccgtccccacgccgacgccggccacctccaccgcgctccgctccccgtcctttctcaccacccccgccggatccgtcgccggcggcgtgggaggtcccgacgccgaccacgacgacgacgtcgcggccgcggtctccctcgacggcttcttccgccgcttcaccagcgaggacaacgactccttctcgcgcatcctagacaaggtgaaccagcgccgccgcgagcgctacgcgcacctgctggagccgccgccgcctaccgaggcggggagcaaagcgtcagagggcgccaagcgcgacaggatcacggacgggtacggtacatcggggcagccaccgagtacgctcgagggcgccaagttcacggcaaagaaccagctcatgtactacccggctgaccagggggaagcgcccctcacggaggaggagcgcgcagagcggctcagggggatgaccaaggagataaacaagccgaacaccaggctacatggcagagccacggctgatgacgcgaggcccaaggaggagggggctgccatactttacgcgctagttgcaggctctactccgggagggatggcctaccacgaccctgacaagttgaagaagtacgatctggaggacctgaggaagaccccgaaccctttctacctcgagtcggacaagaaggccggcaacgggtacagttttgtgaggacgccgtcgccggcacccggcgtggacgagtcgccgttcatgacgtggggtgagatcgatggaacgccgctgaggctggactcggatgagacgccgggcggtagcgagagagcgcatttcaagatgccgccgcctcctgctcgcgatgtcaaggcgcacctgctttcgagggacgccgctcggaaaataaaggagcggtctaataccttccataggccgcccctaccctcccctgcgaggggtgtcagcgcaagccctagaaccctctcgcgggccgcacaaaaattcgtgaggaacgccatcaccaagtcggcaaagtcctccagcgccattgacgaatctctccgtgcaagctacagaggctcgaccccatctgcgagcactcccaagtcaaggttttcaaaagaccctggcctcgcatcgcgttctccatccacaaggcagggttccacccctccctgggtttgcatacattcatctcctaccttaatagtaggtgacagtctgaagatgccaaaactgaaacaaaacctacaaacgatgagatcacaccttctgaagaaaatacagacaaaccagctcacagcagtaacgaagcaccctcgaaggaggtgatccatctcgccatcgttcaaaagatcctcaaatttcggccattcagtgcgggagtatccgcagcatggagcatatcatcacaaggacaaggagctccagataaaaaaaagccgttttcttgttcaatacctccagtgtacatttaggtagctcattgacccgtccaaacgaggtggcttgtatacttgctgagttcatctatatatatctgagctaacatatcgatccgttggtgcttattgttttatttctaagcatccccatggaaatgatataaccgctgctggcacagtgctgtcgatcgatggaacaacagcagtggccaggggctccccgtg

SEQ ID NO: 84967 - DNA, 2081 bp, Zea Mays
gtttaaagccataatgactagcaggatttttaatagcatatctggatggcttcattgtgtccaacagaaccatgtaaggtaactgggaccatctcctgcaatgaatggagatgtaatgggaccataacattaggagatggcaaaagaagtggtttcacgagaaaataacctaaaagaacatcttgactgtcaaggtcgtgtcactggacatcaaacaaaattagctaaatagactgtattatataaataaaatgaagtgagtataggttaattcaacaaaaaatactgcagtgctgattaaagaagcctattagtcacccttcactcatcgcttgcactgtttacataatatagtttaaaacagaagatatacaaacatcctagcaaaaggggtctcatgtttacttatcaaaacgaagggatctgcaattggtattggaaaacacgaccatttagtgattccatatgtagaaataagtttaagttttttttcaaacaagtagtagaaccatgtataattatattacattaagaagaaaacaagtttaaggtttagctgatgcgagtaccactaaacctgctagatagatcagacaggccacaccacacatttagacttcatattgaagaaaaggtaaaaactttcataagcacatgggataatgcaatcatgcttgtggacaaattatttatcctgcatcacttgtcaattgagaggttcatcttcacactaataatatcaaatagtgtttcattgtcacgagcataggcgtagtttatctgcattccaagaaacagtcaaagcaaccaatgcccaaattccattgacatacaccataacaattaacaaatattttaaaacaaatgaaaaatcaagtattgaatccagatctcttcatcataacaagaggaaaccaatgatatgcacatgattggaccttcaccatccttgactacaggcaaaatgcatgacctgtgttgcaaaaattcagaaactgacaatacagaggtcatcatattcaaatcaatatattagatacaagtgcataactagcttggcagttggccccagcattccccttcttttcctccctaactgagtaggacatataatggcaagtcctcttttaagagcgagtcctggtgaaatgagacgaccaatttcaaacagaatactaagctgcagtcttaacaggaggggaggaggagcagagaacacagacaaacttgatgccaaactaggaacagcttaaggaaacctcgcaagagcttttggattttaactaaagcggaccaaccgatgctgcttaccttcaactgatttggaccacgataaatagctattcaggattattaatctaaacgatcgatattcatctacgggatttaaccgatcactcaatatagaacacgataacaagagcaaagcaccgacttctctaaacaaccattttaatacttgctgattttggacagcagtacagcagtcagcggttttgctcataacttacaaaatattcatccaaaaatcgtgaactaagactttctagaaagcttaagaagtcctctacaacttttgtattatcatcacagtgagacttgacacttagaatggtcaaacaatgctaaacgtaaattctgtccagatttggacagaattcgactacttacttcaaaaattcataactggagtttcagacatccaaatcaggtgatcctagactttatagaaagctaatagaattctctaaaattcatttatgaacatcccaggttaatttaatatatatcaaggtcaaaaaacatgagaaaggctctgctgtccaaattgggacagattcagagattctaactcaaacagctgtaacttaatttatagagcaccaaaaagggtgatccaaaatttgttggaaatcttaaggaaagtactacaattctcctataattgctaatgactgattctcattttaacttagccaaacaatccatttcatcggattaactagcatagctaacacatcacactatttgtcctagcaagtagagcatcatcaaatattacataatctcatttgactata

SEQ ID NO: 84968 - DNA, 686 bp, Zea Mays
gcacccagcaacaagcaacctcgtccccaaacaagcaaccaccgcctccccgatctcgtcgagaggaagcccaatcccgaaaccgccgccctattccaatgaagcccaaggctgagaagcggctccccgcgggcaagtccgcaggcaaggagggtggcgagaagaaggggaagaagaaggcaaagaagtcggtggagacgtacaagatctacatcttcaaggtgctgaagcaggtgcacccggacattggcatctcgtccaaggccatgtccatcatgaactccttcatcaacgacatcttcgagaagctggcggcggaggcggccaagctggcgcggtacaacaagaagcctaccattacgtcccgcgagatccagacctccgttcgcctcgtcctccccggcgagctcgccaagcacgccgtctccgagggcaccaaagccgtcaccaagttcaccagctcctaggcgagcgatgcgacgtgcactcgtctcctcttcttgcaggagtacaatagtagtacggttaggtgtgttgccgcggtggtagttgccgctgcgtttgctttctgggctcggttgatgtcttttatgtaagaaagtaactgtattgtgtctgcagtaccttaccgtgcatgttttaagtagcatcccataatctataaggaatatgttttaatatgttct

SEQ ID NO: 84969 - DNA, 740 bp, Zea Mays
ggcgtagagtgccccctacggcgcaatgcaaggggagggggctgcgaaggggcagcgttgcagttagtctgacattttacgccgtcagacgactggcagactgggccgccgccgccctaaaccagctgaggctttcgttggtctcttcgccggcaacgagcaccaccaggagtgaagagttttgttcgccgtgcagtttaagatgtcagaagcacttcagaaagataaggaaattggtgaagaggaagaggaagaggagtatgtattgttagagttggacaattgtctttattcagacatatcgcctggtgctcagttcgtactctctggtttggatacattgacgcctaccttgatagtaggtgacaatctgaagatggtcggggaatatgatgaaactattggcacctgctatctattttctgaaagtgaaactgaaccaaaacctgcaagtgatgagctggcaccttctaaagaaaacacagaaacaccgcttaacagcagtaaggaagcgcccttgaaggaggtgaaccatctggccagcgttcaaaagatcctcaaatttaagccaatcaatgtggagcactcgcagcatcgagcatatcagcacaaggacaaggaactttagaggaaaaaaaatacctgctgttttcttcagtcaatgcattcagtgtacagttttaggttcattgaaatgaggggtaagggcgactgacgagtcttcgatcgatggaacaacg

SEQ ID NO: 84970 - DNA, 692 bp, Zea Mays
cagcgttgcagttagtctgacattttacgccgtcagacgactggcagactgggccgccgccgccctaaaccagctgaggctttcgttggtctcttcgccggcaacgagcaccaccagtttaagatgtcagaagcacttcagaaagataaggaaattggtgaagaggaagaggaagaggagtatgtattgttagagttggacaattgtctttattcagacatatcgcctggtgctcagttcgtactctctggtttggatacattgacgcctaccttgatagtaggtgacaatctgaagatggtcggggaatatgatgaaactattggcacctgctatctattttctgaaagtgaaactgaaccaaaacctgcaagtgatgagctggcaccttctaaagaaaacacagaaacaccgcttaacagcagtaaggaagcgcccttgaaggaggtgaaccatctggccagcgttcaaaagatcctcaaatttaagccaatcaatgtggagcactcgcagcatcgagcatatcagcacaaggacaaggaactttagaggaaaaaaaatacctgctgttttcttcagtcaatgcattcagtgtacagttttaggttcattgaaatgaggtgggctgtatacttgttgaatgttgagttcatctatatatatgagctactatatcgatctgcttgtccttg

SEQ ID NO: 84971 - DNA, 1213 bp, Zea Mays
gaaggggcagcgttgcagttagtctgacattttacgccgtcagacgactggcagactgggccgccgccgccctaaaccagctgaggctttcgttggtctcttcgccggcaacgagcaccaccaggagtgaagagttttgttcgccgtgcagtttaagatgtcagaagcacttcagaaagataaggaaattggtgaagaggaagaggaagaggagtatgtattgttagagttggacaattgtctttattcagacatatcgcctggtgctcagttcgtactctctggtttggatacattgacgcctaccttgatagtaggtgacaatctgaagatgagcacggagtacatatttgtcatgactgtagcttgtgccgttgaatgctgtaacaggacaagatcagttactagtttgagttcacttcttggtgagtaacagagcacggagtacatatttgtcatgactgtagcttgtgccgttgaatgctgtaacaggacaagatcagttactagtttgagttcacttcttggtgagtaacagagcacggagtacatatttgtcatgactgtagcttgtgccgttgaatgctgtaacaggacaagatggaaacaagatatatttggaggccataagttacttgttattccttaaagtaccaagcgtgcattttactgattatctattttgttgctaatgaatccctttgttctaacgattttcttctttacaaaatgatttttttttgaaattcccaattcatactagagtttctggctctaatctgcttaccagccgtgctaatccttatgccttctaatgacaggtcggggaatatgatgaaactattggcacctgctatctattttctgaaagtgaaactgaaccaaaacctgcaagtgatgagctggcaccttctaaagaaaacacagaaacaccgcttaacagcagtaaggaagcgcccttgaaggaggtgaaccatctggccagcgttcaaaagatcctcaaatttaagccaatcaatgtggagcactcgcagcatcgagcatatcagcacaaggacaaggaactttagaggaaaaaaaatacctgctgttttcttcagtcaatgcattcagtgtacagttttaggttcattgaaatgaggtgggctgtatacttgttgaatgttgagttcatctatatatatgagctactatatcgatctgcttgtccttg

SEQ ID NO: 84972 - DNA, 1209 bp, Zea Mays
accacatggactgcattggcacatcttcaggcttctcaccgaagccggtccgtgtcgatgaaccggttaggttggttgagatcgctgacatggaggagttcaaggaagagaagaggcgagtagagaaccttagaggagtgaggctgcacaacaatgacgacctaggagagattccaacagactgctgcatcacacaataccccatatcggacactgctgacatttcagattgcaggagaagccggtcacctgaccaatcccactagcgccggcggcctagacactgcacccatcttctcgcaatctcaacctgacgacttcgctattgggttcagtgacgacgccgaccccaatgcatctttcgacctatgcgagagggttgacgtcaagcatgggctcttcgtctcaacggtgggtgcgcccaagacgttcttccaccacgttgagccatcgaagaaggtcagcttccacctgaataataatcccgtagcaagcgacgacgacgtcagcaaggcgacgaccgggaagtcccgttcacccattattagtgtgatgacaaccaaagatagtggcagcagcttttctgtttttagcaagttgaaggcgctcatcagggacaaattcctggtgaagaagctgccttcatcgtgccagaggtccttgttaggcagcaaagaaacagcggcagtgagcgagctgctgcagatggtggtgtcgtcgctcctcttaacaccaacggaggtgacaggccccactaccgagcaagaaaagttggccaggaaggcgatgaagccgggaccccgtcgttgtgatggaagccatgcgtggcttcttccactccccaaaaggagcaaaggcatttccagcatgttttttagtgggaaatgggcatttctgacatccgcattggccatccgcgctccaggtccagggtgcaatcactgaaagaaaggtcttccttctggtcatagctcgtgtaaaaattaaagtacggctctttataatgctactgcttaggaaactcgtatcgggtgccagtgcacgggacgcatagtctttcgtgcatcagacagttaacagcgggtgtataacgggagaaatgtcataattcgtatttattttttttattcgtccttatattaacacgtctgaagtctagccccctgctgtacatcgaaacacagttcataaattgaaattttaatttat

SEQ ID NO: 84973 - DNA, 3955 bp, Zea Mays
gggtgggttcggcgccgagtcggagcacatcggtttgggtgcacgatcgacgcgcattgtgcggtcggccgccttcgcgttgccggccgctgctgccccaacctccactccccatctcgcagtccgccactgcttcgtcttctcgtccgatccccttcgagccccgcctccacacgaacaccccttcggccgttgttgaccaacctcacgcgtcctcctccggtacgtggccaccagttacaatatgctcaactgttgcgagtggaagcaacccgactgttgctgatcaaactgagggcgtcagccattatgttgcttcaaagggtttcatggtttgcgtacgcacaggttgaagtactttgcttgccgctcgcagaggccacccatctcttggtggatttcaatgtgggcactcaagggaaatagaaagaaggattttggaccagtttcatttttttgaactaaagctcaacgtccaagactttaaagagaagtaatgatcttgttcaaaaatgaacagagaatgtattgccctttttttgggggagttaggtgggctaaattctccctttcttcttcctgcattcctcaaaggcgacgtgaagttgtgagatctgggtctccttatgaattgagctggctaaccgtactttaccatttggttaagtccatcattgccaggtgagctgagctacgtactgccggcatgcacgcagccattgtgcaccgaccagtaacagtaaccatatgggctatggcatgcagcacacattcacccctctagctagcattaacatgggggacagaagcacagacgaactttagcccagagttggttggttgccactccgcttcaggggaaaaaaaaaattaagagtcagttgagacagataatcgcttctggcaaaagtactggcggcacaaacagtactgtacatggattagctgctaatcatgcagattcaggcacaggcatcgaggcagggaggcccccacctgccggcaaatctacatgggggtccgtgtgggaacgtgacgtaaaccgtcaaagggaaaaaggtgcggggaatcgagtaccaaccttgggcccctcaccctttccaacgggggagctgactaggcattgctctggtggcccacaaagcagccaatggccttccgatcctacagtcctgctgcggctacaccagctcgctttggctgccaaagacaagaagagaagattgggatatttctattctattcaccgatataaagctactgacgcaggacacagcaaaagcaaaagccaaagtttgagagagagagagagaggggtaatatagcttcatgtgaaagatgacaagaatcccagcataaaataatctcccaaactttgctataaagccacaacccctccccctcctcctttccctccctctctctccttcctcatgcgcgcgcctgccattagcccaggctgtgtacattatttgtagctgaccattcattcatatagagctagttgagcaggcctggttggctgtccataatttttgcttcggatagcattgctgccaggcgactgcaaagctccaagcagacttttgctgtgaggatttttttgcgaggaagggcagagggagcaatggcgccagtcagtttgcctcctggtttcaggttccaccccactgacgaggaactcatcatctgctaccttaagaggaagatcaacgggagacagatagagctcgaaatcattccagaggttgatctttacaagtgtgagccctgggatctgccagaaaaatcatttcttccgagcaaagaccttgaatggtacttcttcagccctcgggaccgcaagtacccaaatggatcgaggacaaaccgcgcaacaaaatctgggtactggaaggcaactgggaaggacagaaaagtgaactcgcataggcgtgcagttggtatgaagaagaccctggtgtactatcggggccgagctccacatggttctcgcactgattgggtcatgcatgagtaccgcctcgacgagagggaatgcgagactgacactggcttacaggacgcatatgctttgtgccgagtgtttaagaagacagcgcctgggccaaaaatcatagagcattatggcgcagtgcaccaccccatcgagcaaactcagtggatgggaagcagcgttgagcgctccccaacgctggacttgtccagtgatgttagaggtgatgacttcgacagcagcagtttctcgttcccgacagaggcgccaatggactcctccatgcatggtgggttgttcgggatgcagatgagtgcacctcacgaggatgccaaatggatgcagtttctgagcgaagacgcctttaacgcaaccaatcctttcttcacgaatccagcttcttccagcttctcatgcctcccatccaaggtggatgttgcactggaatgtgcaaggcttcagcacaggctctcattacctcccctggaagtggaagacttcccacacgacgtcagcctcgacacaaaggcgagcgtgctccgcagcagcaaccccaacaacgaggttgacatccttcaagagttcctctccgtggcgtcggcctcccaggagctaatcaacggaaccagcagcagctacgctgcagaaatgtgggcaggcgctggcacgagcagcaccagcgacacccactacgtcaacgaactatcttccctctttgagtttggggtgaaggctaaagaggaggccgacaatttctaccacatggactgcattggcacatcttcaggcttctcaccgaagccggtccgtgtcgatgaaccggttaggttggttgagatcgctgacatggaggagttcaaggaagagaagaggcgagtagagaaccttagaggagtgaggctgcacaacaatgacgacctaggagagattccaacagactgctgcatcacacaataccccatatcggacactgctgacatttcaggagaagccggtcacctgaccaatcccactagcgccggcggcctagacactgcacccatcttctcgcaatctcaacctgacgacttcgctattgggttcagtgacgacgccgaccccaatgcatctttcgacctatgcgagagggttgacgtcaagcatgggctcttcgtctcaacggtgggtgcgcccaagacgttcttccaccacgttgagccatcgaagaaggtcagcttccacctgaataataatcccgtagcaagcgacgacgacgtcagcaaggcgacgaccgggaagtcccgttcacccattattagtgtgatgacaaccaaagatagtggcagcagcttttctgtttttagcaagttgaaggcgctcatcagggacaaattcctggtgaagaagctgccttcatcgtgccagaggtccttgttaggcagcaaagaaacagcggcagtgagcgagctgctgcagatggtggtgtcgtcgctcctcttaacaccaacggaggtgacaggccccactaccgagcaagaaaagttggccaggaaggcgatgaagccgggaccccgtcgttgtgatggaagccatgcgtggcttcttccactccccaaaaggagcaaaggcatttccagcatgttttttagtgggaaatgggcatttctgacatccgcattggccatccgcgctccaggtccagggtgcaatcactgaaagaaaggtcttccttctggtcatagctcgtgtaaaaattaaagtacggctctttataatgctactgcttaggaaactcgtatcgggtgccagtgcacgggacgcatagtctttcgtgcatcagacagttaacagcgggtgtataacgggagaaatgtcataattcgtatttattttttttattcgtccttatattaacacgtctgaagtctagccccctgctgtacatcgaaacacagttcataaattgaaattttaatttat

SEQ ID NO: 84974 - DNA, 947 bp, Zea Mays
cgccgagtcggagcacatcggtttgggtgcacgatcgacgcgcattgtgcggtcggccgccttcgcgttgccggccgctgctgccccaacctccactccccatctcgcagtccgccactgcttcgtcttctcgtccgatccccttcgagccccgcctccacacgaacaccccttcggccgttgttgaccaacctcacgcgtcctcctccggtacgtggccaccagttacaatatgctcaactgttgcgagtggaagcaacccgactgttgctgatcaaactgagggcgtcagccattatgttgcttcaaagggtttcatggtttgcgtacgcacaggttcgttgaggctgagaagacaaaccaatacctgcaacagccattcttggcaagtttctgcctcgaagagcctgagttgctcctaatgcctcatccgcaacatgccatatgctgttatcaccatctgcttcattattttcttcaacccattcattttctcatgtaaactcttcaagcaccggtgggttgcttctttttcccttggatcctagctttcttaatgtttgaaacctattttccatctttctgttgtaactgacatagaccaatttattaagcctatggtgttctagtcggttcctcttttttttgtatggacctgaaaatgcacaattgcacaatgcatacaacagattcaacaagctgtaatgaacaggaccagtgctatcagcatttgaggtcacaggaggaacaaaagcacttccacttgcactgccgaccacattggactcagggaatatgacctcaacattattagcatgtccacagccaccatcaaactctgaacagacaacagagacagagatgcagatactactatgcaatctacatacatcctgtgaactacaacattccagtggtaagataggaaagggagagaaggaggggat

SEQ ID NO: 84975 - DNA, 1958 bp, Zea Mays
ccgagggaaaaggacagcgagcccggacagcccagcgtcaacgtcaggtgcccgccccgggcggttcccagtcccagtcccactcccaccacggcccgggccactgcactgcgccatccaaggacgactggacgaggaagaaaaaggatttcgaaaaagcgacgctgccgggtatatatacggcgccggcgccgaggagagaggaccccggccgatcccgcacccctgactgtcagccgcgatccgctcttttttgcgtgcagcggcggagcaggagagatggcgtcggaggccaaggacgtgggcatcctcgccatggacatctacttcccgcccaactgcgtgctccaggaagagttggaaacacatgatggcgtgagcaaagggaagtataccattgggcttgggcaggaaagtatggcattttgcactgaagttgaggatgttatttcgatgagcttgacagtggtgaagtccctcctgaaaaattataacattgacccaatgtgcattggacgtttggaagttggcagtgaaacagtaatagacaagagcaagtctataaagacatggctgatgcagatatttgaggaatctggcaatactgatattgaaggagttgactcctcgaatgcatgttatggtggaacagctgcattgtttaattgtgttaactgggttgaaagcaagtcatgggatggtcgctatggacttgttgtttgcacagacagtgcggtttacgctgaaggtccggctcgccctactggtggtgcggctgctattgcaatgctgattggaccaaatgctcctatttgttttgaaagtaaatatagaggatctcatatggcccatgtatacgacttttacaagcccgatcttgcgagtgaatatccggtggttgatgggaagctatcacaaacatgctacctcatggcattggactcctgctacaatgtattttgcaaaaagtatgaaaaacatgaggggaagcagttttcaatttctgatgcagattatgttgtgttccattctccatacaacaagcttgtacagaaaagcttcgctcgtttgtactacaatgatttcttgagaaactgcagcacggttgatggagagtcaagggaaaaattggcaccctatgcaggcttgtcatctgaagaaagctaccagagtcgcgaccttgaaaaggcatctcagcaagtcgccaagaatctgtacgagaccaaggttcagccaacaacattgatcccaaaacaagttgggaatatgtatacagcatcactctacgcagctcttgcatcggttgtccatagtaggcatgaaactctggcaggccagaggattgttatgttttcgtatggcagtgggttgacatcaacaatgttctctttcatgattaatgaaggccatcaccctttcagtctgctaaacatcgcaaacatactggatatttccaagaagctgaaggcaaggcacgtggttcccccagagaaatttgtggaggcactgaaactgatggagcaccgctatggggcaagagatttcgtgacgaatcaagatacaagtctgctatccgcaggcacatactatctcacgcacgttgactccaagtacagaaggttctacgacgtgaaaggtgacggtgtcgccactgcaatgtccaacggccactgatctttcttctgcccgaagctgcaacaagtcaaataacagaggatatgcctgtccataccatgagtccacgacccacattgttgcaggatatgtgatccaagggcagtgcccgtagcatcctagcaggtgctaataccacccatggtacgatccacgcgaattagagcgtgtgtgcatggtacgtcgacgaatgcgacacaagagcgcacacaataaattaaataatttaataggtatgtatgacatttgatgatgatctcttcttacgttataaagcatatcag

SEQ ID NO: 84976 - DNA, 2263 bp, Zea Mays
ccgagggaaaaggacagcgagcccggacagcccagcgtcaacgtcaggtgcccgccccgggcggttcccagtcccagtcccactcccaccacggcccgggccactgcactgcgccatccaaggacgactggacgaggaagaaaaaggatttcgaaaaagcgacgctgccgggtatatatacggcgccggcgccgaggagagaggaccccggccgatcccgcacccctgactgtcagccgcgatccgctcttgtaggctccctccctctccgacccgcgtctccctcctcccactccactgctcctggtctctctctctctctccttctcctccccccgtccgtggccggagatcgacggtttccattttccagatcgcagttcattcagttgctctgttacctttacacggtctgcatgcctctattgtgtctgcagttttgcgtgcagcggcggagcaggagagatggcgtcggaggccaaggacgtgggcatcctcgccatggacatctacttcccgcccaactgcgtgctccaggaagagttggaaacacatgatggcgtgagcaaagggaagtataccattgggcttgggcaggaaagtatggcattttgcactgaagttgaggatgttatttcgatgagcttgacagtggtgaagtccctcctgaaaaattataacattgacccaatgtgcattggacgtttggaagttggcagtgaaacagtaatagacaagagcaagtctataaagacatggctgatgcagatatttgaggaatctggcaatactgatattgaaggagttgactcctcgaatgcatgttatggtggaacagctgcattgtttaattgtgttaactgggttgaaagcaagtcatgggatggtcgctatggacttgttgtttgcacagacagtgcggtttacgctgaaggtccggctcgccctactggtggtgcggctgctattgcaatgctgattggaccaaatgctcctatttgttttgaaagtaaatatagaggatctcatatggcccatgtatacgacttttacaagcccgatcttgcgagtgaatatccggtggttgatgggaagctatcacaaacatgctacctcatggcattggactcctgctacaatgtattttgcaaaaagtatgaaaaacatgaggggaagcagttttcaatttctgatgcagattatgttgtgttccattctccatacaacaagcttgtacagaaaagcttcgctcgtttgtactacaatgatttcttgagaaactgcagcacggttgatggagagtcaagggaaaaattggcaccctatgcaggcttgtcatctgaagaaagctaccagagtcgcgaccttgaaaaggcatctcagcaagtcgccaagaatctgtacgagaccaaggttcagccaacaacattgatcccaaaacaagttgggaatatgtatacagcatcactctacgcagctcttgcatcggttgtccatagtaggcatgaaactctggcaggccagaggattgttatgttttcgtatggcagtgggttgacatcaacaatgttctctttcatgattaatgaaggccatcaccctttcagtctgctaaacatcgcaaacatactggatatttccaagaagctgaaggcaaggttcccccagagaaatttgtggaggcactgaaactgatggagcaccgctatggggcaagagatttcgtgacgaatcaagatacaagtctgctatccgcaggcacatactatctcacgcacgttgactccaagtacagaaggttctacgacgtgaaaggtgacggtgtcgccactgcaatgtccaacggccactgatctttcttctgcccgaagctgcaacaagtcaaataacagaggcaagtgtcctaagcatccttagattattatatctattaagaggggaagctcgagttatagattaatctatgcccagctgtaaggttgtaaagttagttagagctgcgcatgcttgtttagtaaaagctctgctgctcttcagttatttagcgaatcaagcacactgctgggctaataagaattgtaaacaataatctgcagaatcactggctacatccaggttatgctgatgaatgcacgatttcatgtttaacacgatcaatgcatctggttacatccaggttatgctgatgaatggacattttggttccatccccatatcctaatgtagtcactatataattcctttccctctttgatgaagtttc

SEQ ID NO: 84977 - DNA, 1937 bp, Zea Mays
ccgagggaaaaggacagcgagcccggacagcccagcgtcaacgtcaggtgcccgccccgggcggttcccagtcccagtcccactcccaccacggcccgggccactgcactgcgccatccaaggacgactggacgaggaagaaaaaggatttcgaaaaagcgacgctgccgggtatatatacggcgccggcgccgaggagagaggaccccggccgatcccgcacccctgactgtcagccgcgatccgctcttgtaggctccctccctctccgacccgcgtctccctcctcccactccactgctcctgttttgcgtgcagcggcggagcaggagagatggcgtcggaggccaaggacgtgggcatcctcgccatggacatctacttcccgcccaactgcgtgctccaggaagagttggaaacacatgatggcgtgagcaaagggaagtataccattgggcttgggcaggaaagtatggcattttgcactgaagttgaggatgttatttcgatgagcttgacagtggtgaagtccctcctgaaaaattataacattgacccaatgtgcattggacgtttggaagttggcagtgaaacagtaatagacaagagcaagtctataaagacatggctgatgcagatatttgaggaatctggcaatactgatattgaaggagttgactcctcgaatgcatgttatggtggaacagctgcattgtttaattgtgttaactgggttgaaagcaagtcatgggatggtcgctatggacttgttgtttgcacagacagtgcggtttacgctgaaggtccggctcgccctactggtggtgcggctgctattgcaatgctgattggaccaaatgctcctatttgttttgaaagtaaatatagaggatctcatatggcccatgtatacgacttttacaagcccgatcttgcgagtgaatatccggtggttgatgggaagctatcacaaacatgctacctcatggcattggactcctgctacaatgtattttgcaaaaagtatgaaaaacatgaggggaagcagttttcaatttctgatgcagattatgttgtgttccattctccatacaacaagcttgtacagaaaagcttcgctcgtttgtactacaatgatttcttgagaaactgcagcacggttgatggagagtcaagggaaaaattggcaccctatgcaggcttgtcatctgaagaaagctaccagagtcgcgaccttgaaaaggcatctcagcaagtcgccaagaatctgtacgagaccaaggttcagccaacaacattgatcccaaaacaagttgggaatatgtatacagcatcactctacgcagctcttgcatcggttgtccatagtaggcatgaaactctggcaggccagaggattgttatgttttcgtatggcagtgggttgacatcaacaatgttctctttcatgattaatgaaggccatcaccctttcagtctgctaaacatcgcaaacatactggatatttccaagaagctgaaggcaaggcacgtggttcccccagagaaatttgtggaggcactgaaactgatggagcaccgctatggggcaagagatttcgtgacgaatcaagatacaagtctgctatccgcaggcacatactatctcacgcacgttgactccaagtacagaaggttctacgacgtgaaaggtgacggtgtcgccactgcaatgtccaacggccactgatctttcttctgcccgaagctgcaacaagtcaaataacagagaatcactggctacatccaggttatgctgatgaatgcacgatttcatgtttaacacgatcaatgcatctggttacatccaggttatgctgatgaatggacattttggttccatccccatatcctaatgtagtcactatataattcctttccctctttgatgaagtttc

SEQ ID NO: 84978 - DNA, 1882 bp, Zea Mays
ccgagggaaaaggacagcgagcccggacagcccagcgtcaacgtcaggtgcccgccccgggcggttcccagtcccagtcccactcccaccacggcccgggccactgcactgcgccatccaaggacgactggacgaggaagaaaaaggatttcgaaaaagcgacgctgccgggtatatatacggcgccggcgccgaggagagaggaccccggccgatcccgcacccctgactgtcagccgcgatccgctcttttttgcgtgcagcggcggagcaggagagatggcgtcggaggccaaggacgtgggcatcctcgccatggacatctacttcccgcccaactgcgtgctccaggaagagttggaaacacatgatggcgtgagcaaagggaagtataccattgggcttgggcaggaaagtatggcattttgcactgaagttgaggatgttatttcgatgagcttgacagtggtgaagtccctcctgaaaaattataacattgacccaatgtgcattggacgtttggaagttggcagtgaaacagtaatagacaagagcaagtctataaagacatggctgatgcagatatttgaggaatctggcaatactgatattgaaggagttgactcctcgaatgcatgttatggtggaacagctgcattgtttaattgtgttaactgggttgaaagcaagtcatgggatggtcgctatggacttgttgtttgcacagacagtgcggtttacgctgaaggtccggctcgccctactggtggtgcggctgctattgcaatgctgattggaccaaatgctcctatttgttttgaaagtaaatatagaggatctcatatggcccatgtatacgacttttacaagcccgatcttgcgagtgaatatccggtggttgatgggaagctatcacaaacatgctacctcatggcattggactcctgctacaatgtattttgcaaaaagtatgaaaaacatgaggggaagcagttttcaatttctgatgcagattatgttgtgttccattctccatacaacaagcttgtacagaaaagcttcgctcgtttgtactacaatgatttcttgagaaactgcagcacggttgatggagagtcaagggaaaaattggcaccctatgcaggcttgtcatctgaagaaagctaccagagtcgcgaccttgaaaaggcatctcagcaagtcgccaagaatctgtacgagaccaaggttcagccaacaacattgatcccaaaacaagttgggaatatgtatacagcatcactctacgcagctcttgcatcggttgtccatagtaggcatgaaactctggcaggccagaggattgttatgttttcgtatggcagtgggttgacatcaacaatgttctctttcatgattaatgaaggccatcaccctttcagtctgctaaacatcgcaaacatactggatatttccaagaagctgaaggcaaggcacgtggttcccccagagaaatttgtggaggcactgaaactgatggagcaccgctatggggcaagagatttcgtgacgaatcaagatacaagtctgctatccgcaggcacatactatctcacgcacgttgactccaagtacagaaggttctacgacgtgaaaggtgacggtgtcgccactgcaatgtccaacggccactgatctttcttctgcccgaagctgcaacaagtcaaataacagagaatcactggctacatccaggttatgctgatgaatgcacgatttcatgtttaacacgatcaatgcatctggttacatccaggttatgctgatgaatggacattttggttccatccccatatcctaatgtagtcactatataattcctttccctctttgatgaagtttc

SEQ ID NO: 84979 - DNA, 1419 bp, Zea Mays
gtcaatggagtgagcaacgagggttgggttcggcagcagcgagggaaaagccaaagccccccagggcagcaggaagcaatagaagcgagcgaggcagcggcgtggggcgaggagtggaggacaccgatccccgccggagagcgcgtccatcccaaatggcgactgcagcttcgcccgccgctgcctttccccacatcctctccctctcctcctaatcccctcccaatccccccctctctctctcttcctcgccagctggttcgttccgcacccgccgccgcattgggtgccgaggagggacgcaatggagcagtacgagaaggtggagaagatcggggagggcacgtacggggtggtgtacaaggcgctggacaaggccaccaacgagacgatcgcgctcaagaagatccgcctcgagcaggaggacgagggcgtcccgtccaccgccatccgcgagatctctctcctcaaggagatgaaccacggcaacatcgtcaggttacatgatgttgtccacagcgagaagcggatatacctcgtcttcgagtacctggatctggacctcaagaagttcatggactcttgcccggagtttgctaagaatcccactttgattaagtcatacctctaccagatactccgtggcgttgcgtactgccattctcatagagttcttcaccgagatttgaaacctcagaacttgttgatagatcggcgtaataatgcactgaagcttgcagactttggtttagccagggcatttggaattcctgtccgtacatttactcatgaggtagtgacattatggtacagagctccagaaatccttcttggagcgagacagtattccacaccagttgacgtatggtctgtgtggctgtatctttgcggaaatggtgaaccaaaagccactattccctggtgattctgagatcgacgaactgttcaagatattcagggtgctaggtacaccgaatgaacaaggttggcctggagtcagttgtttgcctgacttcaagactgctttccccaggtggcaagctcaggacctggcaacaatagtcccaaatctagaacctgctggcttggaccttctctctgtatgagccaagcaaaagaatcacagctaggcaagcacttgagcacgagtacttcaaggaccttgagatggtacagtgacctgctaaatgtgcttcgcgttgctttggcatttgtaattgtctgagctgagtcgctcattcctttttatgggcgtctgtactctctcattctctctgcatttttgtcgttcagctggatattttgaatctggtgtgttttgagatgtattaaggaatatcaaatagattaccgccttggtctctatttactgaaagtaaatatcctccatgtttatttcccccgaagcatccatggttc

SEQ ID NO: 84980 - DNA, 1463 bp, Zea Mays
agcagctgcggacttgcgagcccaggcaggagaggactcgtccacatctattccttccttgttcggccgcccttcctcagttggtcgtcccctcttaccattacttctcctcctccctcgccccgtcggcgggcggccattgacgactggatccttcattcttgttctcaggggaaggacgacccaagacaggaggaggaggaggaggaggaggaggaggaggaggaggaggaggaggaggaggaggaggacagtgccgccatgaccggaggaggggaggagcaggggaggtcgctgttcggcgtgtctctgacaaacaggcctaggtggcagcagttcatgatctgctcctcgggcttcttcttcggctacctcgtcaatggcatctgcgaggagtacgtgtacaacaggcttcagttcagctacggctggtacttcacgtttgtgcaggggttcgtgtacctggcgctgatacggctgcaggggttcacggtgaagcagatggtgaacccgtggcggacctacgtgcgcctctcggcggtgctcatgggctccaatggcctcaccaagggatccctcgccttcctcaattaccctgcacagatcatgttcaagtcaaccaaggttctaccggtgatggtgatgggagccttcatccctggtctgaggcgcaagtacgcgttccaagagtacgtgtcggccgtgatgctcgtcgtcggcctcatactcttcacgctcgcggacgcgcagacgtcgcccaacttcagcatggccggcgtggccatggtgtccggggcgctcgtcatggatgctttccttggcaacctgcaagaagcaatcttcaagatgaacccggacacgactcaggtgacgacggcgaggaaggcggtgacgctgctgctgtcgtacctgatattcaccaagcccctcacggagcagcacgcgacggggctcctcctcataaccatgggcatcgtcatcaagctcctgccggagaacaaggagagacgcccgcgccggctgcccaagaatgacgacgacgacaagccccgggagagcagagaagcgggggaggaaacagcatgactgctgctatagacccgacacccgagcaaagcagaactgacgccagctcgatcagcaaccctagaagaaattctcagtcctccaaaacagcaatcccaggaggaggatgggatatacatgcaggatagagcactacatacagtaataataacctttttcctcgctcctcccctcgcttttctcatgtgctgtggttaatgttaattgtgcacttcgctctaacatcttaagctttttataaaggcaagggccagaggtctgaattctaattagcgcaatatctaaggtcttgttcagttattcctatcctatgtggattgtatgagattaaaaaaaatttataaaagattttgacttattcaggattgaaatccact

SEQ ID NO: 84981 - DNA, 1594 bp, Zea Mays
agcagctgcggacttgcgagcccaggcaggagaggactcgtccacatctattccttccttgttcggccgcccttcctcagttggtcgtcccctcttaccattacttctcctcctccctcgccccgtcggcgggcggccattgacgactggatccttcattcttgttctcaggggaaggacgacccaagacaggaggaggaggaggaggaggaggaggaggaggaggaggaggaggaggaggaggaggaggacagtgccgccatgaccggaggaggggaggagcaggggaggtcgctgttcggcgtgtctctgacaaacaggcctaggtggcagcagttcatgatctgctcctcgggcttcttcttcggctacctcgtcaatggcatctgcgaggagtacgtgtacaacaggcttcagttcagatggtgaacccgtggcggacctacgtgcgcctctcggcggtgctcatgggctccaatggcctcaccaagggatccctcgccttcctcaattaccctgcacagatcatgttcaagtcaaccaaggttctaccggtgatggtgatgggagccttcatccctggtctgaggcgcaagtacgcgttccaagagtacgtgtcggccgtgatgctcgtcgtcggcctcatactcttcacgctcgcggacgcgcagacgtcgcccaacttcagcatggccggcgtggccatggtgtccggggcgctcgtcatggatgctttccttggcaacctgcaagaagcaatcttcaagatgaacccggacacgactcagatggagatgctgttctgctccactgtcgttggccttccgttcctagcggtgcccatggtgttaacaggagagctcgtgacggcttggacttcctgctcccagcatctgtacgtgtacgcggtgctggtgttggaggcgatggccacgttcgtcggccaggtctccgtgctctccctcatcgcgcttttcggtgcagcaaccacagccatggtgacgacggcgaggaaggcggtgacgctgctgctgtcgtacctgatattcaccaagcccctcacggagcagcacgcgacggggctcctcctcataaccatgggcatcgtcatcaagctcctgccggagaacaaggagagacgcccgcgccggctgcccaagaatgacgacgacgacaagccccgggagagcagagaagcgggggaggaaacagcatgactgctgctatagacccgacacccgagcaaagcagaactgacgccagctcgatcagcaaccctagaagaaattctcagtcctccaaaacagcaatcccaggaggaggatgggatatacatgcaggatagagcactacatacagtaataataacctttttcctcgctcctcccctcgcttttctcatgtgctgtggttaatgttaattgtgcacttcgctctaacatcttaagctttttataaaggcaagggccagaggtctgaattctaattagcgcaatatctaaggtcttgttcagttattcctatcctatgtggattgtatgagattaaaaaaaatttataaaagattttgacttattcaggattgaaatccact

SEQ ID NO: 84982 - DNA, 1829 bp, Zea Mays
cagctctccatgactgacttgagcgaggacgacgacgctacgactcctcgcctcctctagtcctaggaatagaatccttggcggcttggcctgcatgcagttggcgtatcttcattttatttatttatttatttatttattgtgtttgtgtatatataagggcggttatcatatcttggcgagtagcagctgcggacttgcgagcccaggcaggagaggactcgtccacatctattccttccttgttcggccgcccttcctcagttggtcgtcccctcttaccattacttctcctcctccctcgccccgtcggcgggcggccattgacgactggatccttcattcttgttctcaggggaaggacgacccaagacaggaggaggaggaggaggaggaggaggaggaggaggaggaggaggaggaggaggaggaggacagtgccgccatgaccggaggaggggaggagcaggggaggtcgctgttcggcgtgtctctgacaaacaggcctaggtggcagcagttcatgatctgctcctcgggcttcttcttcggctacctcgtcaatggcatctgcgaggagtacgtgtacaacaggcttcagttcaggggttcgtgtacctggcgctgatacggctgcaggggttcacggtgaagcagatggtgaacccgtggcggacctacgtgcgcctctcggcggtgctcatgggctccaatggcctcaccaagggatccctcgccttcctcaattaccctgcacagatcatgttcaagtcaaccaaggttctaccggtgatggtgatgggagccttcatccctggtctgaggcgcaagtacgcgttccaagagtacgtgtcggccgtgatgctcgtcgtcggcctcatactcttcacgctcgcggacgcgcagacgtcgcccaacttcagcatggccggcgtggccatggtgtccggggcgctcgtcatggatgctttccttggcaacctgcaagaagcaatcttcaagatgaacccggacacgactcagatggagatgctgttctgctccactgtcgttggccttccgttcctagcggtgcccatggtgttaacaggagagctcgtgacggcttggacttcctgctcccagcatctgtacgtgtacgcggtgctggtgttggaggcgatggccacgttcgtcggccaggtctccgtgctctccctcatcgcgcttttcggtgcagcaaccacagccatggtgacgacggcgaggaaggcggtgacgctgctgctgtcgtacctgatattcaccaagcccctcacggagcagcacgcgacggggctcctcctcataaccatgggcatcgtcatcaagctcctgccggagaacaaggagagacgcccgcgccggctgcccaagaatgacgacgacgacaagccccgggagagcagagaagcgggggaggaaacagcatgactgctgctatagacccgacacccgagcaaagcagaactgacgccagctcgatcagcaaccctagaagaaattctcagtcctccaaaacagcaatcccaggaggaggatgggatatacatgcaggatagagcactacatacagtaataataacctttttcctcgctcctcccctcgcttttctcatgtgctgtggttaatgttaattgtgcacttcgctctaacatcttaagctttttataaaggcaagggccagaggtctgaattctaattagcgcaatatctaaggtcttgttcagttattcctatcctatgtggattgtatgagattaaaaaaaatttataaaagattttgacttattcaggattgaaatccact

SEQ ID NO: 84983 - DNA, 2169 bp, Zea Mays
cgcagctgtagtagctgtgaatctctgagaaatccggcagctgcagctctccatgactgacttgagcgaggacgacgacgctacgactcctcgcctcctctagtcctaggaatagaatccttggcggcttggcctgcatgcagttggcgtatcttcattttatttatttatttatttatttattgtgtttgtgtatatataagggcggttatcatatcttggcgagtagcagctgcggacttgcgagcccaggcaggagaggactcgtccacatctattccttccttgttcggccgcccttcctcagttggtcgtcccctcttaccattacttctcctcctccctcgccccgtcggcgggcggccattgacgactggatccttcattcttgttctcaggggaaggacgacccaagacaggaggaggaggaggaggaggaggaggaggaggaggaggaggaggaggaggaggaggaggacagtgccgccatgaccggaggaggggaggagcaggggaggtcgctgttcggcgtgtctctgacaaacaggcctaggtggcagcagttcatgatctgctcctcgggcttcttcttcggctacctcgtcaatggcatctgcgaggagtacgtgtacaacaggcttcagttcagctacggctggtacttcacgtttgtgcaggggttcgtgtacctggcgctgatacggctgcaggggttcacggtgaagcagatggtgaacccgtggcggacctacgtgcgcctctcggcggtgctcatgggctccaatggcctcaccaagggatccctcgccttcctcaattaccctgcacagatcatgttcaagtcaaccaagatagcacagctatgaatgaaaagggagcacaagtagtgtacctggcatcaagatttgatgttttggttaggtgccaaactagccatctatgtcatgtctctctctactttaggggtacgaatactacatctctggctacagcgagaatagctaagccaagcaatttggactcttctttactgagatcgatataattaatgagatcgatataactgcaaacaagcattctgatctgaacagaaataccaagctgtatactaatccttcaggttctaccggtgatggtgatgggagccttcatccctggtctgaggcgcaagtacgcgttccaagagtacgtgtcggccgtgatgctcgtcgtcggcctcatactcttcacgctcgcggacgcgcagacgtcgcccaacttcagcatggccggcgtggccatggtgtccggggcgctcgtcatggatgctttccttggcaacctgcaagaagcaatcttcaagatgaacccggacacgactcagatggagatgctgttctgctccactgtcgttggccttccgttcctagcggtgcccatggtgttaacaggagagctcgtgacggcttggacttcctgctcccagcatctgtacgtgtacgcggtgctggtgttggaggcgatggccacgttcgtcggccaggtctccgtgctctccctcatcgcgcttttcggtgcagcaaccacagccatggtgacgacggcgaggaaggcggtgacgctgctgctgtcgtacctgatattcaccaagcccctcacggagcagcacgcgacggggctcctcctcataaccatgggcatcgtcatcaagctcctgccggagaacaaggagagacgcccgcgccggctgcccaagaatgacgacgacgacaagccccgggagagcagagaagcgggggaggaaacagcatgactgctgctatagacccgacacccgagcaaagcagaactgacgccagctcgatcagcaaccctagaagaaattctcagtcctccaaaacagcaatcccaggaggaggatgggatatacatgcaggatagagcactacatacagtaataataacctttttcctcgctcctcccctcgcttttctcatgtgctgtggttaatgttaattgtgcacttcgctctaacatcttaagctttttataaaggcaagggccagaggtctgaattctaattagcgcaatatctaaggtcttgttcagttattcctatcctatgtggattgtatgagattaaaaaaaatttataaaagattttgacttattcaggattgaaatccact

SEQ ID NO: 84984 - DNA, 2022 bp, Zea Mays
cgcagctgtagtagctgtgaatctctgagaaatccggcagctgcagctctccatgactgacttgagcgaggacgacgacgctacgactcctcgcctcctctagtcctaggaatagaatccttggcggcttggcctgcatgcagttggcgtatcttcattttatttatttatttatttatttattgtgtttgtgtatatataagggcggttatcatatcttggcgagtagcagctgcggacttgcgagcccaggcaggagaggactcgtccacatctattccttccttgttcggccgcccttcctcagttggtcgtcccctcttaccattacttctcctcctccctcgccccgtcggcgggcggccattgacgactggatccttcattcttgttctcaggggaaggacgacccaagacaggaggaggaggaggaggaggaggaggaggaggaggaggaggaggaggaggaggaggaggacagtgccgccatgaccggaggaggggaggagcaggggaggtcgctgttcggcgtgtctctgacaaacaggcctaggtggcagcagttcatgatctgctcctcgggcttcttcttcggctacctcgtcaatggcatctgcgaggagtacgtgtacaacaggcttcagttcaggtacacagctacggctggtacttcacgtttgtgcaggggttcgtgtacctggcgctgatacggctgcaggggttcacggtgaagcagatggtgaacccgtggcggacctacgtgcgcctctcggcggtgctcatgggctccaatggcctcaccaagggatccctcgccttcctcaattaccctgcacagatcatgttcaagtcaaccaagatagcacagctatgaatgaaaagggagcacaagtagtgtacctggcatcaagatttgatgttttggttaggtgccaaactagccatctatgtcatgtctctctctactttaggggttctaccggtgatggtgatgggagccttcatccctggtctgaggcgcaagtacgcgttccaagagtacgtgtcggccgtgatgctcgtcgtcggcctcatactcttcacgctcgcggacgcgcagacgtcgcccaacttcagcatggccggcgtggccatggtgtccggggcgctcgtcatggatgctttccttggcaacctgcaagaagcaatcttcaagatgaacccggacacgactcagatggagatgctgttctgctccactgtcgttggccttccgttcctagcggtgcccatggtgttaacaggagagctcgtgacggcttggacttcctgctcccagcatctgtacgtgtacgcggtgctggtgttggaggcgatggccacgttcgtcggccaggtctccgtgctctccctcatcgcgcttttcggtgcagcaaccacagccatggtgacgacggcgaggaaggcggtgacgctgctgctgtcgtacctgatattcaccaagcccctcacggagcagcacgcgacggggctcctcctcataaccatgggcatcgtcatcaagctcctgccggagaacaaggagagacgcccgcgccggctgcccaagaatgacgacgacgacaagccccgggagagcagagaagcgggggaggaaacagcatgactgctgctatagacccgacacccgagcaaagcagaactgacgccagctcgatcagcaaccctagaagaaattctcagtcctccaaaacagcaatcccaggaggaggatgggatatacatgcaggatagagcactacatacagtaataataacctttttcctcgctcctcccctcgcttttctcatgtgctgtggttaatgttaattgtgcacttcgctctaacatcttaagctttttataaaggcaagggccagaggtctgaattctaattagcgcaatatctaaggtcttgttcagttattcctatcctatgtggattgtatgagattaaaaaaaatttataaaagattttgacttattcaggattgaaatccact

SEQ ID NO: 84985 - DNA, 1928 bp, Zea Mays
gacgagcaaaagatggccagatgggtgacgcagctgtagtagctgtgaatctctgagaaatccggcagctgcagctctccatgactgacttgagcgaggacgacgacgctacgactcctcgcctcctctagtcctaggaatagaatccttggcggcttggcctgcatgcagttggcgtatcttcattttatttatttatttatttatttattgtgtttgtgtatatataagggcggttatcatatcttggcgagtagcagctgcggacttgcgagcccaggcaggagaggactcgtccacatctattccttccttgttcggccgcccttcctcagttggtcgtcccctcttaccattacttctcctcctccctcgccccgtcggcgggcggccattgacgactggatccttcattcttgttctcaggggaaggacgacccaagacaggaggaggaggaggaggaggaggaggaggaggaggaggaggaggaggaggaggaggaggacagtgccgccatgaccggaggaggggaggagcaggggaggtcgctgttcggcgtgtctctgacaaacaggcctaggtggcagcagttcatgatctgctcctcgggcttcttcttcggctacctcgtcaatggcatctgcgaggagtacgtgtacaacaggcttcagttcagctacggctggtacttcacgtttgtgcaggggttcgtgtacctggcgctgatacggctgcaggggttcacggtgaagcagatggtgaacccgtggcggacctacgtgcgcctctcggcggtgctcatgggctccaatggcctcaccaagggatccctcgccttcctcaattaccctgcacagatcatgttcaagtcaaccaaggttctaccggtgatggtgatgggagccttcatccctggtctgaggcgcaagtacgcgttccaagagtacgtgtcggccgtgatgctcgtcgtcggcctcatactcttcacgctcgcggacgcgcagacgtcgcccaacttcagcatggccggcgtggccatggtgtccggggcgctcgtcatggatgctttccttggcaacctgcaagaagcaatcttcaagatgaacccggacacgactcagatggagatgctgttctgctccactgtcgttggccttccgttcctagcggtgcccatggtgttaacaggagagctcgtgacggcttggacttcctgctcccagcatctgtacgtgtacgcggtgctggtgttggaggcgatggccacgttcgtcggccaggtctccgtgctctccctcatcgcgcttttcggtgcagcaaccacagccatggtgacgacggcgaggaaggcggtgacgctgctgctgtcgtacctgatattcaccaagcccctcacggagcagcacgcgacggggctcctcctcataaccatgggcatcgtcatcaagctcctgccggagaacaaggagagacgcccgcgccggctgcccaagaatgacgacgacgacaagccccgggagagcagagaagcgggggaggaaacagcatgactgctgctatagacccgacacccgagcaaagcagaactgacgccagctcgatcagcaaccctagaagaaattctcagtcctccaaaacagcaatcccaggaggaggatgggatatacatgcaggatagagcactacatacagtaataataacctttttcctcgctcctcccctcgcttttctcatgtgctgtggttaatgttaattgtgcacttcgctctaacatcttaagctttttataaaggcaagggccagaggtctgaattctaattagcgcaatatctaaggtcttgttcagttattcctatcctatgtggattgtatgagattaaaaaaaatttataaaagattttgacttattcaggattgaaatccact

SEQ ID NO: 84986 - DNA, 2871 bp, Zea Mays
ctcaccatgctggagccatgcccccccaacccttgcactgcctgtatctcgcctgcacgcgtggaggatcagatgtgacagcgtttgacaaagaccaagagggattcagggatgtccccatgccttcgattcagacggctggctctgtcccacatcttcgggttgagaagctaccgatgcaggaggtttctgatccaccagaaacagtaaggaaagcagaaacaaaaaatattacttccattgggaaggatgtgattttcgagcaagatccatgctcttcatatcagttatggggcagtatgaaatttgaagaagatggccatttgctgtctcaggcaaagagggatttgtcacatttggattatagagcacagtctgccgacaccaaatatgttactgaacttgggtcacatgcatgtttgaaggatccattgccaatgggaagagattatcataggcagaagctacaattttctacttcagactgttcttttgagaaggcttctgcattagaagcagcatcaagtagcccagatgcattagggacaatgagaaccaaaatcaaatccagcaccctcagtgcaagtccagattatctttcgtcttatcctactgctgctccttgcatgcggaagtgtccaggagcagttgaacttgatcacggtttgggtcattcagaacattccaacagaagatcagaccaatttactttattttcaagccgtaatggtcgatctgtagaaaaatgcaaagagatggttcaatatgccagagggttccaccatgcagatgagatcaatcatgttccatttcaatggtgctttgaggatgaaggtccttcagtatcaagaggcctgcagtatggcgatgagatcccttctttatctaggaagaagtataacgtggcaccttcacgctcaagtcagtggcactatggtcctcaaaccgcactgtcctcaaggagacccgactatggtgatgagatcccgtcactctctcttcactatggttaccgagataggacccatttgcgttctggtaattggtgccatgatgctgaggcacgtataccgtcaagataccagcaaggtacttctcatggcaatggtcactcaaggaattgtttttccaggattaataccaacgagcaagccaaagttatcacaagcaaacatacctttgcaaaacctaggatgattaacagaaactgtagtgaccaacataggatcaatatgaaaggtaatcgctggagaaattctgaggatttaatggaccaagttcgtgggccgagggcaaataaattgaacaatgcttcagtatcctccactgtgaaagatatcacaagtccattgatccgtagaaatcagtataatagatcagatttttcagttcaatataatcaggccaagttttttatgataaagtcatatagtgaagatgacattcataaaggtatcaaatacaacgtttgggcaagtacaccaaatgggaacaataagctggatgctgcataccatgaagctcaaaatttaatggacagtggggaaaggtgccctgtcttcctattcttctcggttaacaccagtggacagttcgtaggtttggctgaaatgttaggtcctgttgatttcaagaagaccatggatttttgggaagaagataaatggagtggctttttccctataaaatggcatattataaaggatattccaaatcggttgttcaaacatataattcttgaaaacaatgacaacaggattgttacttttagcagggacacacaggagattgggttgccgcaaggtgtgcaaatgttgaaaattttcaaggaacagcctcagggaacatcaattctggatgattttgatttttatgaagaaaaggcgaatgcacgccgcacccaaaagagaggaaattcagagtcgacatatggagctcgattctctgatgactcgaaatctattgtatgcacatttctgtttagagctgtgatgaaacatgttttcaagaatattataaagcacagcttttgttacctgatctttataattgaactggatgcacctctgcgaaaaatgtgcttgccgccgcttttcacgtccttgtgtaggattgcatagcatctgtgaatatgagaataggtgatttgcacaccccttttcgtagaaaattacgcctcgtatacagctgctggcaatcttatctggaataaagaaaataagcatggaggtttaaattctatgggggaatcatgtggtcctgaaaccagagagctgggtgccaggaatctgaactctgttgtgtctgtatatcctgtgtgtgtagcacctactcaaacatttttttttgctacatgtcattttctgatatattcctaattggcaggaaaatttggaggcaaacatggagagttggagtttgttcgagactttggagtaatgcaaatatagatatctgcacaactgaaataaagatcaagatgggtcagtgaactagttgaaggcactgacgctccttcaaagtgtttatatggttgcaattgaaactgcttataattgttatatagtgtttacgtagaagcacggatgtgctggtaaatacagccccggtgcaattttaacaccagacgtttcctgaaacatgtttactttgatatattatagaattccacagttttgttgttttggtgctctcctacgtgctagagtcaatcttattggcatttcacggttaggaacagaaaacccaagaatagctaggaatatcttgcttcaggacacaacggtagcctgttgtggtaacagatgaggacataaacgcttcagtgcgtgaaaatgctaaagaattctgttcaaaagaatgccatagcac

SEQ ID NO: 84987 - DNA, 2506 bp, Zea Mays
tgcccctccccattgtggatccgtgctgttcgcgtcgtccacaccaaagtgtgcctcccctttgtggagccgtgctgctgcctcaccatgctggagccatgcccccccaacccttgcactgcctgtatctcgcctgcacgcgtggaggatcagatgtgacagcgtttgacaaagaccaagagggattcagggatgtccccatgccttcgattcagacggctggctctgtcccacatcttcgggttgagaagctaccgatgcaggaggtttctgatccaccagaaacagtaaggaaagcagaaacaaaaaatattacttccattgggaaggatgtgattttcgagcaagatccatgctcttcatatcagttatggggcagtatgaaatttgaagaagatggccatttgctgtctcaggcaaagagggatttgtcacatttggattatagagcacagtctgccgacaccaaatatgttactgaacttgggtcacatgcatgtttgaaggatccattgccaatgggaagagattatcataggcagaagctacaattttctacttcagactgttcttttgagaaggcttctgcattagaagcagcatcaagtagcccagatgcattagggacaatgagaaccaaaatcaaatccagcaccctcagtgcaagtccagattatctttcgtcttatcctactgctgctccttgcatgcggaagtgtccaggagcagttgaacttgatcacggtttgggtcattcagaacattccaacagaagatcagaccaatttactttattttcaagccgtaatggtcgatctgtagaaaaatgcaaagagatggttcaatatgccagagggttccaccatgcagatgagatcaatcatgttccatttcaatggtgctttgaggatgaaggtccttcagtatcaagaggcctgcagtatggcgatgagatcccttctttatctaggaagaagtataacgtggcaccttcacgctcaagtcagtggcactatggtcctcaaaccgcactgtcctcaaggagacccgactatggtgatgagatcccgtcactctctcttcactatggttaccgagataggacccatttgcgttctggtaattggtgccatgatgctgaggcacgtataccgtcaagataccagcaaggtacttctcatggcaatggtcactcaaggaattgtttttccaggattaataccaacgagcaagccaaagttatcacaagcaaacatacctttgcaaaacctaggatgattaacagaaactgtagtgaccaacataggatcaatatgaaaggtaatcgctggagaaattctgaggatttaatggaccaagttcgtgggccgagggcaaataaattgaacaatgcttcagtatcctccactgtgaaagatatcacaagtccattgatccgtagaaatcagtataatagatcagatttttcagttcaatataatcaggccaagttttttatgataaagtcatatagtgaagatgacattcataaaggtatcaaatacaacgtttgggcaagtacaccaaatgggaacaataagctggatgctgcataccatgaagctcaaaatttaatggacagtggggaaaggttaacaccagtggacagttcgtaggtttggctgaaatgttaggtcctgttgatttcaagaagaccatggatttttgggaagaagataaatggagtggctttttccctataaaatggcatattataaaggatattccaaatcggttgttcaaacatataattcttgaaaacaatgacaacaggattgttacttttagcagggacacacaggagattgggttgccgcaaggtgtgcaaatgttgaaaattttcaaggaacagcctcagggaacatcaattctggatgattttgatttttatgaagaaaaggcgaatgcacgccgcacccaaaagagaggaaattcagagtcgacatatggagctcgattctctgatgactcgaaatctattgaaaatttggaggcaaacatggagagttggagtttgttcgagactttggagtaatgcaaatatagatatctgcacaactgaaataaagatcaagatgggtcagtgaactagttgaaggcactgacgctccttcaaagtgtttatatggttgcaattgaaactgcttataattgttatatagtgtttacgtagaagcacggatgtgctggtaaatacagccccggtgcaattttaacaccagacgtttcctgaaacatgtttactttgatatattatagaattccacagttttgttgttttggtgctctcctacgtgctagagtcaatcttattggcatttcacggttaggaacagaaaacccaagaatagctaggaatatcttgcttcaggacacaacggtagcctgttgtggtaacagatgaggacataaacgcttcagtgcgtgaaaatgctaaagaattctgttcaaaagaatgccatagcac

SEQ ID NO: 84988 - DNA, 2609 bp, Zea Mays
catcgagcaaggcagcaatcacaaagcggaacggcaccctagggcagcgggagcccgcagcgcacaccgtcgtgccgccgtccgcctgcccccccatcgccctgcgccggtgctccaggcgcgtctcgcccgactcagctacgcacttccgctggccacccgcggcctgttgggcggctcgacctcgttcccgcccttaccctcgtcgcatcggcctcgcagcctcgatcgaggccgacgacctccagcgacctactgcccaggcccaggtagagcgctaggggcctccagtcaaacccatccttgccgttgccggccgatttggtttcttgctttagagatgcaggaggtttctgatccaccagaaacagtaaggaaagcagaaacaaaaaatattacttccattgggaaggatgtgattttcgagcaagatccatgctcttcatatcaggggcagtatgaaatttgaagaagatggccatttgctgtctcaggcaaagagggatttgtcacatttggattatagagcacagtctgccgacaccaaatatgttactgaacttgggtcacatgcatgtttgaaggatccattgccaatgggaagagattatcataggcagaagctacaattttctacttcagactgttcttttgagaaggcttctgcattagaagcagcatcaagtagcccagatgcattagggacaatgagaaccaaaatcaaatccagcaccctcagtgcaagtccagattatctttcgtcttatcctactgctgctccttgcatgcggaagtgtccaggagcagttgaacttgatcacggtttgggtcattcagaacattccaacagaagatcagaccaatttactttattttcaagccgtaatggtcgatctgtagaaaaatgcaaagagatggttcaatatgccagagggttccaccatgcagatgagatcaatcatgttccatttcaatggtgctttgaggatgaaggtccttcagtatcaagaggcctgcagtatggcgatgagatcccttctttatctaggaagaagtataacgtggcaccttcacgctcaagtcagtggcactatggtcctcaaaccgcactgtcctcaaggagacccgactatggtgatgagatcccgtcactctctcttcactatggttaccgagataggacccatttgcgttctggtaattggtgccatgatgctgaggcacgtataccgtcaagataccagcaaggtacttctcatggcaatggtcactcaaggaattgtttttccaggattaataccaacgagcaagccaaagttatcacaagcaaacatacctttgcaaaacctaggatgattaacagaaactgtagtgaccaacataggatcaatatgaaaggtaatcgctggagaaattctgaggatttaatggaccaagttcgtgggccgagggcaaataaattgaacaatgcttcagtatcctccactgtgaaagatatcacaagtccattgatccgtagaaatcagtataatagatcagatttttcagttcaatataatcaggccaagttttttatgataaagtcatatagtgaagatgacattcataaaggtatcaaatacaacgtttgggcaagtacaccaaatgggaacaataagctggatgctgcataccatgaagctcaaaatttaatggacagtggggaaaggtgccctgtcttcctattcttctcggttaacaccagtggacagttcgtaggtttggctgaaatgttaggtcctgttgatttcaagaagaccatggatttttgggaagaagataaatggagtggctttttccctataaaatggcatattataaaggatattccaaatcggttgttcaaacatataattcttgaaaacaatgacaacaggattgttacttttagcagggacacacaggagattgggttgccgcaaggtgtgcaaatgttgaaaattttcaaggaacagcctcagggaacatcaattctggatgattttgatttttatgaagaaaaggcgaatgcacgccgcacccaaaagagaggaaattcagagtcgacatatggagctcgattctctgatgactcgaaatctattgaaaatttggaggcaaacatggagagttggagtttgttcgagactttggagtaatgcaaatatagatatctgcacaactgaaataaagatcaagatgggtcagtgaactagttgaaggcactgacgctccttcaaagtgtttatatggttgcaattgaaactgcttataattgttatatagtgtttacgtagaagcacggatgtgctggtaaatacagccccggtgcaattttaacaccagacgtttcctgaaacatgtttactttgatatattatagaattccacagttttgttgttttggtgctctcctacgtgctagagtcaatcttattggcatttcacggttaggaacagaaaacccaagaatagctaggaatatcttgcttcaggacacaacggtagcctgttgtggtaacagatgaggacataaacgcttcagtgcgtgaaaatgctaaagaattctgttcaaaagaatgccatagcac

SEQ ID NO: 84989 - DNA, 2603 bp, Zea Mays
catcgagcaaggcagcaatcacaaagcggaacggcaccctagggcagcgggagcccgcagcgcacaccgtcgtgccgccgtccgcctgcccccccatcgccctgcgccggtgctccaggcgcgtctcgcccgactcagctacgcacttccgctggccacccgcggcctgttgggcggctcgacctcgttcccgcccttaccctcgtcgcatcggcctcgcagcctcgatcgaggccgacgacctccagcgacctactgcccaggcccaggtagagcgctaggggcctccagtcaaacccatccttgccgttgccggccgatttggtttcttgctttagagatgcaggaggtttctgatccaccagaaacagtaaggaaagcagaaacaaaaaatattacttccattgggaaggatgtgattttcgagcaagatccatgctcttcatatcagttatggggcagtatgaaatttgaagaagatggccatttgctgtctcaggcaaagagggatttgtcacatttggattatagagcacagtctgccgacaccaaatatgttactgaacttgggtcacatgcatgtttgaaggatccattgccaatgggaagagattatcataggcagaagctacaattttctacttcagactgttcttttgagaaggcttctgcattagaagcagcatcaagtagcccagatgcattagggacaatgagaaccaaaatcaaatccagcaccctcagtgcaagtccagattatctttcgtcttatcctactgctgctccttgcatgcggaagtgtccaggagcagttgaacttgatcacggtttgggtcattcagaacattccaacagaagatcagaccaatttactttattttcaagccgtaatggtcgatctgtagaaaaatgcaaagagatggttcaatatgccagagggttccaccatgcagatgagatcaatcatgttccatttcaatggtgctttgaggatgaaggtccttcagtatcaagaggcctgcagtatggcgatgagatcccttctttatctaggaagaagtataacgtggcaccttcacgctcaagtcagtggcactatggtcctcaaaccgcactgtcctcaaggagacccgactatggtgatgagatcccgtcactctctcttcactatggttaccgagataggacccatttgcgttctggtaattggtgccatgatgctgaggcacgtataccgtcaagataccagcaaggtacttctcatggcaatggtcactcaaggaattgtttttccaggattaataccaacgagcaagccaaagttatcacaagcaaacatacctttgcaaaacctaggatgattaacagaaactgtagtgaccaacataggatcaatatgaaaggtaatcgctggagaaattctgaggatttaatggaccaagttcgtgggccgagggcaaataaattgaacaatgcttcagtatcctccactgtgaaagatatcacaagtccattgatccgtagaaatcagtataatagatcagatttttcagttcaatataatcaggccaagttttttatgataaagtcatatagtgaagatgacattcataaaggtatcaaatacaacgtttgggcaagtacaccaaatgggaacaataagctggatgctgcataccatgaagctcaaaatttaatggacagtggggaaaggtgccctgtcttcctattcttctcgtggacagttcgtaggtttggctgaaatgttaggtcctgttgatttcaagaagaccatggatttttgggaagaagataaatggagtggctttttccctataaaatggcatattataaaggatattccaaatcggttgttcaaacatataattcttgaaaacaatgacaacaggattgttacttttagcagggacacacaggagattgggttgccgcaaggtgtgcaaatgttgaaaattttcaaggaacagcctcagggaacatcaattctggatgattttgatttttatgaagaaaaggcgaatgcacgccgcacccaaaagagaggaaattcagagtcgacatatggagctcgattctctgatgactcgaaatctattgaaaatttggaggcaaacatggagagttggagtttgttcgagactttggagtaatgcaaatatagatatctgcacaactgaaataaagatcaagatgggtcagtgaactagttgaaggcactgacgctccttcaaagtgtttatatggttgcaattgaaactgcttataattgttatatagtgtttacgtagaagcacggatgtgctggtaaatacagccccggtgcaattttaacaccagacgtttcctgaaacatgtttactttgatatattatagaattccacagttttgttgttttggtgctctcctacgtgctagagtcaatcttattggcatttcacggttaggaacagaaaacccaagaatagctaggaatatcttgcttcaggacacaacggtagcctgttgtggtaacagatgaggacataaacgcttcagtgcgtgaaaatgctaaagaattctgttcaaaagaatgccatagcac

SEQ ID NO: 84990 - DNA, 3035 bp, Zea Mays
catcgagcaaggcagcaatcacaaagcggaacggcaccctagggcagcgggagcccgcagcgcacaccgtcgtgccgccgtccgcctgcccccccatcgccctgcgccggtgctccaggcgcgtctcgcccgactcagctacgcacttccgctggccacccgcggcctgttgggcggctcgacctcgttcccgcccttaccctcgtcgcatcggcctcgcagcctcgatcgaggccgacgacctccagcgacctactgcccaggcccaggtagagcgctaggggcctccagtcaaacccatccttgccgttgccggccgatttggtttcttgctttagagatgcaggaggtttctgatccaccagaaacagtaaggaaagcagaaacaaaaaatattacttccattgggaaggatgtgattttcgagcaagatccatgctcttcatatcagttatggggcagtatgaaatttgaagaagatggccatttgctgtctcaggcaaagagggatttgtcacatttggattatagagcacagtctgccgacaccaaatatgttactgaacttgggtcacatgcatgtttgaaggatccattgccaatgggaagagattatcataggcagaagctacaattttctacttcagactgttcttttgagaaggcttctgcattagaagcagcatcaagtagcccagatgcattagggacaatgagaaccaaaatcaaatccagcaccctcagtgcaagtccagattatctttcgtcttatcctactgctgctccttgcatgcggaagtgtccaggagcagttgaacttgatcacggtttgggtcattcagaacattccaacagaagatcagaccaatttactttattttcaagccgtaatggtcgatctgtagaaaaatgcaaagagatggttcaatatgccagagggttccaccatgcagatgagatcaatcatgttccatttcaatggtgctttgaggatgaaggtccttcagtatcaagaggcctgcagtatggcgatgagatcccttctttatctaggaagaagtataacgtggcaccttcacgctcaagtcagtggcactatggtcctcaaaccgcactgtcctcaaggagacccgactatggtgatgagatcccgtcactctctcttcactatggttaccgagataggacccatttgcgttctggtaattggtgccatgatgctgaggcacgtataccgtcaagataccagcaaggtacttctcatggcaatggtcactcaaggaattgtttttccaggattaataccaacgagcaagccaaagttatcacaagcaaacatacctttgcaaaacctaggatgattaacagaaactgtagtgaccaacataggatcaatatgaaaggtaatcgctggagaaattctgaggatttaatggaccaagttcgtgggccgagggcaaataaattgaacaatgcttcagtatcctccactgtgaaagatatcacaagtccattgatccgtagaaatcagtataatagatcagatttttcagttcaatataatcaggccaagttttttatgataaagtcatatagtgaagatgacattcataaaggtatcaaatacaacgtttgggcaagtacaccaaatgggaacaataagctggatgctgcataccatgaagctcaaaatttaatggacagtggggaaaggtgccctgtcttcctattcttctcggttaacaccagtggacagttcgtaggtttggctgaaatgttaggtcctgttgatttcaagaagaccatggatttttgggaagaagataaatggagtggctttttccctataaaatggcatattataaaggatattccaaatcggttgttcaaacatataattcttgaaaacaatgacaacaggattgttacttttagcagggacacacaggagattgggttgccgcaaggtgtgcaaatgttgaaaattttcaaggaacagcctcagggaacatcaattctggatgattttgatttttatgaagaaaaggcgaatgcacgccgcacccaaaagagaggaaattcagagtcgacatatggagctcgattctctgatgactcgaaatctattgtatgcacatttctgtttagagctgtgatgaaacatgttttcaagaatattataaagcacagcttttgttacctgatctttataattgaactggatgcacctctgcgaaaaatgtgcttgccgccgcttttcacgtccttgtgtaggattgcatagcatctgtgaatatgagaataggtgatttgcacaccccttttcgtagaaaattacgcctcgtatacagctgctggcaatcttatctggaataaagaaaataagcatggaggtttaaattctatgggggaatcatgtggtcctgaaaccagagagctgggtgccaggaatctgaactctgttgtgtctgtatatcctgtgtgtgtagcacctactcaaacatttttttttgctacatgtcattttctgatatattcctaattggcaggaaaatttggaggcaaacatggagagttggagtttgttcgagactttggagtaatgcaaatatagatatctgcacaactgaaataaagatcaagatgggtcagtgaactagttgaaggcactgacgctccttcaaagtgtttatatggttgcaattgaaactgcttataattgttatatagtgtttacgtagaagcacggatgtgctggtaaatacagccccggtgcaattttaacaccagacgtttcctgaaacatgtttactttgatatattatagaattccacagttttgttgttttggtgctctcctacgtgctagagtcaatcttattggcatttcacggttaggaacagaaaacccaagaatagctaggaatatcttgcttcaggacacaacggtagcctgttgtggtaacagatgaggacataaacgcttcagtgcgtgaaaatgctaaagaattctgttcaaaagaatgccatagcac

SEQ ID NO: 84991 - DNA, 2598 bp, Zea Mays
catcgagcaaggcagcaatcacaaagcggaacggcaccctagggcagcgggagcccgcagcgcacaccgtcgtgccgccgtccgcctgcccccccatcgccctgcgccggtgctccaggcgcgtctcgcccgactcagctacgcacttccgctggccacccgcggcctgttgggcggctcgacctcgttcccgcccttaccctcgtcgcatcggcctcgcagcctcgatcgaggccgacgacctccagcgacctactgcccaggcccaggtagagcgctaggggcctccagtcaaacccatccttgccgttgccggccgatttggtttcttgctttagagatgcaggaggtttctgatccaccagaaacagtaaggaaagcagaaacaaaaaatattacttccattgggaaggatgtgattttcgagcaagatccatgctcttcatatcaggggcagtatgaaatttgaagaagatggccatttgctgtctcaggcaaagagggatttgtcacatttggattatagagcacagtctgccgacaccaaatatgttactgaacttgggtcacatgcatgtttgaaggatccattgccaatgggaagagattatcataggcagaagctacaattttctacttcagactgttcttttgagaaggcttctgcattagaagcagcatcaagtagcccagatgcattagggacaatgagaaccaaaatcaaatccagcaccctcagtgcaagtccagattatctttcgtcttatcctactgctgctccttgcatgcggaagtgtccaggagcagttgaacttgatcacggtttgggtcattcagaacattccaacagaagatcagaccaatttactttattttcaagccgtaatggtcgatctgtagaaaaatgcaaagagatggttcaatatgccagagggttccaccatgcagatgagatcaatcatgttccatttcaatggtgctttgaggatgaaggtccttcagtatcaagaggcctgcagtatggcgatgagatcccttctttatctaggaagaagtataacgtggcaccttcacgctcaagtcagtggcactatggtcctcaaaccgcactgtcctcaaggagacccgactatggtgatgagatcccgtcactctctcttcactatggttaccgagataggacccatttgcgttctggtaattggtgccatgatgctgaggcacgtataccgtcaagataccagcaaggtacttctcatggcaatggtcactcaaggaattgtttttccaggattaataccaacgagcaagccaaagttatcacaagcaaacatacctttgcaaaacctaggatgattaacagaaactgtagtgaccaacataggatcaatatgaaaggtaatcgctggagaaattctgaggatttaatggaccaagttcgtgggccgagggcaaataaattgaacaatgcttcagtatcctccactgtgaaagatatcacaagtccattgatccgtagaaatcagtataatagatcagatttttcagttcaatataatcaggccaagttttttatgataaagtcatatagtgaagatgacattcataaaggtatcaaatacaacgtttgggcaagtacaccaaatgggaacaataagctggatgctgcataccatgaagctcaaaatttaatggacagtggggaaaggtgccctgtcttcctattcttctcgtggacagttcgtaggtttggctgaaatgttaggtcctgttgatttcaagaagaccatggatttttgggaagaagataaatggagtggctttttccctataaaatggcatattataaaggatattccaaatcggttgttcaaacatataattcttgaaaacaatgacaacaggattgttacttttagcagggacacacaggagattgggttgccgcaaggtgtgcaaatgttgaaaattttcaaggaacagcctcagggaacatcaattctggatgattttgatttttatgaagaaaaggcgaatgcacgccgcacccaaaagagaggaaattcagagtcgacatatggagctcgattctctgatgactcgaaatctattgaaaatttggaggcaaacatggagagttggagtttgttcgagactttggagtaatgcaaatatagatatctgcacaactgaaataaagatcaagatgggtcagtgaactagttgaaggcactgacgctccttcaaagtgtttatatggttgcaattgaaactgcttataattgttatatagtgtttacgtagaagcacggatgtgctggtaaatacagccccggtgcaattttaacaccagacgtttcctgaaacatgtttactttgatatattatagaattccacagttttgttgttttggtgctctcctacgtgctagagtcaatcttattggcatttcacggttaggaacagaaaacccaagaatagctaggaatatcttgcttcaggacacaacggtagcctgttgtggtaacagatgaggacataaacgcttcagtgcgtgaaaatgctaaagaattctgttcaaaagaatgccatagcac

SEQ ID NO: 84992 - DNA, 2277 bp, Zea Mays
gtcagtccgcctggccctgatgcaggaggtttctgatccaccagaaacagtaaggaaagcagaaacaaaaaatattacttccattgggaaggatgtgattttcgagcaagatccatgctcttcatatcaggggcagtatgaaatttgaagaagatggccatttgctgtctcaggcaaagagggatttgtcacatttggattatagagcacagtctgccgacaccaaatatgttactgaacttgggtcacatgcatgtttgaaggatccattgccaatgggaagagattatcataggcagaagctacaattttctacttcagactgttcttttgagaaggcttctgcattagaagcagcatcaagtagcccagatgcattagggacaatgagaaccaaaatcaaatccagcaccctcagtgcaagtccagattatctttcgtcttatcctactgctgctccttgcatgcggaagtgtccaggagcagttgaacttgatcacggtttgggtcattcagaacattccaacagaagatcagaccaatttactttattttcaagccgtaatggtcgatctgtagaaaaatgcaaagagatggttcaatatgccagagggttccaccatgcagatgagatcaatcatgttccatttcaatggtgctttgaggatgaaggtccttcagtatcaagaggcctgcagtatggcgatgagatcccttctttatctaggaagaagtataacgtggcaccttcacgctcaagtcagtggcactatggtcctcaaaccgcactgtcctcaaggagacccgactatggtgatgagatcccgtcactctctcttcactatggttaccgagataggacccatttgcgttctggtaattggtgccatgatgctgaggcacgtataccgtcaagataccagcaaggtacttctcatggcaatggtcactcaaggaattgtttttccaggattaataccaacgagcaagccaaagttatcacaagcaaacatacctttgcaaaacctaggatgattaacagaaactgtagtgaccaacataggatcaatatgaaaggtaatcgctggagaaattctgaggatttaatggaccaagttcgtgggccgagggcaaataaattgaacaatgcttcagtatcctccactgtgaaagatatcacaagtccattgatccgtagaaatcagtataatagatcagatttttcagttcaatataatcaggccaagttttttatgataaagtcatatagtgaagatgacattcataaaggtatcaaatacaacgtttgggcaagtacaccaaatgggaacaataagctggatgctgcataccatgaagctcaaaatttaatggacagtggggaaaggtgccctgtcttcctattcttctcgtggacagttcgtaggtttggctgaaatgttaggtcctgttgatttcaagaagaccatggatttttgggaagaagataaatggagtggctttttccctataaaatggcatattataaaggatattccaaatcggttgttcaaacatataattcttgaaaacaatgacaacaggattgttacttttagcagggacacacaggagattgggttgccgcaaggtgtgcaaatgttgaaaattttcaaggaacagcctcagggaacatcaattctggatgattttgatttttatgaagaaaaggcgaatgcacgccgcacccaaaagagaggaaattcagagtcgacatatggagctcgattctctgatgactcgaaatctattgaaaatttggaggcaaacatggagagttggagtttgttcgagactttggagtaatgcaaatatagatatctgcacaactgaaataaagatcaagatgggtcagtgaactagttgaaggcactgacgctccttcaaagtgtttatatggttgcaattgaaactgcttataattgttatatagtgtttacgtagaagcacggatgtgctggtaaatacagccccggtgcaattttaacaccagacgtttcctgaaacatgtttactttgatatattatagaattccacagttttgttgttttggtgctctcctacgtgctagagtcaatcttattggcatttcacggttaggaacagaaaacccaagaatagctaggaatatcttgcttcaggacacaacggtagcctgttgtggtaacagatgaggacataaacgcttcagtgcgtgaaaatgctaaagaattctgttcaaaagaatgccatagcac

SEQ ID NO: 84993 - DNA, 2300 bp, Zea Mays
ctgctcgctgcacgtcagtccgcctggccctggaggtttctgatccaccagaaacagtaaggaaagcagaaacaaaaaatattacttccattgggaaggatgtgattttcgagcaagatccatgctcttcatatcagttatggggcagtatgaaatttgaagaagatggccatttgctgtctcaggcaaagagggatttgtcacatttggattatagagcacagtctgccgacaccaaatatgttactgaacttgggtcacatgcatgtttgaaggatccattgccaatgggaagagattatcataggcagaagctacaattttctacttcagactgttcttttgagaaggcttctgcattagaagcagcatcaagtagcccagatgcattagggacaatgagaaccaaaatcaaatccagcaccctcagtgcaagtccagattatctttcgtcttatcctactgctgctccttgcatgcggaagtgtccaggagcagttgaacttgatcacggtttgggtcattcagaacattccaacagaagatcagaccaatttactttattttcaagccgtaatggtcgatctgtagaaaaatgcaaagagatggttcaatatgccagagggttccaccatgcagatgagatcaatcatgttccatttcaatggtgctttgaggatgaaggtccttcagtatcaagaggcctgcagtatggcgatgagatcccttctttatctaggaagaagtataacgtggcaccttcacgctcaagtcagtggcactatggtcctcaaaccgcactgtcctcaaggagacccgactatggtgatgagatcccgtcactctctcttcactatggttaccgagataggacccatttgcgttctggtaattggtgccatgatgctgaggcacgtataccgtcaagataccagcaaggtacttctcatggcaatggtcactcaaggaattgtttttccaggattaataccaacgagcaagccaaagttatcacaagcaaacatacctttgcaaaacctaggatgattaacagaaactgtagtgaccaacataggatcaatatgaaaggtaatcgctggagaaattctgaggatttaatggaccaagttcgtgggccgagggcaaataaattgaacaatgcttcagtatcctccactgtgaaagatatcacaagtccattgatccgtagaaatcagtataatagatcagatttttcagttcaatataatcaggccaagttttttatgataaagtcatatagtgaagatgacattcataaaggtatcaaatacaacgtttgggcaagtacaccaaatgggaacaataagctggatgctgcataccatgaagctcaaaatttaatggacagtggggaaaggtgccctgtcttcctattcttctcggttaacaccagtggacagttcgtaggtttggctgaaatgttaggtcctgttgatttcaagaagaccatggatttttgggaagaagataaatggagtggctttttccctataaaatggcatattataaaggatattccaaatcggttgttcaaacatataattcttgaaaacaatgacaacaggattgttacttttagcagggacacacaggagattgggttgccgcaaggtgtgcaaatgttgaaaattttcaaggaacagcctcagggaacatcaattctggatgattttgatttttatgaagaaaaggcgaatgcacgccgcacccaaaagagaggaaattcagagtcgacatatggagctcgattctctgatgactcgaaatctattgaaaatttggaggcaaacatggagagttggagtttgttcgagactttggagtaatgcaaatatagatatctgcacaactgaaataaagatcaagatgggtcagtgaactagttgaaggcactgacgctccttcaaagtgtttatatggttgcaattgaaactgcttataattgttatatagtgtttacgtagaagcacggatgtgctggtaaatacagccccggtgcaattttaacaccagacgtttcctgaaacatgtttactttgatatattatagaattccacagttttgttgttttggtgctctcctacgtgctagagtcaatcttattggcatttcacggttaggaacagaaaacccaagaatagctaggaatatcttgcttcaggacacaacggtagcctgttgtggtaacagatgaggacataaacgcttcagtgcgtgaaaatgctaaagaattctgttcaaaagaatgccatagcac

SEQ ID NO: 84994 - DNA, 2708 bp, Zea Mays
gttgctctgctcgctgcacgtcagtccgcctggccctggagtctggtgatttaatgtcctacctgtccttgcggggtccatatattcctcttgacatcgagcaaggcagcaatcacaaagcggaacggcaccctagggcagcgggagcccgcagcgcacaccgtcgtgccgccgtccgcctgcccccccatcgccctgcgccggtgctccaggcgcgtctcgcccgactcagctacgcacttccgctggccacccgcggcctgttgggcggctcgacctcgttcccgcccttaccctcgtcgcatcggcctcgcagcctcgatcgaggccgacgacctccagcgacctactgcccaggcccaggtagagcgctaggggcctccagtcaaacccatccttgccgttgccggccgatttggtttcttgctttagagatgcaggaggtttctgatccaccagaaacagtaaggaaagcagaaacaaaaaatattacttccattgggaaggatgtgattttcgagcaagatccatgctcttcatatcagttatggggcagtatgaaatttgaagaagatggccatttgctgtctcaggcaaagagggatttgtcacatttggattatagagcacagtctgccgacaccaaatatgttactgaacttgggtcacatgcatgtttgaaggatccattgccaatgggaagagattatcataggcagaagctacaattttctacttcagactgttcttttgagaaggcttctgcattagaagcagcatcaagtagcccagatgcattagggacaatgagaaccaaaatcaaatccagcaccctcagtgcaagtccagattatctttcgtcttatcctactgctgctccttgcatgcggaagtgtccaggagcagttgaacttgatcacggtttgggtcattcagaacattccaacagaagatcagaccaatttactttattttcaagccgtaatggtcgatctgtagaaaaatgcaaagagatggttcaatatgccagagggttccaccatgcagatgagatcaatcatgttccatttcaatggtgctttgaggatgaaggtccttcagtatcaagaggcctgcagtatggcgatgagatcccttctttatctaggaagaagtataacgtggcaccttcacgctcaagtcagtggcactatggtcctcaaaccgcactgtcctcaaggagacccgactatggtgatgagatcccgtcactctctcttcactatggttaccgagataggacccatttgcgttctggtaattggtgccatgatgctgaggcacgtataccgtcaagataccagcaaggtacttctcatggcaatggtcactcaaggaattgtttttccaggattaataccaacgagcaagccaaagttatcacaagcaaacatacctttgcaaaacctaggatgattaacagaaactgtagtgaccaacataggatcaatatgaaaggtaatcgctggagaaattctgaggatttaatggaccaagttcgtgggccgagggcaaataaattgaacaatgcttcagtatcctccactgtgaaagatatcacaagtccattgatccgtagaaatcagtataatagatcagatttttcagttcaatataatcaggccaagttttttatgataaagtcatatagtgaagatgacattcataaaggtatcaaatacaacgtttgggcaagtacaccaaatgggaacaataagctggatgctgcataccatgaagctcaaaatttaatggacagtggggaaaggtgccctgtcttcctattcttctcggttaacaccagtggacagttcgtaggtttggctgaaatgttaggtcctgttgatttcaagaagaccatggatttttgggaagaagataaatggagtggctttttccctataaaatggcatattataaaggatattccaaatcggttgttcaaacatataattcttgaaaacaatgacaacaggattgttacttttagcagggacacacaggagattgggttgccgcaaggtgtgcaaatgttgaaaattttcaaggaacagcctcagggaacatcaattctggatgattttgatttttatgaagaaaaggcgaatgcacgccgcacccaaaagagaggaaattcagagtcgacatatggagctcgattctctgatgactcgaaatctattgaaaatttggaggcaaacatggagagttggagtttgttcgagactttggagtaatgcaaatatagatatctgcacaactgaaataaagatcaagatgggtcagtgaactagttgaaggcactgacgctccttcaaagtgtttatatggttgcaattgaaactgcttataattgttatatagtgtttacgtagaagcacggatgtgctggtaaatacagccccggtgcaattttaacaccagacgtttcctgaaacatgtttactttgatatattatagaattccacagttttgttgttttggtgctctcctacgtgctagagtcaatcttattggcatttcacggttaggaacagaaaacccaagaatagctaggaatatcttgcttcaggacacaacggtagcctgttgtggtaacagatgaggacataaacgcttcagtgcgtgaaaatgctaaagaattctgttcaaaagaatgccatagcac

SEQ ID NO: 84995 - DNA, 2249 bp, Zea Mays
cgagccgtcgcttggttgctctgctcgctgcacgtcagtccgcctggccctgatgcaggaggtttctgatccaccagaaacagtaaggaaagcagaaacaaaaaatattacttccattgggaaggatgtgattttcgagcaagatccatgctcttcatatcagttatggggcagtatgaaatttgaagaagatggccatttgctgtctcaggcaaagagggatttgtcacatttggatccattgccaatgggaagagattatcataggcagaagctacaattttctacttcagactgttcttttgagaaggcttctgcattagaagcagcatcaagtagcccagatgcattagggacaatgagaaccaaaatcaaatccagcaccctcagtgcaagtccagattatctttcgtcttatcctactgctgctccttgcatgcggaagtgtccaggagcagttgaacttgatcacggtttgggtcattcagaacattccaacagaagatcagaccaatttactttattttcaagccgtaatggtcgatctgtagaaaaatgcaaagagatggttcaatatgccagagggttccaccatgcagatgagatcaatcatgttccatttcaatggtgctttgaggatgaaggtccttcagtatcaagaggcctgcagtatggcgatgagatcccttctttatctaggaagaagtataacgtggcaccttcacgctcaagtcagtggcactatggtcctcaaaccgcactgtcctcaaggagacccgactatggtgatgagatcccgtcactctctcttcactatggttaccgagataggacccatttgcgttctggtaattggtgccatgatgctgaggcacgtataccgtcaagataccagcaaggtacttctcatggcaatggtcactcaaggaattgtttttccaggattaataccaacgagcaagccaaagttatcacaagcaaacatacctttgcaaaacctaggatgattaacagaaactgtagtgaccaacataggatcaatatgaaaggtaatcgctggagaaattctgaggatttaatggaccaagttcgtgggccgagggcaaataaattgaacaatgcttcagtatcctccactgtgaaagatatcacaagtccattgatccgtagaaatcagtataatagatcagatttttcagttcaatataatcaggccaagttttttatgataaagtcatatagtgaagatgacattcataaaggtatcaaatacaacgtttgggcaagtacaccaaatgggaacaataagctggatgctgcataccatgaagctcaaaatttaatggacagtggggaaaggtgccctgtcttcctattcttctcgtggacagttcgtaggtttggctgaaatgttaggtcctgttgatttcaagaagaccatggatttttgggaagaagataaatggagtggctttttccctataaaatggcatattataaaggatattccaaatcggttgttcaaacatataattcttgaaaacaatgacaacaggattgttacttttagcagggacacacaggagattgggttgccgcaaggtgtgcaaatgttgaaaattttcaaggaacagcctcagggaacatcaattctggatgattttgatttttatgaagaaaaggcgaatgcacgccgcacccaaaagagaggaaattcagagtcgacatatggagctcgattctctgatgactcgaaatctattgaaaatttggaggcaaacatggagagttggagtttgttcgagactttggagtaatgcaaatatagatatctgcacaactgaaataaagatcaagatgggtcagtgaactagttgaaggcactgacgctccttcaaagtgtttatatggttgcaattgaaactgcttataattgttatatagtgtttacgtagaagcacggatgtgctggtaaatacagccccggtgcaattttaacaccagacgtttcctgaaacatgtttactttgatatattatagaattccacagttttgttgttttggtgctctcctacgtgctagagtcaatcttattggcatttcacggttaggaacagaaaacccaagaatagctaggaatatcttgcttcaggacacaacggtagcctgttgtggtaacagatgaggacataaacgcttcagtgcgtgaaaatgctaaagaattctgttcaaaagaatgccatagcac

SEQ ID NO: 84996 - DNA, 2357 bp, Zea Mays
ctgccatcaggttgccctgctccctgcacgccgagccgtcgcttggttgctctgctcgctgcacgtcagtccgcctggccctgatgcaggaggtttctgatccaccagaaacagtaaggaaagcagaaacaaaaaatattacttccattgggaaggatgtgattttcgagcaagatccatgctcttcatatcagttatggggcagtatgaaatttgaagaagatggccatttgctgtctcaggcaaagagggatttgtcacatttggattatagagcacagtctgccgacaccaaatatgttactgaacttgggtcacatgcatgtttgaaggatccattgccaatgggaagagattatcataggcagaagctacaattttctacttcagactgttcttttgagaaggcttctgcattagaagcagcatcaagtagcccagatgcattagggacaatgagaaccaaaatcaaatccagcaccctcagtgcaagtccagattatctttcgtcttatcctactgctgctccttgcatgcggaagtgtccaggagcagttgaacttgatcacggtttgggtcattcagaacattccaacagaagatcagaccaatttactttattttcaagccgtaatggtcgatctgtagaaaaatgcaaagagatggttcaatatgccagagggttccaccatgcagatgagatcaatcatgttccatttcaatggtgctttgaggatgaaggtccttcagtatcaagaggcctgcagtatggcgatgagatcccttctttatctaggaagaagtataacgtggcaccttcacgctcaagtcagtggcactatggtcctcaaaccgcactgtcctcaaggagacccgactatggtgatgagatcccgtcactctctcttcactatggttaccgagataggacccatttgcgttctggtaattggtgccatgatgctgaggcacgtataccgtcaagataccagcaaggtacttctcatggcaatggtcactcaaggaattgtttttccaggattaataccaacgagcaagccaaagttatcacaagcaaacatacctttgcaaaacctaggatgattaacagaaactgtagtgaccaacataggatcaatatgaaaggtaatcgctggagaaattctgaggatttaatggaccaagttcgtgggccgagggcaaataaattgaacaatgcttcagtatcctccactgtgaaagatatcacaagtccattgatccgtagaaatcagtataatagatcagatttttcagttcaatataatcaggccaagttttttatgataaagtcatatagtgaagatgacattcataaaggtatcaaatacaacgtttgggcaagtacaccaaatgggaacaataagctggatgctgcataccatgaagctcaaaatttaatggacagtggggaaaggtgccctgtcttcctattcttctcggttaacaccagtggacagttcgtaggtttggctgaaatgttaggtcctgttgatttcaagaagaccatggatttttgggaagaagataaatggagtggctttttccctataaaatggcatattataaaggatattccaaatcggttgttcaaacatataattcttgaaaacaatgacaacaggattgttacttttagcagggacacacaggagattgggttgccgcaaggtgtgcaaatgttgaaaattttcaaggaacagcctcagggaacatcaattctggatgattttgatttttatgaagaaaaggcgaatgcacgccgcacccaaaagagaggaaattcagagtcgacatatggagctcgattctctgatgactcgaaatctattgaaaatttggaggcaaacatggagagttggagtttgttcgagactttggagtaatgcaaatatagatatctgcacaactgaaataaagatcaagatgggtcagtgaactagttgaaggcactgacgctccttcaaagtgtttatatggttgcaattgaaactgcttataattgttatatagtgtttacgtagaagcacggatgtgctggtaaatacagccccggtgcaattttaacaccagacgtttcctgaaacatgtttactttgatatattatagaattccacagttttgttgttttggtgctctcctacgtgctagagtcaatcttattggcatttcacggttaggaacagaaaacccaagaatagctaggaatatcttgcttcaggacacaacggtagcctgttgtggtaacagatgaggacataaacgcttcagtgcgtgaaaatgctaaagaattctgttcaaaagaatgccatagcac

SEQ ID NO: 84997 - DNA, 2980 bp, Zea Mays
gtcctctttttctttggtagcatcggtaggtggagctgccaaacgctatcccatccgcgtgtcgccatgtgccgtgctgggtgaaagcttcttctcgaaggaacagcagctgcctgccttctctcctcttgctagcttgcacagtatagtacaattctaatcttgttgccatctgaccaatggacctataataacctacaccctcgtctcgtctcgtctcgtctatctacctctttgtcctccggatctatcggaatcttccggccaaagtgtagcgtccacgactttccttttccgtgtatagaaatagaatttatattcatccatatacggtatactacctcttttctcattcgatacacgtgcatatacggatacggaatttaaccttgttgtcgctcaaatttcaagatatatggttatctccaaaaccgtaaatcagactgataaaccatgattggaaataaagtatttaaaaactacagttttttaaatgccaaaacatatttataatttttctaatcacagtattgataactttattttggagctaagtttctaaaactgtgaaagtactaaaacatagctaaaactgtggttttgaaaaaatagagtctaaaagtctaccaaacactgcattaagaaaaataatacagtatcttaaatactacagtattcttaaaaaacagagaaggccatatattaagaaatggtgtagttacatttatgaaaagatataattgttactcttttaaaaacaatttataactataaattatactattaagctgtaactgtttttttaatttttacgcatgagaagaaaccgcgaatcaaggtcggtttcgatgagcccggatcataggtgcaaggcatcgaacccgtgactattctctccttggcgtcgtcgtcgtccttgttggcgatggcaatgtcagggccgctggacagcgacctccgtatactgtttgtccacatgcaatgcaaagctggagtttggcgagctacagctagtcagctacacagggtcgctgccattggccaggcgtctatcggttggctgccacttccactcccaggcagcggacggagcattgcgtcgcgacgcggtcatcgcggcgagcgacgcggactgggcggtgggggggccgtcacgtatctcgcccgggaacgcctcccgcatttttttacccctagctcattaggataggactagtagtaggacccttggaggagcagtcgcgtcacggacatgcggacacagcgggatccagcaccaagagcctaggaaggccaggggcaggggtcctcgccctcgccgcaatggagctgctggccaaggcgcccgtgctgggctgcgccgggaagatgcagaggcagcggcaacgggggtccgcgctgggcaggtggatttgccgtgccgtggcgccgccgagggccgcgccagccacgccgccgagggtgcggctcagggacggccgccacctggcgtacgccgagtccggggccagcaaggaggacgcgaggttcaaggtcgtcttctcccacggcttcaccggctcccgcctcgacaccgtccgcccggcgccggaagttgcggaggagctgggcgtgtacatggtgggtttcgaccgcgccgggtacgggcagagcgaccccaaccccaaccggtccgtcaagagcgcggcgctggacgtggaggagctcgcggacgcgctggggctcggccccaagttctacgtcatcggcatctccctcggctgccatgccgtctggggcgccctcaaatacatccccgacaggatcgccggcgcggcgatgatggcgccggtggtgaactactggtggccagggttctcgccggagctggcggcggaggtgtacgcgaagcaggaggtgggcgaccagtgggcgctgcgcgtgtcgcaccacgcgccgggcatcctccactggtggatggagcagagctggctgcccacctccacggtggtggccggcaccacgccgctgcccaacgagcgcgacgccgagatccggagcaagatgaaggcggacggcacgttccagcagaagcgggagcaggcgacgcagcaggggatccacgagtcctactaccgcgacatgaccgtcatgttcggcaagtgggagttcgaccccatggcgctgccggagccgccgtgccccgtgcacctctggcagggcgacgaggacggcctcgtccctgtcgtgctgcagaggtacctcgccggcaagatcggatggatcaactaccatgaactccctggcaccggccacttcctgtcgtcggtgcctgggctcggagacaacgtccttaggacccttttcagtgacaagcagtaaacaaacaatcctccctcacgacgtatcgaagctttcgagcatggtggtggtggtggcgcattagttcattttattattgtaaaggcccgtggttgtcgctgattagagatgataaaataatggtgatgtagatgcaagaccttaaagtgaaatactatatcagagatgtaatatacatacatagtgatgacctttctgttttcattataaaacaaattgtctagtcaagtgtgtgtgtgtgtgttttgccacgataacaaaggtgtcgctaaaaagataaacccagttaatcgcatgacagatcaaaattcgctttgtggcgaatatccatatacagactctctacatgctcgtgcaaatggatatccaggagcaggttaggctttagcttctccagatgacccaagcaagatccatagcgactgaaacatagcaatttcaattgttaaaaaaaaaaagaaacttgaaacaaaatacagtagaacatggcgcacagcttccgaaaagatccaaatgcgaactacaattaggttacacatgacccataaaatttgagatggccacacaacaccagaagtctcagtgatccaaattgatgattaataccttgctaatggat

SEQ ID NO: 84998 - DNA, 4303 bp, Zea Mays
gtgcttgttagtttgtttcactcactagtgcatcgtgcttttgcacgtatcgctatccattcaggttatctctatcatgtatgttgtaataaaaagctgttttgtattgctgaatgcgtagagtttaaaataatccatgatatgaaagataaaaatggttaaaattcgccgaaacggcctcagcaagccacacggcgcgctgggctggaccaatgaagcagcgccccacgcgtgaccgaccaggaacggctgccccgccgagtcaaaaggccgccgagctaggtgagcgagttccgggacgggcggacggacggtggcccacccaccaacctctgaccccgacccggcgcgtctcgccctgaagcttaaatactagtcttggctagctactatattatactagccgtctagccctcgagccgtccagggcgcggcgacgacacccacaggccacagccacaggccacacgacaccaccgctcggtctcggcgtccgcctccacgcacgcttcctcccgcaggccatccacccgatccgatccgatccgagcgtccaccatgtgggtgacgtcgatgccgcaggtttgggacgaggagggcgcggccaagggcggcgcggtgaccccggcgccggccgcggccatgctgggctcgctggcggggtggctgtcccggaccgtgcagccgcagccgccggcgccccgggtgtgcggcaccgcggggggcccgcccgtgacggcgcccaggctcaggctccgcgacggccgccacctcgcctactgcgagagcggcgtgccccgggaccaggccaggttcgccgtcgtcttctcccacggattcaccggctcccgcgaggacagcgtccgcgcctcccaggtaccgaccgatccaagcaccaccaccaccaccttgtctacctcccccatctgctgctggacccgtacgccggccttcgcttcactcgcccgccaggttcatggacgtacgggagagatagatctggagcgcgcctctgtcggtgtcggtgtccttggaacgaagacgacctggcaaagggtcctctttttctttggtagcatcggtaggtggagctgccaaacgctatcccatccgcgtgtcgccatgtgccgtgctgggtgaaagcttcttctcgaaggaacagcagctgcctgccttctctcctcttgctagcttgcacagtatagtacaattctaatcttgttgccatctgaccaatggacctataataacctacaccctcgtctcgtctcgtctcgtctatctacctctttgtcctccggatctatcggaatcttccggccaaagtgtagcgtccacgactttccttttccgtgtatagaaatagaatttatattcatccatatacggtatactacctcttttctcattcgatacacgtgcatatacggatacggaatttaaccttgttgtcgctcaaatttcaagatatatggttatctccaaaaccgtaaatcagactgataaaccatgattggaaataaagtatttaaaaactacagttttttaaatgccaaaacatatttataatttttctaatcacagtattgataactttattttggagctaagtttctaaaactgtgaaagtactaaaacatagctaaaactgtggttttgaaaaaatagagtctaaaagtctaccaaacactgcattaagaaaaataatacagtatcttaaatactacagtattcttaaaaaacagagaaggccatatattaagaaatggtgtagttacatttatgaaaagatataattgttactcttttaaaaacaatttataactataaattatactattaagctgtaactgtttttttaatttttacgcatgagaagaaaccgcgaatcaaggtcggtttcgatgagcccggatcataggtgcaaggcatcgaacccgtgactattctctccttggcgtcgtcgtcgtccttgttggcgatggcaatgtcagggccgctggacagcgacctccgtatactgtttgtccacatgcaatgcaaagctggagtttggcgagctacagctagtcagctacacagggtcgctgccattggccaggcgtctatcggttggctgccacttccactcccaggcagcggacggagcattgcgtcgcgacgcggtcatcgcggcgagcgacgcggactgggcggtgggggggccgtcacgtatctcgcccgggaacgcctcccgcatttttttacccctagctcattaggataggactagtagtaggacccttggaggagcagtcgcgtcacggacatgcggacacagcgggatccagcaccaagagcctaggaaggccaggggcaggggtcctcgccctcgccgcaatggagctgctggccaaggcgcccgtgctgggctgcgccgggaagatgcagaggcagcggcaacgggggtccgcgctgggcaggtggatttgccgtgccgtggcgccgccgagggccgcgccagccacgccgccgagggtgcggctcagggacggccgccacctggcgtacgccgagtccggggccagcaaggaggacgcgaggttcaaggtcgtcttctcccacggcttcaccggctcccgcctcgacaccgtccgcccggcgccggtcagtgtcccgccccggcctctggatctggctctgcacggaaaagattcgagcttttgtggatccgcttgtgttctcccccccagttcctgtacacatcgccagccagcgcgattgtgcattgcgtggttcgccggtgccatccgtgcgaccacacgaacatccttactgtaggcgagttcgtcttcgatcgggccgatgcaatcgactccgtatctcacagccgctccgtatcctcaactgaatgaatttgtttctactttctaggaagttgcggaggagctgggcgtgtacatggtgggtttcgaccgcgccgggtacgggcagagcgaccccaaccccaaccggtccgtcaagagcgcggcgctggacgtggaggagctcgcggacgcgctggggctcggccccaagttctacgtcatcggcatctccctcggctgccatgccgtctggggcgccctcaaatacatccccgacaggatcgccggcgcggcgatgatggcgccggtggtgaactactggtggccagggttctcgccggagctggcggcggaggtgtacgcgaagcaggaggtgggcgaccagtgggcgctgcgcgtgtcgcaccacgcgccgggcatcctccactggtggatggagcagagctggctgcccacctccacggtggtggccggcaccacgccgctgcccaacgagcgcgacgccgagatccggagcaagatgaaggcggacggcacgttccagcagaagcgggagcaggcgacgcagcaggggatccacgagtcctactaccgcgacatgaccgtcatgttcggcaagtgggagttcgaccccatggcgctgccggagccgccgtgccccgtgcacctctggcagggcgacgaggacggcctcgtccctgtcgtgctgcagaggtacctcgccggcaagatcggatggatcaactaccatgaactccctggcaccggccacttcctgtcgtcggtgcctgggctcggagacaacgtccttaggacccttttcagtgacaagcagtaaacaaacaatcctccctcacgacgtatcgaagctttcgagcatggtggtggtggtggcgcattagttcattttattattgtaaaggcccgtggttgtcgctgattagagatgataaaataatggtgatgtagatgcaagaccttaaagtgaaatactatatcagagatgtaatatacatacatagtgatgacctttctgttttcattataaaacaaattgtctagtcaagtgtgtgtgtgtgtgttttgccacgataacaaaggtgtcgctaaaaagataaacccagttaatcgcatgacagatcaaaattcgctttgtggcgaatatccatatacagactctctacatgctcgtgcaaatggatatccaggagcaggttaggctttagcttctccagatgacccaagcaagatccatagcgactgaaacatagcaatttcaattgttaaaaaaaaaaagaaacttgaaacaaaatacagtagaacatggcgcacagcttccgaaaagatccaaatgcgaactacaattaggttacacatgacccataaaatttgagatggccacacaacaccagaagtctcagtgatccaaattgatgattaataccttgctaatggat

SEQ ID NO: 84999 - DNA, 1426 bp, Zea Mays
gcggcaaaagctttatcaatactgcatgatcttacatttgtgaattctggggatggatggacacattgcatcttgttgagaggctttgacccgcagtggctgtccataacattctctaaagccatcttccttgggaacggcttaattgccattgtatctgggctatttgcgaaccttcttgctgagaacttgggctttggtcctgtggctccattcgatgcggctgcgtgctttctggcgattggcatggctatcataatgtcctcatggagtgaaaactacggagatccatctgaaagcaaggacctgatggcccagttcaaggttgcggctaaggcaattgcgtcagatgaaaagattgcattactgggagccatacagtcattgtttgagggctccatgtacacatttgtcttcctatggactccagcattgagtccaaatgaagaagacattcctcatggttttatttttgctacattcatgctgtcatccatgctgggtagctccatcgcgtcacgtctattagcccgaaagctcaaggttgaaggctatatgcagatcgtgttctcgatatcggctgtcacccttgtcctccctgtcgccaccaacatcttagtgccaacgtcttctgtgaaaggaggcagcgtatcaattggaggttctcttcagcttcttggtttctgcacctttgaggcatgtgttggtatattctggccgtcaatcatgaagatgagatctcagtacattcctgaggaagcgagaagcacaatcatgaacttcttccgcataccactcaacttatttgtttgtgtggtgctttacaacgtgaatgcattccctatcactgtcatgtttgggatgtgttctatcttcctcttcatggcagcaatcttgcagagacggctgatggttgtctctgatcaagtacacaaatcatcaactacacaagaaatgatcggggaagatgagccactaaatccttagatgtcgacagaaccatacatgcgaaatcagatattgacgacgacgtccatactccatactgcatttcgtttcgtcacctgtgcaataagatggacgtcaaaaccatgtagtctagtggttttcgtttctgtagtgtagatttgaccaggctgctaagtttgcacctgtcccgagaagattagatgagcaagtcaatcgatattggctattcgcattgttgtttcttttttttaaaaaaagatgttcgctttaaagtttaaacgatacggtatatatccttgtaagtgttgcattgctgcatctgatgacaattctagtggtgctgttactgactgttgagggctctctctacttggtcgttgtaagaactgttgcttcttaatgaaaaacgggctcaataaattcagtagaagcctgcagttgcagtaatcatacaaca

SEQ ID NO: 85000 - DNA, 1472 bp, Zea Mays
ctttttcagggtctggaaagactgaggaaaatcttgctggatgcaagctgaaatccaccctgtgtttggtttctgctacttgtgtcggtggatcaggtggttgacacctgacatggccaagacgagaggctttgacccgcagtggctgtccataacattctctaaagccatcttccttgggaacggcttaattgccattgtatctgggctatttgcgaaccttcttgctgagaacttgggctttggtcctgtggctccattcgatgcggctgcgtgctttctggcgattggcatggctatcataatgtcctcatggagtgaaaactacggagatccatctgaaagcaaggacctgatggcccagttcaaggttgcggctaaggcaattgcgtcagatgaaaagattgcattactgggagccatacagtcattgtttgagggctccatgtacacatttgtcttcctatggactccagcattgagtccaaatgaagaagacattcctcatggttttatttttgctacattcatgctgtcatccatgctgggtagctccatcgcgtcacgtctattagcccgaaagctcaaggttgaaggctatatgcagatcgtgttctcgatatcggctgtcacccttgtcctccctgtcgccaccaacatcttagtgccaacgtcttctgtgaaaggaggcagcgtatcaattggaggttctcttcagcttcttggtttctgcacctttgaggcatgtgttggtatattctggccgtcaatcatgaagatgagatctcagtacattcctgaggaagcgagaagcacaatcatgaacttcttccgcataccactcaacttatttgtttgtgtggtgctttacaacgtgaatgcattccctatcactgtcatgtttgggatgtgttctatcttcctcttcatggcagcaatcttgcagagacggctgatggttgtctctgatcaagtacacaaatcatcaactacacaagaaatgatcggggaagatgagccactaaatccttagatgtcgacagaaccatacatgcgaaatcagatattgacgacgacgtccatactccatactgcatttcgtttcgtcacctgtgcaataagatggacgtcaaaaccatgtagtctagtggttttcgtttctgtagtgtagatttgaccaggctgctaagtttgcacctgtcccgagaagattagatgagcaagtcaatcgatattggctattcgcattgttgtttcttttttttaaaaaaagatgttcgctttaaagtttaaacgatacggtatatatccttgtaagtgttgcattgctgcatctgatgacaattctagtggtgctgttactgactgttgagggctctctctacttggtcgttgtaagaactgttgcttcttaatgaaaaacgggctcaataaattcagtagaagcctgcagttgcagtaatcatacaaca

SEQ ID NO: 85001 - DNA, 6662 bp, Zea Mays
atggaggccgccgcgcccgacggggccggcaaggcatccccggcccccgaggagcccgactggccgcccgagctccgcctcctcgcgccgccgccagctgcggggacggacgatccgcagttcctcagctcgatcatcggggacgcggccgcccctcccccgccgatgccgccgctcgcgcagaagcggaaacgggggaggccgcccaagaggaaagacggcgcgggcgcggtggtaccggcccggcccgccaggcggagggaggacgaggaggaggtcgtctgcttcatctgtttcgacgggggcaacctcgtcgtctgcgatcggaggggttgccccaaggtctaccatccggcgtgcatcaagcgtgacgaggcattcttccagtcgcggagcaagtggaactgcggctggcacatatgcagcagctgtgaaaaggcagtgcactacatgtgctacacttgtacatactccctctgcaaagtgtgcatcaagcagggtaaattcttcagtgtcagggggacaaagggcttctgcgacacatgttatgggactatacttctcatagaatccaaagatgaaagtgcaataaaggttgattttgatgacatactcagctgggagtacctgttcaagctatattggttagatctgaaagggaagctttcattaacattggaagaacttactattgccaagactagatggaatgttcctagcacttctgctaggaaagaaaaagatgagtcgtctgatgacctgtatgacgctaataatgatgatgatgctggtactgactgctcctcaggaaaacgaaggcgaactaattcaaggaaaaagggtcaaaaatgccggaaggtaaataaagattgtagtgttcctgcaaaaaaggtcgagcttccaattacaaatactgagagcgttcccacagaagtgacaaatgaacgagtgccattgccagtagacacaaaagtaccaaatggatgggtacccttgccagtagacacaaaagtaccaaatgaatcagtgcccttgccagcaaacacaaaatgggcatcaccagagctactggagtttgtaggacatatgagagatggcgatcaatctttcatttctcagtttgatgttcagactcttctgcttgattatatcaagaagaataaccttcgcgatcctcagaggaaaagccaaattatttgtgacttgagacttcatcgcttgttcaggaaagcacgggttgctcactttgagatgttaaagcttttggaaatgcattttcttatgaatgagacttcaacagtaactgatagtagacaagtgactatcgatctcaattcagcttatgtagataccaatggatacaatgacatggctgcaaaattttctcctgataagaggagaaagatccatagaaagatggaaagagatacccaagttaatcttgaggactatgcagcaattgacatgcataatataaatttgatttttatgaggcgcagcctgatggaggatttagttgatgatgccaaattctcagacaaaattcatggtggttttgtgaggattaaaatttctgatgtgtatcagaaacaagacatataccgtctagtaaaagttactggaacgcacaaggttccagaaaagtatagcattggaaagaagatgacaaattttgcactcgagatattgaatttaaacaaaaaggagattattacaatggatacaatatctaatcatgattttacagaggaagagtgcaaacgtttaaggcagagcatgaagtgtggcgtgattagcagactaaaagtgggggatatcctagagaaagcaaagatattgcaatctgtaaaagtgaatgattggtttgaaaatgaaaagcagaggcttgggcatcttcgtgaccgtgcaagtgaaactggacgcagaaaggaacttagagaatatgtagaaaagctgcagcttctcaacgattctgaggaaagaacccgcaggattaatgaagttctggaagtgcatgttgactcacatatggatcctaattatgagtctgctgaagaaacagatgagaaaagaactgttggaaagtcggtagatcggacaagaccagatacaaccatatcacgacgaatatcaagatatcttagcactatgcagaaccatcctcaaaaagtttctgattgtagccaccatccaaaaaacttgtcaacagaaagtacaatatgtggatcaggagcaagaagtttggagaacagcacagcaaacagaactatgtatgaagctggatcattttcatcttctggagtaacaatgtcaaatgacacggagccggagaaagtctggcactacaaggatccttctgggaatgttcagggtccatttactcttttgcaactatcaaagtggacaagttacttcccacgtgatctgagagtatggcttacatttgagagtgaggagagatctttgctgttgactgaagtgctttcaaaacagcagaaagatttcactcaggctgcatcacatacaagcagcaaggcaacgctggttggcactggacatacaaggaacaaccctagtgtggatcagaccaatgctttctcccctgctggtcatagtgtggttagttcttcaggaataactgttcagtataataagtattctgttccagaaagggaaagtgtgtactctccagatgatagcttgtcgctgtcaactagttcggttccgccgaaggatgcttgtactgtgaatagccaaacacactgccagaataagcattctgttttcattcaatctcctggaagtgcatatgggcacacagacttgaaccatgatggaatacagggaggatgctctggtgaatcaaaccaccatcacagcagcggagccctatggagtcctaccgtggtacaggtgagttgtggacatggtaatgtggaatctcatcagagccagcatgtttcctggtcacaaagtcaacatgaatctaaaaatagttcacaacgacctgttaaagatctgaattcaaggcgggatctatcgaaaaacctacctactcaacgtatagggaaagatgtctccagtcctttgtttgcttgtgcttggagtccggccgagtcgaggacagcttcaagtcaacatgacggctcttgcttaagttcaacaactaatccaaactttctcgatgaacttcattattctattgcttccgcaaagcctaagagctgcgctccagcaacccctattgaagacagaggttctagttcaccatcaggcatgctgagtcatgcagaaagagttccaatctgcagtccacaatcaacccctttggcatctgctttcgatatgtgcaagatggaggagatcatgaatcagcaaagaacactggagccggatacatcaaatgcttcaattaaccagtctcccgaatcaaagattttccctgtatcctctcctgataaccatgatattgaccgtgagtttcctagtccagttccaagatctgagaataaggacattgcggttgacagctcaggattaacaccagcatcacctgaaaatattactacgaatttgcctggttcagatacatgcaagatggaggtcatgagtcagcaacaagtaactgaggctgtcgtatcgaattcttcagataatcattcccctcaatctaaggtttcccctgtatcatctcctaataacgaagatatgaaacatcagtaccccagttcaacccgaaggtctgagaataagattcctgctgtggacaatttactttcaacatcagctgctcgtgaaaatctaacgacaacttctgcccatgattctgatacatgcaaaatggtggagttagtgaatcagccaaaaacacctgaagtggatgcatcaaatgctccactttgtcaatctcctcattctcacacttcccaggtaccttctgacaatcaagatattgaacgtgaatgtccaggtccaactccaagatctgacagtaaagaacctcttgtaaacaactcagcgacaacttctgcatcagcctctgatacaatcaaaatggaggagtttgtgaatcagcaaaaaacagttgaagcagatgcatcaaatgctccacttaatcaatctcattctcacatttttccagtaccttctgacagtcaagatattgagcatgaatgtccaggtccaactccaagatctgacactaaggaacctcttctgaacaactcagtgttaacattagcagcgtctgaaattctaacaacaacctctgcggcctctgatacatgcaaaatggaggactcagtgaatcagcaaaaaacgcttgaagcagatgcattgaatgctccacttaatcatcatcctcattctcacgttcttcctgtatcatttgataatcaagacattcagcatgaatatcctagcccaactccaaaatctgacagtaaggaacctcttgtggacaactcagtattaacatcagtagggcctgaaatgctagcgacaacttctgtctctgatacatgcaaaacggaggagtttgtgaatcagcaaaaagcagttgaagcagatgcatcaaacgcttcacttaatcagcctcacatttccgctgtaccttccgataaacaagatattgaatgtgaatgttctagcccaactccaaggtctgactgtaaggaacctcttatggacaactcagtattaacatcagcggtgcctgaaattctagcaacatcttctgcttctgataaatgcaaaatggaggagtttgtgaatcagcaaagaccaattgaagtggatgcatcaaatgcttcacttaatcagtattctcgttgtcacattttcaatgtatcttctgataatcaatatgttgagcgtgaatgttctagcacaactccaagatctgactgtgaggaacctcttatggacaactcaatattaacatcagcggtgcctgaaatactagcaacatcttctgcttctgcttctgataaatgcaaaatggaggagtttgtgaatcagcaaagaccaattgaagcggatgcatcaaatgcttcgcttaatcagcctcatcgttgtcacattttcactgtatcttctgataatcaagatattgagtgtgaatgtcctagcccaacttcaagatctgacagtaaggaatcccttgtggacaacttagtgttaacatcagcagtgcctgaaaatctaccgacaagttttgcagttgcctctgattcatgcaagatggagatcttgaataagaaaagaacacttgaagcagatgcatcaaatgcttcacttgatcagccttctcactctagcgttttcacttcatcttctaatgataatcaaggaaatgcgtgtgaacgtcctagtccaaatccaagacctgagggtgagcagcctctcatggataactcagggttaacatcaccagtgcctcaaaatctaacttctgcttccgacatatgcaagatgggggagatcttgaatgagaacaggacacttgaagcaaacccatcaaatggttcaattactcaatctcatcaatccaaggttttccttgtaccatctattgatatcctagagcgtgaatgttccagtgaaacgcctaggcctcagtttaaggaacctgttgtggacagctctgggttaacatcagcagcacctgaaagtttaacagctaagcaacatgtccactcaccagatgcctttataccaccaaagcatggtgctccaactggggaattaggtgatgcaaaatcagattttaaaggtgaagaaattattcaaaaagaacaatattgtgaaagagaacctattgttgctacaagagagaatttgctaattgatctttcctgtggtgccgagtcgatagatgtgtcagatgtattggaatctttaatggaagaaaggagtgtaacttcgtacgtgccagtatcaatagaggacttcctagccgcttcagcagtggaagaaccacaatactctagccctatagcgttatctccttggggtgaacctagttactaccaaggtgatgctggtgattctgcgctatggggtattcaagattcgatcaatgatatgtggtcattgctttcaccaagacctatgctccaagcttcatctggtattggaactgaggggaaggaaacttttgatatcaacgaggtggctgtgacccatgttaatagtgattttttccaaagaggatcgatgcttggggaggaaaatatgaatcaggcaaacttgagtgttgctgcagataggatgctgctgcctgagcaggtcccatcaataccaaatggtatgtcaacatcatcagtagacgagggcaccagagttataggttctcaagcatcaatcaatcagagcttagactggggtactacatggaggactagtcagaatctcagcgtgtatagcaatgaaatagcagggccctcgagtaaaagctattgggaagaatcaaggaagcaggaagccaccaattcgggcgtttctatttcaggggaagccattagaaacaagcgcttgaaccctcctgataatgctattcggggcagccatcatcaccgtggcaggtcatttttactgtagcccagaggcttcgcgcatgggttgtgctatagaggcaggactcatgcaactttttggtaatg

SEQ ID NO: 85002 - DNA, 6933 bp, Zea Mays
atggaggccgccgcgcccgacggggccggcaaggcatccccggcccccgaggagcccgactggccgcccgagctccgcctcctcgcgccgccgccagctgcggggacggacgatccgcagttcctcagctcgatcatcggggacgcggccgcccctcccccgccgatgccgccgctcgcgcagaagcggaaacgggggaggccgcccaagaggaaagacggcgcgggcgcggtggtaccggcccggcccgccaggcggagggaggacgaggaggaggtcgtctgcttcatctgtttcgacgggggcaacctcgtcgtctgcgatcggaggggttgccccaaggtctaccatccggcgtgcatcaagcgtgacgaggcattcttccagtcgcggagcaagtggaactgcggctggcacatatgcagcagctgtgaaaaggcagtgcactacatgtgctacacttgtacatactccctctgcaaagtgtgcatcaagcagggtaaattcttcagtgtcagggggacaaagggcttctgcgacacatgttatgggactatacttctcatagaatccaaagatgaaagtgcaataaaggttgattttgatgacatactcagctgggagtacctgttcaagctatattggttagatctgaaagggaagctttcattaacattggaagaacttactattgccaagactagatggaatgttcctagcacttctgctaggaaagaaaaagatgagtcgtctgatgacctgtatgacgctaataatgatgatgatgctggtactgactgctcctcaggaaaacgaaggcgaactaattcaaggaaaaagggtcaaaaatgccggaaggtaaataaagattgtagtgttcctgcaaaaaaggtcgagcttccaattacaaatactgagagcgttcccacagaagtgacaaatgaacgagtgccattgccagtagacacaaaagtaccaaatggatgggtacccttgccagtagacacaaaagtaccaaatgaatcagtgcccttgccagcaaacacaaaatgggcatcaccagagctactggagtttgtaggacatatgagagatggcgatcaatctttcatttctcagtttgatgttcagactcttctgcttgattatatcaagaagaataaccttcgcgatcctcagaggaaaagccaaattatttgtgacttgagacttcatcgcttgttcaggaaagcacgggttgctcactttgagatgttaaagcttttggaaatgcattttcttatgaatgagacttcaacagtaactgatagtagacaagtgactatcgatctcaattcagcttatgtagataccaatggatacaatgacatggctgcaaaattttctcctgataagaggagaaagatccatagaaagatggaaagagatacccaagttaatcttgaggactatgcagcaattgacatgcataatataaatttgatttttatgaggcgcagcctgatggaggatttagttgatgatgccaaattctcagacaaaattcatggtggttttgtgaggattaaaatttctgatgtgtatcagaaacaagacatataccgtctagtaaaagttactggaagagtgcaaacgtttaaggcagagcatgaagtgtggcgtgattagcagactaaaagtgggggatatcctagagaaagcaaagatattgcaatctgtaaaagtgaatgattggtttgaaaatgaaaagcagaggcttgggcatcttcgtgaccgtgcaagtgaaactggacgcagaaaggaatatcctattagaccatactatgatgtgcttctcaacgattctgaggaaagaacccgcaggattaatgaagttctggaagtgcatgttgactcacatatggatcctaattatgagtctgctgaagaaacagatgagaaaagaactgttggaaagtcggtagatcggacaagaccagatacaaccatatcacgacgaatatcaagatatcttagcactatgcagaaccatcctcaaaaagtttctgattgtagccaccatccaaaaaacttgtcaacagaaagtacaatatgtggatcaggagcaagaagtttggagaacagcacagcaaacagaactatgtatgaagctggatcattttcatcttctggagtaacaatgtcaaatgacacggagccggagaaagtctggcactacaaggatccttctgggaatgttcagggtccatttactcttttgcaactatcaaagtggacaagttacttcccacgtgatctgagagtatggcttacatttgagagtgaggagagatctttgctgttgactgaagtgctttcaaaacagcagaaagatttcactcaggctgcatcacatacaagcagcaaggcaacgctggttggcactggacatacaaggaacaaccctagtgtggatcagaccaatgctttctcccctgctggtcatagtgtggttagttcttcaggaataactgttcagtataataagtattctgttccagaaagggaaagtgtgtactctccagatgatagcttgtcgctgtcaactagttcggttccgccgaaggatgcttgtactgtgaatagccaaacacactgccagaataagcattctgttttcattcaatctcctggaagtgcatatgggcacacagacttgaaccatgatggaatacagggaggatgctctggtgaatcaaaccaccatcacagcagcggagccctatggagtcctaccgtggtacaggtgagttgtggacatggtaatgtggaatctcatcagagccagcatgtttcctggtcacaaagtcaacatgaatctaaaaatagttcacaacgacctgttaaagatctgaattcaaggcgggatctatcgaaaaacctacctactcaacgtatagggaaagatgtctccagtcctttgtttgcttgtgcttggagtccggccgagtcgaggacagcttcaagtcaacatgacggctcttgcttaagttcaacaactaatccaaactttctcgatgaacttcattattctattgcttccgcaaagcctaagagctgcgctccagcaacccctattgaagacagaggttctagttcaccatcaggcatgctgagtcatgcagaaagagttccaatctgcagtccacaatcaacccctttggcatctgctttcgatatgtgcaagatggaggagatcatgaatcagcaaagaacactggagccggatacatcaaatgcttcaattaaccagtctcccgaatcaaagattttccctgtatcctctcctgataaccatgatattgaccgtgagtttcctagtccagttccaagatctgagaataaggacattgcggttgacagctcaggattaacaccagcatcacctgaaaatattactacgaatttgcctggttcagatacatgcaagatggaggtcatgagtcagcaacaagtaactgaggctgtcgtatcgaattcttcagataatcattcccctcaatctaaggtttcccctgtatcatctcctaataacgaagatatgaaacatcagtaccccagttcaacccgaaggtctgagaataagattcctgctgtggacaatttactttcaacatcagctgctcgtgaaaatctaacgacaacttctgcccatgattctgatacatgcaaaatggtggagttagtgaatcagccaaaaacacctgaagtggatgcatcaaatgctccactttgtcaatctcctcattctcacacttcccaggtaccttctgacaatcaagatattgaacgtgaatgtccaggtccaactccaagatctgacagtaaagaacctcttgtaaacaactcagcgacaacttctgcatcagcctctgatacaatcaaaatggaggagtttgtgaatcagcaaaaaacagttgaagcagatgcatcaaatgctccacttaatcaatctcattctcacatttttccagtaccttctgacagtcaagatattgagcatgaatgtccaggtccaactccaagatctgacactaaggaacctcttctgaacaactcagtgttaacattagcagcgtctgaaattctaacaacaacctctgcggcctctgatacatgcaaaatggaggactcagtgaatcagcaaaaaacgcttgaagcagatgcattgaatgctccacttaatcatcatcctcattctcacgttcttcctgtatcatttgataatcaagacattcagcatgaatatcctagcccaactccaaaatctgacagtaaggaacctcttgtggacaactcagtattaacatcagtagggcctgaaatgctagcgacaacttctgtctctgatacatgcaaaacggaggagtttgtgaatcagcaaaaagcagttgaagcagatgcatcaaacgcttcacttaatcagcctcacatttccgctgtaccttccgataaacaagatattgaatgtgaatgttctagcccaactccaaggtctgactgtaaggaacctcttatggacaactcagtattaacatcagcggtgcctgaaattctagcaacatcttctgcttctgataaatgcaaaatggaggagtttgtgaatcagcaaagaccaattgaagtggatgcatcaaatgcttcacttaatcagtattctcgttgtcacattttcaatgtatcttctgataatcaatatgttgagcgtgaatgttctagcacaactccaagatctgactgtgaggaacctcttatggacaactcaatattaacatcagcggtgcctgaaatactagcaacatcttctgcttctgcttctgataaatgcaaaatggaggagtttgtgaatcagcaaagaccaattgaagcggatgcatcaaatgcttcgcttaatcagcctcatcgttgtcacattttcactgtatcttctgataatcaagatattgagtgtgaatgtcctagcccaacttcaagatctgacagtaaggaatcccttgtggacaacttagtgttaacatcagcagtgcctgaaaatctaccgacaagttttgcagttgcctctgattcatgcaagatggagatcttgaataagaaaagaacacttgaagcagatgcatcaaatgcttcacttgatcagccttctcactctagcgttttcacttcatcttctaatgataatcaaggaaatgcgtgtgaacgtcctagtccaaatccaagacctgagggtgagcagcctctcatggataactcagggttaacatcaccagtgcctcaaaatctaacttctgcttccgacatatgcaagatgggggagatcttgaatgagaacaggacacttgaagcaaacccatcaaatggttcaattactcaatctcatcaatccaaggttttccttgtaccatctattgatatcctagagcgtgaatgttccagtgaaacgcctaggcctcagtttaaggaacctgttgtggacagctctgggttaacatcagcagcacctgaaagtttaacagctaagcaacatgtccactcaccagatgcctttataccaccaaagcatggtgctccaactggggaattaggtgatgcaaaatcagattttaaaggtgaagaaattattcaaaaagaacaatattgtgaaagagaacctattgttgctacaagagagaatttgctaattgatctttcctgtggtgccgagtcgatagatgtgtcagatgtattggaatctttaatggaagaaaggagtgtaacttcgtacgtgccagtatcaatagaggacttcctagccgcttcagcagtggaagaaccacaatactctagccctatagcgttatctccttggggtgaacctagttactaccaaggtgatgctggtgattctgcgctatggggtattcaagattcgatcaatgatatgtggtcattgctttcaccaagacctatgctccaagcttcatctggtattggaactgaggggaaggaaacttttgatatcaacgaggtggctgtgacccatgttaatagtgattttttccaaagaggatcgatgcttggggaggaaaatatgaatcaggcaaacttgagtgttgctgcagataggatgctgctgcctgagcaggtcccatcaataccaaatggtatgtcaacatcatcagtagacgagggcaccagagttataggttctcaagcatcaatcaatcagagcttagactggggtactacatggaggactagtcagaatctcagcgtgtatagcaatgaaatagcagggccctcgagtaaaagctattgggaagaatcaaggaagcaggaagccaccaattcgggcgtttctatttcaggggaagccattagaaacaagcgcttgaaccctcctgataatgctattcggggcagccatcatcaccgtggcaggtactcccaaatcagtgaatcttggctactcagttcaaatcactctaggagtagttctgctaaatttggcagcggtgggtcatcaagatcaacttcaaagggtcaaactaggggctaatgtaaattctcgggtgcaggagaaaggatgcatcttgtagctacctgcatccttgatctctgcagcaggaataggttttaaaattctctgttatatctttgcagtttgtataggctaattaaaattaagtcaacagagcgtaaatgaccatctctgctccactcaactcaactgtagcaaggagcatatgtttagcatagaggtttgactgaatggccctgcccaagaagcagattcagctcttgggcatggtctgtatcatcctgacattctgttggatggaactgcaattgtgcaaccggcatctcttgacaccgaaacgcccctgatgtgttggaatatctgatcgattggtttag

SEQ ID NO: 85003 - DNA, 7040 bp, Zea Mays
atggaggccgccgcgcccgacggggccggcaaggcatccccggcccccgaggagcccgactggccgcccgagctccgcctcctcgcgccgccgccagctgcggggacggacgatccgcagttcctcagctcgatcatcggggacgcggccgcccctcccccgccgatgccgccgctcgcgcagaagcggaaacgggggaggccgcccaagaggaaagacggcgcgggcgcggtggtaccggcccggcccgccaggcggagggaggacgaggaggaggtcgtctgcttcatctgtttcgacgggggcaacctcgtcgtctgcgatcggaggggttgccccaaggtctaccatccggcgtgcatcaagcgtgacgaggcattcttccagtcgcggagcaagtggaactgcggctggcacatatgcagcagctgtgaaaaggcagtgcactacatgtgctacacttgtacatactccctctgcaaagtgtgcatcaagcagggtaaattcttcagtgtcagggggacaaagggcttctgcgacacatgttatgggactatacttctcatagaatccaaagatgaaagtgcaataaaggttgattttgatgacatactcagctgggagtacctgttcaagctatattggttagatctgaaagggaagctttcattaacattggaagaacttactattgccaagactagatggaatgttcctagcacttctgctaggaaagaaaaagatgagtcgtctgatgacctgtatgacgctaataatgatgatgatgctggtactgactgctcctcaggaaaacgaaggcgaactaattcaaggaaaaagggtcaaaaatgccggaaggtaaataaagattgtagtgttcctgcaaaaaaggtcgagcttccaattacaaatactgagagcgttcccacagaagtgacaaatgaacgagtgccattgccagtagacacaaaagtaccaaatggatgggtacccttgccagtagacacaaaagtaccaaatgaatcagtgcccttgccagcaaacacaaaatgggcatcaccagagctactggagtttgtaggacatatgagagatggcgatcaatctttcatttctcagtttgatgttcagactcttctgcttgattatatcaagaagaataaccttcgcgatcctcagaggaaaagccaaattatttgtgacttgagacttcatcgcttgttcaggaaagcacgggttgctcactttgagatgttaaagcttttggaaatgcattttcttatgaatgagacttcaacagtaactgatagtagacaagtgactatcgatctcaattcagcttatgtagataccaatggatacaatgacatggctgcaaaattttctcctgataagaggagaaagatccatagaaagatggaaagagatacccaagttaatcttgaggactatgcagcaattgacatgcataatataaatttgatttttatgaggcgcagcctgatggaggatttagttgatgatgccaaattctcagacaaaattcatggtggttttgtgaggattaaaatttctgatgtgtatcagaaacaagacatataccgtctagtaaaagttactggaacgcacaaggttccagaaaagtatagcattggaaagaagatgacaaattttgcactcgagatattgaatttaaacaaaaaggagattattacaatggatacaatatctaatcatgattttacagaggaagagtgcaaacgtttaaggcagagcatgaagtgtggcgtgattagcagactaaaagtgggggatatcctagagaaagcaaagatattgcaatctgtaaaagtgaatgataggcttgggcatcttcgtgaccgtgcaagtgaaactggacgcagaaaggaacttagagaatatgtagaaaagctgcagcttctcaacgattctgaggaaagaacccgcaggattaatgaagttctggaagtgcatgttgactcacatatggatcctaattatgagtctgctgaagaaacagatgagaaaagaactgttggaaagtcggtagatcggacaagaccagatacaaccatatcacgacgaatatcaagatatcttagcactatgcagaaccatcctcaaaaagtttctgattgtagccaccatccaaaaaacttgtcaacagaaagtacaatatgtggatcaggagcaagaagtttggagaacagcacagcaaacagaactatgtatgaagctggatcattttcatcttctggagtaacaatgtcaaatgacacggagccggagaaagtctggcactacaaggatccttctgggaatgttcagggtccatttactcttttgcaactatcaaagtggacaagttacttcccacgtgatctgagagtatggcttacatttgagagtgaggagagatctttgctgttgactgaagtgctttcaaaacagcagaaagatttcactcaggctgcatcacatacaagcagcaaggcaacgctggttggcactggacatacaaggaacaaccctagtgtggatcagaccaatgctttctcccctgctggtcatagtgtggttagttcttcaggaataactgttcagtataataagtattctgttccagaaagggaaagtgtgtactctccagatgatagcttgtcgctgtcaactagttcggttccgccgaaggatgcttgtactgtgaatagccaaacacactgccagaataagcattctgttttcattcaatctcctggaagtgcatatgggcacacagacttgaaccatgatggaatacagggaggatgctctggtgaatcaaaccaccatcacagcagcggagccctatggagtcctaccgtggtacaggtgagttgtggacatggtaatgtggaatctcatcagagccagcatgtttcctggtcacaaagtcaacatgaatctaaaaatagttcacaacgacctgttaaagatctgaattcaaggcgggatctatcgaaaaacctacctactcaacgtatagggaaagatgtctccagtcctttgtttgcttgtgcttggagtccggccgagtcgaggacagcttcaagtcaacatgacggctcttgcttaagttcaacaactaatccaaactttctcgatgaacttcattattctattgcttccgcaaagcctaagagctgcgctccagcaacccctattgaagacagaggttctagttcaccatcaggcatgctgagtcatgcagaaagagttccaatctgcagtccacaatcaacccctttggcatctgctttcgatatgtgcaagatggaggagatcatgaatcagcaaagaacactggagccggatacatcaaatgcttcaattaaccagtctcccgaatcaaagattttccctgtatcctctcctgataaccatgatattgaccgtgagtttcctagtccagttccaagatctgagaataaggacattgcggttgacagctcaggattaacaccagcatcacctgaaaatattactacgaatttgcctggttcagatacatgcaagatggaggtcatgagtcagcaacaagtaactgaggctgtcgtatcgaattcttcagataatcattcccctcaatctaaggtttcccctgtatcatctcctaataacgaagatatgaaacatcagtaccccagttcaacccgaaggtctgagaataagattcctgctgtggacaatttactttcaacatcagctgctcgtgaaaatctaacgacaacttctgcccatgattctgatacatgcaaaatggtggagttagtgaatcagccaaaaacacctgaagtggatgcatcaaatgctccactttgtcaatctcctcattctcacacttcccaggtaccttctgacaatcaagatattgaacgtgaatgtccaggtccaactccaagatctgacagtaaagaacctcttgtaaacaactcagcgacaacttctgcatcagcctctgatacaatcaaaatggaggagtttgtgaatcagcaaaaaacagttgaagcagatgcatcaaatgctccacttaatcaatctcattctcacatttttccagtaccttctgacagtcaagatattgagcatgaatgtccaggtccaactccaagatctgacactaaggaacctcttctgaacaactcagtgttaacattagcagcgtctgaaattctaacaacaacctctgcggcctctgatacatgcaaaatggaggactcagtgaatcagcaaaaaacgcttgaagcagatgcattgaatgctccacttaatcatcatcctcattctcacgttcttcctgtatcatttgataatcaagacattcagcatgaatatcctagcccaactccaaaatctgacagtaaggaacctcttgtggacaactcagtattaacatcagtagggcctgaaatgctagcgacaacttctgtctctgatacatgcaaaacggaggagtttgtgaatcagcaaaaagcagttgaagcagatgcatcaaacgcttcacttaatcagcctcacatttccgctgtaccttccgataaacaagatattgaatgtgaatgttctagcccaactccaaggtctgactgtaaggaacctcttatggacaactcagtattaacatcagcggtgcctgaaattctagcaacatcttctgcttctgataaatgcaaaatggaggagtttgtgaatcagcaaagaccaattgaagtggatgcatcaaatgcttcacttaatcagtattctcgttgtcacattttcaatgtatcttctgataatcaatatgttgagcgtgaatgttctagcacaactccaagatctgactgtgaggaacctcttatggacaactcaatattaacatcagcggtgcctgaaatactagcaacatcttctgcttctgcttctgataaatgcaaaatggaggagtttgtgaatcagcaaagaccaattgaagcggatgcatcaaatgcttcgcttaatcagcctcatcgttgtcacattttcactgtatcttctgataatcaagatattgagtgtgaatgtcctagcccaacttcaagatctgacagtaaggaatcccttgtggacaacttagtgttaacatcagcagtgcctgaaaatctaccgacaagttttgcagttgcctctgattcatgcaagatggagatcttgaataagaaaagaacacttgaagcagatgcatcaaatgcttcacttgatcagccttctcactctagcgttttcacttcatcttctaatgataatcaaggaaatgcgtgtgaacgtcctagtccaaatccaagacctgagggtgagcagcctctcatggataactcagggttaacatcaccagtgcctcaaaatctaacttctgcttccgacatatgcaagatgggggagatcttgaatgagaacaggacacttgaagcaaacccatcaaatggttcaattactcaatctcatcaatccaaggttttccttgtaccatctattgatatcctagagcgtgaatgttccagtgaaacgcctaggcctcagtttaaggaacctgttgtggacagctctgggttaacatcagcagcacctgaaagtttaacagctaagcaacatgtccactcaccagatgcctttataccaccaaagcatggtgctccaactggggaattaggtgatgcaaaatcagattttaaaggtgaagaaattattcaaaaagaacaatattgtgaaagagaacctattgttgctacaagagagaatttgctaattgatctttcctgtggtgccgagtcgatagatgtgtcagatgtattggaatctttaatggaagaaaggagtgtaacttcgtacgtgccagtatcaatagaggacttcctagccgcttcagcagtggaagaaccacaatactctagccctatagcgttatctccttggggtgaacctagttactaccaaggtgatgctggtgattctgcgctatggggtattcaagattcgatcaatgatatgtggtcattgctttcaccaagacctatgctccaagcttcatctggtattggaactgaggggaaggaaacttttgatatcaacgaggtggctgtgacccatgttaatagtgattttttccaaagaggatcgatgcttggggaggaaaatatgaatcaggcaaacttgagtgttgctgcagataggatgctgctgcctgagcaggtcccatcaataccaaatggtatgtcaacatcatcagtagacgagggcaccagagttataggttctcaagcatcaatcaatcagagcttagactggggtactacatggaggactagtcagaatctcagcgtgtatagcaatgaaatagcagggccctcgagtaaaagctattgggaagaatcaaggaagcaggaagccaccaattcgggcgtttctatttcaggggaagccattagaaacaagcgcttgaaccctcctgataatgctattcggggcagccatcatcaccgtggcaggtactcccaaatcagtgaatcttggctactcagttcaaatcactctaggagtagttctgctaaatttggcagcggtgggtcatcaagatcaacttcaaagggtcaaactaggggctaatgtaaattctcgggtgcaggagaaaggatgcatcttgtagctacctgcatccttgatctctgcagcaggaataggttttaaaattctctgttatatctttgcagtttgtataggctaattaaaattaagtcaacagagcgtaaatgaccatctctgctccactcaactcaactgtagcaaggagcatatgtttagcatagaggtttgactgaatggccctgcccaagaagcagattcagctcttgggcatggtctgtatcatcctgacattctgttggatggaactgcaattgtgcaaccggcatctcttgacaccgaaacgcccctgatgtgttggaatatctgatcgattggtttag

SEQ ID NO: 85004 - DNA, 7061 bp, Zea Mays
atggaggccgccgcgcccgacggggccggcaaggcatccccggcccccgaggagcccgactggccgcccgagctccgcctcctcgcgccgccgccagctgcggggacggacgatccgcagttcctcagctcgatcatcggggacgcggccgcccctcccccgccgatgccgccgctcgcgcagaagcggaaacgggggaggccgcccaagaggaaagacggcgcgggcgcggtggtaccggcccggcccgccaggcggagggaggacgaggaggaggtcgtctgcttcatctgtttcgacgggggcaacctcgtcgtctgcgatcggaggggttgccccaaggtctaccatccggcgtgcatcaagcgtgacgaggcattcttccagtcgcggagcaagtggaactgcggctggcacatatgcagcagctgtgaaaaggcagtgcactacatgtgctacacttgtacatactccctctgcaaagtgtgcatcaagcagggtaaattcttcagtgtcagggggacaaagggcttctgcgacacatgttatgggactatacttctcatagaatccaaagatgaaagtgcaataaaggttgattttgatgacatactcagctgggagtacctgttcaagctatattggttagatctgaaagggaagctttcattaacattggaagaacttactattgccaagactagatggaatgttcctagcacttctgctaggaaagaaaaagatgagtcgtctgatgacctgtatgacgctaataatgatgatgatgctggtactgactgctcctcaggaaaacgaaggcgaactaattcaaggaaaaagggtcaaaaatgccggaaggtaaataaagattgtagtgttcctgcaaaaaaggtcgagcttccaattacaaatactgagagcgttcccacagaagtgacaaatgaacgagtgccattgccagtagacacaaaagtaccaaatggatgggtacccttgccagtagacacaaaagtaccaaatgaatcagtgcccttgccagcaaacacaaaatgggcatcaccagagctactggagtttgtaggacatatgagagatggcgatcaatctttcatttctcagtttgatgttcagactcttctgcttgattatatcaagaagaataaccttcgcgatcctcagaggaaaagccaaattatttgtgacttgagacttcatcgcttgttcaggaaagcacgggttgctcactttgagatgttaaagcttttggaaatgcattttcttatgaatgagacttcaacagtaactgatagtagacaagtgactatcgatctcaattcagcttatgtagataccaatggatacaatgacatggctgcaaaattttctcctgataagaggagaaagatccatagaaagatggaaagagatacccaagttaatcttgaggactatgcagcaattgacatgcataatataaatttgatttttatgaggcgcagcctgatggaggatttagttgatgatgccaaattctcagacaaaattcatggtggttttgtgaggattaaaatttctgatgtgtatcagaaacaagacatataccgtctagtaaaagttactggaacgcacaaggttccagaaaagtatagcattggaaagaagatgacaaattttgcactcgagatattgaatttaaacaaaaaggagattattacaatggatacaatatctaatcatgattttacagaggaagagtgcaaacgtttaaggcagagcatgaagtgtggcgtgattagcagactaaaagtgggggatatcctagagaaagcaaagatattgcaatctgtaaaagtgaatgattggtttgaaaatgaaaagcagaggcttgggcatcttcgtgaccgtgcaagtgaaactggacgcagaaaggaacttagagaatatgtagaaaagctgcagcttctcaacgattctgaggaaagaacccgcaggattaatgaagttctggaagtgcatgttgactcacatatggatcctaattatgagtctgctgaagaaacagatgagaaaagaactgttggaaagtcggtagatcggacaagaccagatacaaccatatcacgacgaatatcaagatatcttagcactatgcagaaccatcctcaaaaagtttctgattgtagccaccatccaaaaaacttgtcaacagaaagtacaatatgtggatcaggagcaagaagtttggagaacagcacagcaaacagaactatgtatgaagctggatcattttcatcttctggagtaacaatgtcaaatgacacggagccggagaaagtctggcactacaaggatccttctgggaatgttcagggtccatttactcttttgcaactatcaaagtggacaagttacttcccacgtgatctgagagtatggcttacatttgagagtgaggagagatctttgctgttgactgaagtgctttcaaaacagcagaaagatttcactcaggctgcatcacatacaagcagcaaggcaacgctggttggcactggacatacaaggaacaaccctagtgtggatcagaccaatgctttctcccctgctggtcatagtgtggttagttcttcaggaataactgttcagtataataagtattctgttccagaaagggaaagtgtgtactctccagatgatagcttgtcgctgtcaactagttcggttccgccgaaggatgcttgtactgtgaatagccaaacacactgccagaataagcattctgttttcattcaatctcctggaagtgcatatgggcacacagacttgaaccatgatggaatacagggaggatgctctggtgaatcaaaccaccatcacagcagcggagccctatggagtcctaccgtggtacaggtgagttgtggacatggtaatgtggaatctcatcagagccagcatgtttcctggtcacaaagtcaacatgaatctaaaaatagttcacaacgacctgttaaagatctgaattcaaggcgggatctatcgaaaaacctacctactcaacgtatagggaaagatgtctccagtcctttgtttgcttgtgcttggagtccggccgagtcgaggacagcttcaagtcaacatgacggctcttgcttaagttcaacaactaatccaaactttctcgatgaacttcattattctattgcttccgcaaagcctaagagctgcgctccagcaacccctattgaagacagaggttctagttcaccatcaggcatgctgagtcatgcagaaagagttccaatctgcagtccacaatcaacccctttggcatctgctttcgatatgtgcaagatggaggagatcatgaatcagcaaagaacactggagccggatacatcaaatgcttcaattaaccagtctcccgaatcaaagattttccctgtatcctctcctgataaccatgatattgaccgtgagtttcctagtccagttccaagatctgagaataaggacattgcggttgacagctcaggattaacaccagcatcacctgaaaatattactacgaatttgcctggttcagatacatgcaagatggaggtcatgagtcagcaacaagtaactgaggctgtcgtatcgaattcttcagataatcattcccctcaatctaaggtttcccctgtatcatctcctaataacgaagatatgaaacatcagtaccccagttcaacccgaaggtctgagaataagattcctgctgtggacaatttactttcaacatcagctgctcgtgaaaatctaacgacaacttctgcccatgattctgatacatgcaaaatggtggagttagtgaatcagccaaaaacacctgaagtggatgcatcaaatgctccactttgtcaatctcctcattctcacacttcccaggtaccttctgacaatcaagatattgaacgtgaatgtccaggtccaactccaagatctgacagtaaagaacctcttgtaaacaactcagcgacaacttctgcatcagcctctgatacaatcaaaatggaggagtttgtgaatcagcaaaaaacagttgaagcagatgcatcaaatgctccacttaatcaatctcattctcacatttttccagtaccttctgacagtcaagatattgagcatgaatgtccaggtccaactccaagatctgacactaaggaacctcttctgaacaactcagtgttaacattagcagcgtctgaaattctaacaacaacctctgcggcctctgatacatgcaaaatggaggactcagtgaatcagcaaaaaacgcttgaagcagatgcattgaatgctccacttaatcatcatcctcattctcacgttcttcctgtatcatttgataatcaagacattcagcatgaatatcctagcccaactccaaaatctgacagtaaggaacctcttgtggacaactcagtattaacatcagtagggcctgaaatgctagcgacaacttctgtctctgatacatgcaaaacggaggagtttgtgaatcagcaaaaagcagttgaagcagatgcatcaaacgcttcacttaatcagcctcacatttccgctgtaccttccgataaacaagatattgaatgtgaatgttctagcccaactccaaggtctgactgtaaggaacctcttatggacaactcagtattaacatcagcggtgcctgaaattctagcaacatcttctgcttctgataaatgcaaaatggaggagtttgtgaatcagcaaagaccaattgaagtggatgcatcaaatgcttcacttaatcagtattctcgttgtcacattttcaatgtatcttctgataatcaatatgttgagcgtgaatgttctagcacaactccaagatctgactgtgaggaacctcttatggacaactcaatattaacatcagcggtgcctgaaatactagcaacatcttctgcttctgcttctgataaatgcaaaatggaggagtttgtgaatcagcaaagaccaattgaagcggatgcatcaaatgcttcgcttaatcagcctcatcgttgtcacattttcactgtatcttctgataatcaagatattgagtgtgaatgtcctagcccaacttcaagatctgacagtaaggaatcccttgtggacaacttagtgttaacatcagcagtgcctgaaaatctaccgacaagttttgcagttgcctctgattcatgcaagatggagatcttgaataagaaaagaacacttgaagcagatgcatcaaatgcttcacttgatcagccttctcactctagcgttttcacttcatcttctaatgataatcaaggaaatgcgtgtgaacgtcctagtccaaatccaagacctgagggtgagcagcctctcatggataactcagggttaacatcaccagtgcctcaaaatctaacttctgcttccgacatatgcaagatgggggagatcttgaatgagaacaggacacttgaagcaaacccatcaaatggttcaattactcaatctcatcaatccaaggttttccttgtaccatctattgatatcctagagcgtgaatgttccagtgaaacgcctaggcctcagtttaaggaacctgttgtggacagctctgggttaacatcagcagcacctgaaagtttaacagctaagcaacatgtccactcaccagatgcctttataccaccaaagcatggtgctccaactggggaattaggtgatgcaaaatcagattttaaaggtgaagaaattattcaaaaagaacaatattgtgaaagagaacctattgttgctacaagagagaatttgctaattgatctttcctgtggtgccgagtcgatagatgtgtcagatgtattggaatctttaatggaagaaaggagtgtaacttcgtacgtgccagtatcaatagaggacttcctagccgcttcagcagtggaagaaccacaatactctagccctatagcgttatctccttggggtgaacctagttactaccaaggtgatgctggtgattctgcgctatggggtattcaagattcgatcaatgatatgtggtcattgctttcaccaagacctatgctccaagcttcatctggtattggaactgaggggaaggaaacttttgatatcaacgaggtggctgtgacccatgttaatagtgattttttccaaagaggatcgatgcttggggaggaaaatatgaatcaggcaaacttgagtgttgctgcagataggatgctgctgcctgagcaggtcccatcaataccaaatggtatgtcaacatcatcagtagacgagggcaccagagttataggttctcaagcatcaatcaatcagagcttagactggggtactacatggaggactagtcagaatctcagcgtgtatagcaatgaaatagcagggccctcgagtaaaagctattgggaagaatcaaggaagcaggaagccaccaattcgggcgtttctatttcaggggaagccattagaaacaagcgcttgaaccctcctgataatgctattcggggcagccatcatcaccgtggcaggtactcccaaatcagtgaatcttggctactcagttcaaatcactctaggagtagttctgctaaatttggcagcggtgggtcatcaagatcaacttcaaagggtcaaactaggggctaatgtaaattctcgggtgcaggagaaaggatgcatcttgtagctacctgcatccttgatctctgcagcaggaataggttttaaaattctctgttatatctttgcagtttgtataggctaattaaaattaagtcaacagagcgtaaatgaccatctctgctccactcaactcaactgtagcaaggagcatatgtttagcatagaggtttgactgaatggccctgcccaagaagcagattcagctcttgggcatggtctgtatcatcctgacattctgttggatggaactgcaattgtgcaaccggcatctcttgacaccgaaacgcccctgatgtgttggaatatctgatcgattggtttag

SEQ ID NO: 85005 - DNA, 6959 bp, Zea Mays
atggaggccgccgcgcccgacggggccggcaaggcatccccggcccccgaggagcccgactggccgcccgagctccgcctcctcgcgccgccgccagctgcggggacggacgatccgcagttcctcagctcgatcatcggggacgcggccgcccctcccccgccgatgccgccgctcgcgcagaagcggaaacgggggaggccgcccaagaggaaagacggcgcgggcgcggtggtaccggcccggcccgccaggcggagggaggacgaggaggaggtcgtctgcttcatctgtttcgacgggggcaacctcgtcgtctgcgatcggaggggttgccccaaggtctaccatccggcgtgcatcaagcgtgacgaggcattcttccagtcgcggagcaagtggaactgcggctggcacatatgcagcagctgtgaaaaggcagtgcactacatgtgctacacttgtacatactccctctgcaaagtgtgcatcaagcagggtaaattcttcagtgtcagggggacaaagggcttctgcgacacatgttatgggactatacttctcatagaatccaaagatgaaagtgcaataaaggttgattttgatgacatactcagctgggagtacctgttcaagctatattggttagatctgaaagggaagctttcattaacattggaagaacttactattgccaagactagatggaatgttcctagcacttctgctaggaaagaaaaagatgagtcgtctgatgacctgtatgacgctaataatgatgatgatgctggtactgactgctcctcaggaaaacgaaggcgaactaattcaaggaaaaagggtcaaaaatgccggaaggtaaataaagattgtagtgttcctgcaaaaaaggtcgagcttccaattacaaatactgagagcgttcccacagaagtgacaaatgaacgagtgccattgccagtagacacaaaagtaccaaatggatgggtacccttgccagtagacacaaaagtaccaaatgaatcagtgcccttgccagcaaacacaaaatgggcatcaccagagctactggagtttgtaggacatatgagagatggcgatcaatctttcatttctcagtttgatgttcagactcttctgcttgattatatcaagaagaataaccttcgcgatcctcagaggaaaagccaaattatttgtgacttgagacttcatcgcttgttcaggaaagcacgggttgctcactttgagatgttaaagcttttggaaatgcattttcttatgaatgagacttcaacagtaactgatagtagacaagtgactatcgatctcaattcagcttatgtagataccaatggatacaatgacatggctgcaaaattttctcctgataagaggagaaagatccatagaaagatggaaagagatacccaagttaatcttgaggactatgcagcaattgacatgcataatataaatttgatttttatgaggcgcagcctgatggaggatttagttgatgatgccaaattctcagacaaaattcatggtggttttgtgaggattaaaatttctgatgtgtatcagaaacaagacatataccgtctagtaaaagttactggaacgcacaaggttccagaaaagtatagcattggaaagaagatgacaaattttgcactcgagatattgaatttaaacaaaaaggagattattacaatggatacaatatctaatcatgattttacagaggaagagtgcaaacgtttaaggcagagcatgaagtgtggcgtgattagcagactaaaagtgggggatatcctagagaaagcaaagatattgcaatctgtaaaagtgaatgattggtttgaaaatgaaaagcagaggcttgggcatcttcgtgaccgtgcaagtgaaactggacgcagaaaggaatatcctattagaccatactatgatgtgcttctcaacgattctgaggaaagaacccgcaggattaatgaagttctggaagtgcatgttgactcacatatggatcctaattatgagtctgctgaagaaacagatgagaaaagaactgttggaaagtcggtagatcggacaagaccagatacaaccatatcacgacgaatatcaagatatcttagcactatgcagaaccatcctcaaaaagtttctgattgtagccaccatccaaaaaacttgtcaacagaaagtacaatatgtggatcaggagcaagaagtttggagaacagcacagcaaacagaactatgtatgaagctggatcattttcatcttctggagtaacaatgtcaaatgacacggagccggagaaagtctggcactacaaggatccttctgggaatgttcagggtccatttactcttttgcaactatcaaagtggacaagttacttcccacgtgatctgagagtatggcttacatttgagagtgaggagagatctttgctgttgactgaagtgctttcaaaacagcagaaagatttcactcaggctgcatcacatacaagcagcaaggcaacgctggttggcactggacatacaaggaacaaccctagtgtggatcagaccaatgctttctcccctgctggtcatagtgtggttagttcttcaggaataactgttcagtataataagtattctgttccagaaagggaaagtgtgtactctccagatgatagcttgtcgctgtcaactagttcggttccgccgaaggatgcttgtactgtgaatagccaaacacactgccagaataagcattctgttttcattcaatctcctggaagtgcatatgggcacacagacttgaaccatgatggaatacagggaggatgctctggtgaatcaaaccaccatcacagcagcggagccctatggagtcctaccgtggtacaggtgagttgtggacatggtaatgtggaatctcatcagagccagcatgtttcctggtcacaaagtcaacatgaatctaaaaatagttcacaacgacctgttaaagatctgaattcaaggcgggatctatcgaaaaacctacctactcaacgtatagggaaagatgtctccagtcctttgtttgcttgtgcttggagtccggccgagtcgaggacagcttcaagtcaacatgacggctcttgcttaagttcaacaactaatccaaactttctcgatgaacttcattattctattgcttccgcaaagcctaagagctgcgctccagcaacccctattgaagacagaggttctagttcaccatcaggcatgctgagtcatgcagaaagagttccaatctgcagtccacaatcaacccctttggcatctgctttcgatatgtgcaagatggaggagatcatgaatcagcaaagaacactggagccggatacatcaaatgcttcaattaaccagtctcccgaatcaaagattttccctgtatcctctcctgataaccatgatattgaccgtgagtttcctagtccagttccaagatctgagaataaggacattgcggttgacagctcaggattaacaccagcatcacctgaaaatattactacgaatttgcctggttcagatacatgcaagatggaggtcatgagtcagcaacaagtaactgaggctgtcgtatcgaattcttcagataatcattcccctcaatctaaggtttcccctgtatcatctcctaataacgaagatatgaaacatcagtaccccagttcaacccgaaggtctgagaataagattcctgctgtggacaatttactttcaacatcagctgctcgtgaaaatctaacgacaacttctgcccatgattctgatacatgcaaaatggtggagttagtgaatcagccaaaaacacctgaagtggatgcatcaaatgctccactttgtcaatctcctcattctcacacttcccaggtaccttctgacaatcaagatattgaacgtgaatgtccaggtccaactccaagatctgacagtaaagaacctcttgtaaacaactcagcgacaacttctgcatcagcctctgatacaatcaaaatggaggagtttgtgaatcagcaaaaaacagttgaagcagatgcatcaaatgctccacttaatcaatctcattctcacatttttccagtaccttctgacagtcaagatattgagcatgaatgtccaggtccaactccaagatctgacactaaggaacctcttctgaacaactcagtgttaacattagcagcgtctgaaattctaacaacaacctctgcggcctctgatacatgcaaaatggaggactcagtgaatcagcaaaaaacgcttgaagcagatgcattgaatgctccacttaatcatcatcctcattctcacgttcttcctgtatcatttgataatcaagacattcagcatgaatatcctagcccaactccaaaatctgacagtaaggaacctcttgtggacaactcagtattaacatcagtagggcctgaaatgctagcgacaacttctgtctctgatacatgcaaaacggaggagtttgtgaatcagcaaaaagcagttgaagcagatgcatcaaacgcttcacttaatcagcctcacatttccgctgtaccttccgataaacaagatattgaatgtgaatgttctagcccaactccaaggtctgactgtaaggaacctcttatggacaactcagtattaacatcagcggtgcctgaaattctagcaacatcttctgcttctgataaatgcaaaatggaggagtttgtgaatcagcaaagaccaattgaagtggatgcatcaaatgcttcacttaatcagtattctcgttgtcacattttcaatgtatcttctgataatcaatatgttgagcgtgaatgttctagcacaactccaagatctgactgtgaggaacctcttatggacaactcaatattaacatcagcggtgcctgaaatactagcaacatcttctgcttctgcttctgataaatgcaaaatggaggagtttgtgaatcagcaaagaccaattgaagcggatgcatcaaatgcttcgcttaatcagcctcatcgttgtcacattttcactgtatcttctgataatcaagatattgagtgtgaatgtcctagcccaacttcaagatctgacagtaaggaatcccttgtggacaacttagtgttaacatcagcagtgcctgaaaatctaccgacaagttttgcagttgcctctgattcatgcaagatggagatcttgaataagaaaagaacacttgaagcagatgcatcaaatgcttcacttgatcagccttctcactctagcgttttcacttcatcttctaatgataatcaaggaaatgcgtgtgaacgtcctagtccaaatccaagacctgagggtgagcagcctctcatggataactcagggttaacatcaccagtgcctcaaaatctaacttctgcttccgacatatgcaagatgggggagatcttgaatgagaacaggacacttgaagcaaacccatcaaatggttcaattactcaatctcatcaatccaaggttttccttgtaccatctattgatatcctagagcgtgaatgttccagtgaaacgcctaggcctcagtttaaggaacctgttgtggacagctctgggttaacatcagcagcacctgaaagtttaacagctaagcaacatgtccactcaccagatgcctttataccaccaaagcatggtgctccaactggggaattaggtgatgcaaaatcagattttaaagatgtgtcagatgtattggaatctttaatggaagaaaggagtgtaacttcgtacgtgccagtatcaatagaggacttcctagccgcttcagcagtggaagaaccacaatactctagccctatagcgttatctccttggggtgaacctagttactaccaaggtgatgctggtgattctgcgctatggggtattcaagattcgatcaatgatatgtggtcattgctttcaccaagacctatgctccaagcttcatctggtattggaactgaggggaaggaaacttttgatatcaacgaggtggctgtgacccatgttaatagtgattttttccaaagaggatcgatgcttggggaggaaaatatgaatcaggcaaacttgagtgttgctgcagataggatgctgctgcctgagcaggtcccatcaataccaaatggtatgtcaacatcatcagtagacgagggcaccagagttataggttctcaagcatcaatcaatcagagcttagactggggtactacatggaggactagtcagaatctcagcgtgtatagcaatgaaatagcagggccctcgagtaaaagctattgggaagaatcaaggaagcaggaagccaccaattcgggcgtttctatttcaggggaagccattagaaacaagcgcttgaaccctcctgataatgctattcggggcagccatcatcaccgtggcaggtactcccaaatcagtgaatcttggctactcagttcaaatcactctaggagtagttctgctaaatttggcagcggtgggtcatcaagatcaacttcaaagggtcaaactaggggctaatgtaaattctcgggtgcaggagaaaggatgcatcttgtagctacctgcatccttgatctctgcagcaggaataggttttaaaattctctgttatatctttgcagtttgtataggctaattaaaattaagtcaacagagcgtaaatgaccatctctgctccactcaactcaactgtagcaaggagcatatgtttagcatagaggtttgactgaatggccctgcccaagaagcagattcagctcttgggcatggtctgtatcatcctgacattctgttggatggaactgcaattgtgcaaccggcatctcttgacaccgaaacgcccctgatgtgttggaatatctgatcgattggtttag

SEQ ID NO: 85006 - DNA, 2461 bp, Zea Mays
gagcactccaagatactaaatttgtactaaggtatgttgatgttattcttcagcttatagacaaagctggagattttgtaagtgatgatatatggtatcgagttgtacaatttgtcacgaacaacgaagatctacagtcatatgctgcagctaaggcaagagaatatcttgacaagcctgctttacatgagacaatggtcaaggtgagtgcctaccttcttggggagtatggccatcttttggcccggagacctggctgtagccctaaggaattgtttgctattataaatgataaacttccgacagtatcgacaagtactgtagctattcttctctcaacctatgccaagatattgatccacactcaacctcctgatgttggactgcagcaacaaatcctcacaatatttaaaaagtacgagagctatattgatgttgaaatacaacagagagcagttgagtattttgaactaagcaggaaaggccctgctttggcagatgtgttggctgaaatgccaaaattccctgagcgtgagtctgcacttctgaagaaggctgaagacgctgagattgacacagcagagcaaagtgctataaagctacgcagtcagcaacaaacttccagtgctcttgttgtagctgatcactcccctgcaaatggatctgcaccaccagctaatcatctcactcttgtgaagatgccaagccaaattgtttctgacactcaggagagtggggtaattcatgaagaagttcctaatcctcctgttgaagctcccaaagaaaatgggactcccgtcgaagtggaaagcagggacacaaacattactggaatcaacaatgaggttaaaactgaaccaccctctacatcgcattctacctctcccgcggacctcctggcagatcttttgggtcctcttgcgatagagggccctcctgccgtagagcaaaatcctacccaaggattgaatagtaatcaaagtccagttggtgacttggcacttgctacccttgatgatcaatccaactcagttcagccaattgtcaacgtcgaggaaaagttccatatattgtgcacaaaagatagcggagtgctgtacgaggatcctcacattcagattggtatgaaagcagagtggcgtgcccatcatggccgtcttgttcttttcctgggtaacaaaaatacttcagcccttacgtcagtgcgggtgctgattttgcctcctagtcatttgaaaatggaactttcgtctgttcccgatactattcctccaagggcgcaggtgcaagttccacttgaggttgcaaatctccgtgcaagtagagatgttgcggttttagatctctcatatacttttggaacttcactggtggatggcaaacttcgacttcctgttgtattgaataaatttttgcagcctataactcttacccctgaagaatttttcctccagtggaaagcgctgactgttcacttgctgaaggttcaagaagtggttaaaggtgtgaaaccaatgcctctttctgagatggctaatcttttcatgagccttcacttggcggtcgctcctggacttgataacaacccgaacaatctggttgcatgcacgacattcttttctgaagcaacacgggccatgctttgtctgataagacttgaaacagatccacaagacaggacccaactgcggctgacagttgcctcgggcgatcaacatttgacattcgagttgaaagagttcgtcaaggaacatttgattgatatcccaaggactcaggctgccccacctatggcaatggtccagccacagttgcttactgcagcacctgccacatacaatgaccctggtgccatgcttgctggattgctatgagaagtaaaaaaacaaaagccatagtgttttgatgtacatgacagatgttgatctaacatctccaaaagcatcttgctgccaagacgaacacgtggagcaacgaaagggctggcggagtagtcttcagctggattctaaaccgagaaaaagctagattcttttgggcggtttgaaggcctccttcccctccatggagcagtccccatattgtgtaagcgtaatttgttgtttctcatttatcatccccttttggcccatttatataacttgtattgcccaggtctgttggtggacagtcggtagttatgtgtgttaatataaggtgctaggttttccaccatgccggttgtaaagttgagttggtgcgcattgcattacgatttgtaccaataaggtcgaaatagggaaaggaaattaatagggttttgttttgtgcattttatacggtctgcatagttccgatcccttggactgtctgtttctttcctggtggcggtgggtgtgtgatggcacaagcacgaggttcacgaggctcgattacataatctaacctggttgacaccggcgcgtcatctttttgcctcttt

SEQ ID NO: 85007 - DNA, 2686 bp, Zea Mays
ggatgctgttagtaacagatgtgcaggatatcattagaaggcaccaggcccagatcattacatctttgaaggatccagatatcagcattagacggagggctcttgatttattatatggcatgtgtgatgttacaaacgcgaaagaaattgttgaggagttgttgcagtaccttgatacagctgaatttgcaatgcgtgaagagttgtctctgaaggcagctattcttgcagaaaaatttgctccacaactattgtggtatgttgatgttattcttcagcttatagacaaagctggagattttgtaagtgatgatatatggtatcgagttgtacaatttgtcacgaacaacgaagatctacagtcatatgctgcagctaaggcaagagaatatcttgacaagcctgctttacatgagacaatggtcaaggtgagtgcctaccttcttggggagtatggccatcttttggcccggagacctggctgtagccctaaggaattgtttgctattataaatgataaacttccgacagtatcgacaagtactgtagctattcttctctcaacctatgccaagatattgatccacactcaacctcctgatgttggactgcagcaacaaatcctcacaatatttaaaaagtacgagagctatattgatgttgaaatacaacagagagcagttgagtattttgaactaagcaggaaaggccctgctttggcagatgtgttggctgaaatgccaaaattccctgagcgtgagtctgcacttctgaagaaggctgaagacgctgagattgacacagcagagcaaagtgctataaagctacgcagtcagcaacaaacttccagtgctcttgttgtagctgatcactcccctgcaaatggatctgcaccaccagctaatcatctcactcttgtgaagatgccaagccaaattgtttctgacactcaggagagtggggtaattcatgaagaagttcctaatcctcctgttgaagctcccaaagaaaatgggactcccgtcgaagtggaaagcagggacacaaacattactggaatcaacaatgaggttaaaactgaaccaccctctacatcgcattctacctctcccgcggacctcctggcagatcttttgggtcctcttgcgatagagggccctcctgccgtagagcaaaatcctacccaaggattgaatagtaatcaaagtccagttggtgacttggcacttgctacccttgatgatcaatccaactcagttcagccaattgtcaacgtcgaggaaaagttccatatattgtgcacaaaagatagcggagtgctgtacgaggatcctcacattcagattggtatgaaagcagagtggcgtgcccatcatggccgtcttgttcttttcctgggtaacaaaaatacttcagcccttacgtcagtgcgggtgctgattttgcctcctagtcatttgaaaatggaactttcgtctgttcccgatactattcctccaagggcgcaggtgcaagttccacttgaggttgcaaatctccgtgcaagtagagatgttgcggttttagatctctcatatacttttggaacttcactggtggatggcaaacttcgacttcctgttgtattgaataaatttttgcagcctataactcttacccctgaagaatttttcctccagtggaaagcgctgactgttcacttgctgaaggttcaagaagtggttaaaggtgtgaaaccaatgcctctttctgagatggctaatcttttcatgagccttcacttggcggtcgctcctggacttgataacaacccgaacaatctggttgcatgcacgacattcttttctgaagcaacacgggccatgctttgtctgataagacttgaaacagatccacaagacaggacccaactgcggctgacagttgcctcgggcgatcaacatttgacattcgagttgaaagagttcgtcaaggaacatttgattgatatcccaaggactcaggctgccccacctatggcaatggtccagccacagttgcttactgcagcacctgccacatacaatgaccctggtgccatgcttgctggattgctatgagaagtaaaaaaacaaaagccatagtgttttgatgtacatgacagatgttgatctaacatctccaaaagcatcttgctgccaagacgaacacgtggagcaacgaaagggctggcggagtagtcttcagctggattctaaaccgagaaaaagctagattcttttgggcggtttgaaggcctccttcccctccatggagcagtccccatattgtgtaagcgtaatttgttgtttctcatttatcatccccttttggcccatttatataacttgtattgcccaggtctgttggtggacagtcggtagttatgtgtgttaatataaggtgctaggttttccaccatgccggttgtaaagttgagttggtgcgcattgcattacgatttgtaccaataaggtcgaaatagggaaaggaaattaatagggttttgttttgtgcattttatacggtctgcatagttccgatcccttggactgtctgtttctttcctggtggcggtgggtgtgtgatggcacaagcacgaggttcacgaggctcgattacataatctaacctggttgacaccggcgcgtcatctttttgcctcttt

SEQ ID NO: 85008 - DNA, 3952 bp, Zea Mays
cagacacacaccggaaggaggcgcaccttcccccagccccactatacgacgaccgccgcggtcgaaccaaaacagcttcctcctcccggcgtcgcctccgcgacgatcctttccgccgccccatagggttctgctgctcccgatccgggcgccagatctcgcgtggcgacgcgcggatctcggatttctctagaggcggcggcggcggcggccggagcaggaggagatggcgctctcggggatgcgggggctctcggtcttcatcagcgacgtacgcaactgccacaacaaggagcaggagcgcctccgcgtcgacaaggagctcggcaacatccgtacgcggttcaaaaacgagaagggcttgtcaccatacgagaagaaaaaatatgtatggaaaatgctttacatttatatgctgggttatgatgttgattttgggcatatggaaactgtctcgttgatatctgcaccaaagtatcctgagaagcaggttggttatattgtgacatcttgcttactgaatgagaataacgatttcttaagaatggtaataaatacagtaaggaatgacataatcggacgaaatgagaccttccagtgcttagcattgacaatggtaggtaacattggtgggaaagaattttctgagtcactagccccagatgttcagaaacttcttatttcaagcagttgccgtcctgttgtcagaaagaaggctgctctatgccttctgcggctttataggaagaatcctgatgttgtgaatattgatggctgggctgatcgaatggcacaacttctagatgagcgtgatctaggtgtgctgacatctgtcatgagtctttttgtttcactagtatccaacaattctgaagcatattggaattgtcttccaaaatgtgtaagaatattggagagattagcaagaaatcaagatattccacaagagtacacttattatggaattccatctccttggcttcaggttaagacaatgagagctcttcagtacttccctaccattgaagatcccaacgcaagacgggctttgtttgaggttttacagcgtattttgatgggtactgatgttgttaaaaatgttaacaagaacaatgcctcacatgctgttctctttgaagctcttgctctggtcatgcatctggatgctgagaaggagatgatgtcacagtgtgtggctcttcttgggaagtttattgcagtccgggagccaaacattcggtacctcggtctggaaaacatgactaggatgctgttagtaacagatgtgcaggatatcattagaaggcaccaggcccagatcattacatctttgaaggatccagatatcagcattagacggagggctcttgatttattatatggcatgtgtgatgttacaaacgcgaaagaaattgttgaggagttgttgcagtaccttgatacagctgaatttgcaatgcgtgaagagttgtctctgaaggcagctattcttgcagaaaaatttgctccacaactattgtgggtatgttgatgttattcttcagcttatagacaaagctggagattttgtaagtgatgatatatggtatcgagttgtacaatttgtcacgaacaacgaagatctacagtcatatgctgcagctaaggcaagagaatatcttgacaagcctgctttacatgagacaatggtcaaggtgagtgcctaccttcttggggagtatggccatcttttggcccggagacctggctgtagccctaaggaattgtttgctattataaatgataaacttccgacagtatcgacaagtactgtagctattcttctctcaacctatgccaagatattgatccacactcaacctcctgatgttggactgcagcaacaaatcctcacaatatttaaaaagtacgagagctatattgatgttgaaatacaacagagagcagttgagtattttgaactaagcaggaaaggccctgctttggcagatgtgttggctgaaatgccaaaattccctgagcgtgagtctgcacttctgaagaaggctgaagacgctgagattgacacagcagagcaaagtgctataaagctacgcagtcagcaacaaacttccagtgctcttgttgtagctgatcactcccctgcaaatggatctgcaccaccagctaatcatctcactcttgtgaagatgccaagccaaattgtttctgacactcaggagagtggggtaattcatgaagaagttcctaatcctcctgttgaagctcccaaagaaaatgggactcccgtcgaagtggaaagcagggacacaaacattactggaatcaacaatgaggttaaaactgaaccaccctctacatcgcattctacctctcccgcggacctcctggcagatcttttgggtcctcttgcgatagagggccctcctgccgtagagcaaaatcctacccaaggattgaatagtaatcaaagtccagttggtgacttggcacttgctacccttgatgatcaatccaactcagttcagccaattgtcaacgtcgaggaaaagttccatatattgtgcacaaaagatagcggagtgctgtacgaggatcctcacattcagattggtatgaaagcagagtggcgtgcccatcatggccgtcttgttcttttcctgggtaacaaaaatacttcagcccttacgtcagtgcgggtgctgattttgcctcctagtcatttgaaaatggaactttcgtctgttcccgatactattcctccaagggcgcaggtgcaagttccacttgaggttgcaaatctccgtgcaagtagagatgttgcggttttagatctctcatatacttttggaacttcactggtggatggcaaacttcgacttcctgttgtattgaataaatttttgcagcctataactcttacccctgaagaatttttcctccagtggaaagcgctgactgttcacttgctgaaggttcaagaagtggttaaaggtgtgaaaccaatgcctctttctgagatggctaatcttttcatgagccttcacttggcggtcgctcctggacttgataacaacccgaacaatctggttgcatgcacgacattcttttctgaagcaacacgggccatgctttgtctgataagacttgaaacagatccacaagacaggacccaactgcggctgacagttgcctcgggcgatcaacatttgacattcgagttgaaagagttcgtcaaggaacatttgattgatatcccaaggactcaggctgccccacctatggcaatggtccagccacagttgcttactgcagcacctgccacatacaatgaccctggtgccatgcttgctggattgctatgagaagtaaaaaaacaaaagccatagtgttttgatgtacatgacagatgttgatctaacatctccaaaagcatcttgctgccaagacgaacacgtggagcaacgaaagggctggcggagtagtcttcagctggattctaaaccgagaaaaagctagattcttttgggcggtttgaaggcctccttcccctccatggagcagtccccatattgtgtaagcgtaatttgttgtttctcatttatcatccccttttggcccatttatataacttgtattgcccaggtctgttggtggacagtcggtagttatgtgtgttaatataaggtgctaggttttccaccatgccggttgtaaagttgagttggtgcgcattgcattacgatttgtaccaataaggtcgaaatagggaaaggaaattaatagggttttgttttgtgcattttatacggtctgcatagttccgatcccttggactgtctgtttctttcctggtggcggtgggtgtgtgatggcacaagcacgaggttcacgaggctcgattacataatctaacctggttgacaccggcgcgtcatctttttgcctcttt

SEQ ID NO: 85009 - DNA, 3976 bp, Zea Mays
cagaaacgagcgaaaaagcgtccccgatccagcacagacagacacacaccggaaggaggcgcaccttcccccagccccactatacgacgaccgccgcggtcgaaccaaaacagcttcctcctcccggcgtcgcctccgcgacgatcctttccgccgccccatagggttctgctgctcccgatccgggcgccagatctcgcgtggcgacgcgcggatctcggatttctctagaggcggcggcggcggcggccggagcaggaggagatggcgctctcggggatgcgggggctctcggtcttcatcagcgacgtacgcaactgccacaacaaggagcaggagcgcctccgcgtcgacaaggagctcggcaacatccgtacgcggttcaaaaacgagaagggcttgtcaccatacgagaagaaaaaatatgtatggaaaatgctttacatttatatgctgggttatgatgttgattttgggcatatggaaactgtctcgttgatatctgcaccaaagtatcctgagaagcaggttggttatattgtgacatcttgcttactgaatgagaataacgatttcttaagaatggtaataaatacagtaaggaatgacataatcggacgaaatgagaccttccagtgcttagcattgacaatggtaggtaacattggtgggaaagaattttctgagtcactagccccagatgttcagaaacttcttatttcaagcagttgccgtcctgttgtcagaaagaaggctgctctatgccttctgcggctttataggaagaatcctgatgttgtgaatattgatggctgggctgatcgaatggcacaacttctagatgagcgtgatctaggtgtgctgacatctgtcatgagtctttttgtttcactagtatccaacaattctgaagcatattggaattgtcttccaaaatgtgtaagaatattggagagattagcaagaaatcaagatattccacaagagtacacttattatggaattccatctccttggcttcaggttaagacaatgagagctcttcagtacttccctaccattgaagatcccaacgcaagacgggctttgtttgaggttttacagcgtattttgatgggtactgatgttgttaaaaatgttaacaagaacaatgcctcacatgctgttctctttgaagctcttgctctggtcatgcatctggatgctgagaaggagatgatgtcacagtgtgtggctcttcttgggaagtttattgcagtccgggagccaaacattcggtacctcggtctggaaaacatgactaggatgctgttagtaacagatgtgcaggatatcattagaaggcaccaggcccagatcattacatctttgaaggatccagatatcagcattagacggagggctcttgatttattatatggcatgtgtgatgttacaaacgcgaaagaaattgttgaggagttgttgcagctgaatttgcaatgcgtgaagagttgtctctgaaggcagctattcttgcagaaaaatttgctccacaactattgtggtatgttgatgttattcttcagcttatagacaaagctggagattttgtaagtgatgatatatggtatcgagttgtacaatttgtcacgaacaacgaagatctacagtcatatgctgcagctaaggcaagagaatatcttgacaagcctgctttacatgagacaatggtcaaggtgagtgcctaccttcttggggagtatggccatcttttggcccggagacctggctgtagccctaaggaattgtttgctattataaatgataaacttccgacagtatcgacaagtactgtagctattcttctctcaacctatgccaagatattgatccacactcaacctcctgatgttggactgcagcaacaaatcctcacaatatttaaaaagtacgagagctatattgatgttgaaatacaacagagagcagttgagtattttgaactaagcaggaaaggccctgctttggcagatgtgttggctgaaatgccaaaattccctgagcgtgagtctgcacttctgaagaaggctgaagacgctgagattgacacagcagagcaaagtgctataaagctacgcagtcagcaacaaacttccagtgctcttgttgtagctgatcactcccctgcaaatggatctgcaccaccagctaatcatctcactcttgtgaagatgccaagccaaattgtttctgacactcaggagagtggggtaattcatgaagaagttcctaatcctcctgttgaagctcccaaagaaaatgggactcccgtcgaagtggaaagcagggacacaaacattactggaatcaacaatgaggttaaaactgaaccaccctctacatcgcattctacctctcccgcggacctcctggcagatcttttgggtcctcttgcgatagagggccctcctgccgtagagcaaaatcctacccaaggattgaatagtaatcaaagtccagttggtgacttggcacttgctacccttgatgatcaatccaactcagttcagccaattgtcaacgtcgaggaaaagttccatatattgtgcacaaaagatagcggagtgctgtacgaggatcctcacattcagattggtatgaaagcagagtggcgtgcccatcatggccgtcttgttcttttcctgggtaacaaaaatacttcagcccttacgtcagtgcgggtgctgattttgcctcctagtcatttgaaaatggaactttcgtctgttcccgatactattcctccaagggcgcaggtgcaagttccacttgaggttgcaaatctccgtgcaagtagagatgttgcggttttagatctctcatatacttttggaacttcactggtggatggcaaacttcgacttcctgttgtattgaataaatttttgcagcctataactcttacccctgaagaatttttcctccagtggaaagcgctgactgttcacttgctgaaggttcaagaagtggttaaaggtgtgaaaccaatgcctctttctgagatggctaatcttttcatgagccttcacttggcggtcgctcctggacttgataacaacccgaacaatctggttgcatgcacgacattcttttctgaagcaacacgggccatgctttgtctgataagacttgaaacagatccacaagacaggacccaactgcggctgacagttgcctcgggcgatcaacatttgacattcgagttgaaagagttcgtcaaggaacatttgattgatatcccaaggactcaggctgccccacctatggcaatggtccagccacagttgcttactgcagcacctgccacatacaatgaccctggtgccatgcttgctggattgctatgagaagtaaaaaaacaaaagccatagtgttttgatgtacatgacagatgttgatctaacatctccaaaagcatcttgctgccaagacgaacacgtggagcaacgaaagggctggcggagtagtcttcagctggattctaaaccgagaaaaagctagattcttttgggcggtttgaaggcctccttcccctccatggagcagtccccatattgtgtaagcgtaatttgttgtttctcatttatcatccccttttggcccatttatataacttgtattgcccaggtctgttggtggacagtcggtagttatgtgtgttaatataaggtgctaggttttccaccatgccggttgtaaagttgagttggtgcgcattgcattacgatttgtaccaataaggtcgaaatagggaaaggaaattaatagggttttgttttgtgcattttatacggtctgcatagttccgatcccttggactgtctgtttctttcctggtggcggtgggtgtgtgatggcacaagcacgaggttcacgaggctcgattacataatctaacctggttgacaccggcgcgtcatctttttgcctcttt

SEQ ID NO: 85010 - DNA, 4215 bp, Zea Mays
agaaaaatggagttattaaatacaaaattcaccgggtttagagtagcggtatctattgccatctttaggttatgatcggtgaattttctatagctatcaccgttccatgacagcgtcactcctgcacacgatggagcccgagtccttgcaggacgagtttgagcttcaacctgactagataagtgtggcgttctggcaagttagaaaccaaacaggccaaaccttccagaaacgagcgaaaaagcgtccccgatccagcacagacagacacacaccggaaggaggcgcaccttcccccagccccactatacgacgaccgccgcggtcgaaccaaaacagcttcctcctcccggcgtcgcctccgcgacgatcctttccgccgccccatagggttctgctgctcccgatccgggcgccagatctcgcgtggcgacgcgcggatctcggatttctctagaggcggcggcggcggcggccggagcaggaggagatggcgctctcggggatgcgggggctctcggtcttcatcagcgacgtacgcaactgccacaacaaggagcaggagcgcctccgcgtcgacaaggagctcggcaacatccgtacgcggttcaaaaacgagaagggcttgtcaccatacgagaagaaaaaatatgtatggaaaatgctttacatttatatgctgggttatgatgttgattttgggcatatggaaactgtctcgttgatatctgcaccaaagtatcctgagaagcaggttggttatattgtgacatcttgcttactgaatgagaataacgatttcttaagaatggtaataaatacagtaaggaatgacataatcggacgaaatgagaccttccagtgcttagcattgacaatggtaggtaacattggtgggaaagaattttctgagtcactagccccagatgttcagaaacttcttatttcaagcagttgccgtcctgttgtcagaaagaaggctgctctatgccttctgcggctttataggaagaatcctgatgttgtgaatattgatggctgggctgatcgaatggcacaacttctagatgagcgtgatctaggtgtgctgacatctgtcatgagtctttttgtttcactagtatccaacaattctgaagcatattggaattgtcttccaaaatgtgtaagaatattggagagattagcaagaaatcaagatattccacaagagtacacttattatggaattccatctccttggcttcaggttaagacaatgagagctcttcagtacttccctaccattgaagatcccaacgcaagacgggctttgtttgaggttttacagcgtattttgatgggtactgatgttgttaaaaatgttaacaagaacaatgcctcacatgctgttctctttgaagctcttgctctggtcatgcatctggatgctgagaaggagatgatgtcacagtgtgtggctcttcttgggaagtttattgcagtccgggagccaaacattcggtacctcggtctggaaaacatgactaggatgctgttagtaacagatgtgcaggatatcattagaaggcaccaggcccagatcattacatctttgaaggatccagatatcagcattagacggagggctcttgatttattatatggcatgtgtgatgttacaaacgcgaaagaaattgttgaggagttgttgcagtaccttgatacagctgaatttgcaatgcgtgaagagttgtctctgaaggcagctattcttgcagaaaaatttgctccacaactattgtggtatgttgatgttattcttcagcttatagacaaagctggagattttgtaagtgatgatatatggtatcgagttgtacaatttgtcacgaacaacgaagatctacagtcatatgctgcagctaaggcaagagaatatcttgacaagcctgctttacatgagacaatggtcaaggtgagtgcctaccttcttggggagtatggccatcttttggcccggagacctggctgtagccctaaggaattgtttgctattataaatgataaacttccgacagtatcgacaagtactgtagctattcttctctcaacctatgccaagatattgatccacactcaacctcctgatgttggactgcagcaacaaatcctcacaatatttaaaaagtacgagagctatattgatgttgaaatacaacagagagcagttgagtattttgaactaagcaggaaaggccctgctttggcagatgtgttggctgaaatgccaaaattccctgagcgtgagtctgcacttctgaagaaggctgaagacgctgagattgacacagcagagcaaagtgctataaagctacgcagtcagcaacaaacttccagtgctcttgttgtagctgatcactcccctgcaaatggatctgcaccaccagctaatcatctcactcttgtgaagatgccaagccaaattgtttctgacactcaggagagtggggtaattcatgaagaagttcctaatcctcctgttgaagctcccaaagaaaatgggactcccgtcgaagtggaaagcagggacacaaacattactggaatcaacaatgaggttaaaactgaaccaccctctacatcgcattctacctctcccgcggacctcctggcagatcttttgggtcctcttgcgatagagggccctcctgccgtagagcaaaatcctacccaaggattgaatagtaatcaaagtccagttggtgacttggcacttgctacccttgatgatcaatccaactcagttcagccaattgtcaacgtcgaggaaaagttccatatattgtgcacaaaagatagcggagtgctgtacgaggatcctcacattcagattggtatgaaagcagagtggcgtgcccatcatggccgtcttgttcttttcctgggtaacaaaaatacttcagcccttacgtcagtgcgggtgctgattttgcctcctagtcatttgaaaatggaactttcgtctgttcccgatactattcctccaagggcgcaggtgcaagttccacttgaggttgcaaatctccgtgcaagtagagatgttgcggttttagatctctcatatacttttggaacttcactggtggatggcaaacttcgacttcctgttgtattgaataaatttttgcagcctataactcttacccctgaagaatttttcctccagtggaaagcgctgactgttcacttgctgaaggttcaagaagtggttaaaggtgtgaaaccaatgcctctttctgagatggctaatcttttcatgagccttcacttggcggtcgctcctggacttgataacaacccgaacaatctggttgcatgcacgacattcttttctgaagcaacacgggccatgctttgtctgataagacttgaaacagatccacaagacaggacccaactgcggctgacagttgcctcgggcgatcaacatttgacattcgagttgaaagagttcgtcaaggaacatttgattgatatcccaaggactcaggctgccccacctatggcaatggtccagccacagttgcttactgcagcacctgccacatacaatgaccctggtgccatgcttgctggattgctatgagaagtaaaaaaacaaaagccatagtgttttgatgtacatgacagatgttgatctaacatctccaaaagcatcttgctgccaagacgaacacgtggagcaacgaaagggctggcggagtagtcttcagctggattctaaaccgagaaaaagctagattcttttgggcggtttgaaggcctccttcccctccatggagcagtccccatattgtgtaagcgtaatttgttgtttctcatttatcatccccttttggcccatttatataacttgtattgcccaggtctgttggtggacagtcggtagttatgtgtgttaatataaggtgctaggttttccaccatgccggttgtaaagttgagttggtgcgcattgcattacgatttgtaccaataaggtcgaaatagggaaaggaaattaatagggttttgttttgtgcattttatacggtctgcatagttccgatcccttggactgtctgtttctttcctggtggcggtgggtgtgtgatggcacaagcacgaggttcacgaggctcgattacataatctaacctggttgacaccggcgcgtcatctttttgcctcttt

SEQ ID NO: 85011 - DNA, 1614 bp, Zea Mays
aaaaagcgtccccgatccagcacagacagacacacaccggaaggaggcgcaccttcccccagccccactatacgacgaccgccgcggtcgaaccaaaacagcttcctcctcccggcgtcgcctccgcgacgatcctttccgccgccccatagggttctgctgctcccgatccgggcgccagatctcgcgtggcgacgcgcggatctcggatttctctagaggcggcggcggcggcggccggagcaggaggagatggcgctctcggggatgcgggggctctcggtcttcatcagcgacgtacgcaactgccacaacaaggagcaggagcgcctccgcgtcgacaaggagctcggcaacatccgtacgcggttcaaaaacgagaagggcttgtcaccatacgagaagaaaaaatatgtatggaaaatgctttacatttatatgctgggttatgatgttgattttgggcatatggaaactgtctcgttgatatctgcaccaaagtatcctgagaagcaggttggttatattgtgacatcttgcttactgaatgagaataacgatttcttaagaatggtaataaatacagtaaggaatgacataatcggacgaaatgagaccttccagtgcttagcattgacaatggtaggtaacattggtgggaaagaattttctgagtcactagccccagatgttcagaaacttcttatttcaagcagttgccgtcctgttgtcagaaagaaggctgctctatgccttctgcggctttataggaagaatcctgatgttgtgaatattgatggctgggctgatcgaatggcacaacttctagatgagcgtgatctaggtgtgctgacatctgtcatgagtctttttgtttcactagtatccaacaattctgaagcatattggaattgtcttccaaaatgtgtaagaatattggagagattagcaagaaatcaagatattccacaagagtacacttattatggaattccatctccttggcttcaggttaagacaatgagagctcttcagtacttccctaccattgaagatcccaacgcaagacgggctttgtttgaggttttacagcgtattttgatgggtactgatgttgttaaaaatgttaacaagaacaatgcctcacatgctgttctctttgaagctcttgctctggtcatgcatctggatgctgagaaggagatgatgtcacagtgtgtggctcttcttgggaagtttattgcagtccgggagccaaacattcggtacctcggtctggaaaacatgactaggatgctgttagtaacagatgtgcaggatatcattagaaggcaccaggcccagatcattacatctttgaaggatccagatatcagcattagacggagggctcttgatttattatatggcatgtgtgatgttacaaacgcgaaagaaattgttgaggagttgttgcagtaccttgatacagctgaatttgcaatgcgtgaagagttgtctctgaaggcagctattcttgcagaaaaatttgctccacaactattgtgggtgagacttccaccttgccttgccctcgcgtgtaaggcgtctgctgaggcgtggggcgtcctcggg

SEQ ID NO: 85012 - DNA, 1391 bp, Zea Mays
cgacgaccgccgcggtcgaaccaaaacagcttcctcctcccggcgtcgcctccgcgacgatcctttccgccgccccatagggttctgctgctcccgatccgggcgccagatctcgcgtggcgacgcgcggatctcggatttctctagaggcggcggcggcggcggccggagcaggaggagatggcgctctcggggatgcgggggctctcggtcttcatcagcgacgtacgcaactgccacaacaaggagcaggagcgcctccgcgtcgacaaggagctcggcaacatccgtacgcggttcaaaaacgagaagggcttgtcaccatacgagaagaaaaaatatgtatggaaaatgctttacatttatatgctgggttatgatgttgattttgggcatatggaaactgtctcgttgatatctgcaccaaagtatcctgagaagcaggtaggtaacattggtgggaaagaattttctgagtcactagccccagatgttcagaaacttcttatttcaagcagttgccgtcctgttgtcagaaagaaggctgctctatgccttctgcggctttataggaagaatcctgatgttgtgaatattgatggctgggctgatcgaatggcacaacttctagatgagcgtgatctaggtgtgctgacatctgtcatgagtctttttgtttcactagtatccaacaattctgaagcatattggaattgtcttccaaaatgtgtaagaatattggagagattagcaagaaatcaagatattccacaagagtacacttattatggaattccatctccttggcttcaggttaagacaatgagagctcttcagtacttccctaccattgaagatcccaacgcaagacgggctttgtttgaggttttacagcgtattttgatgggtactgatgttgttaaaaatgttaacaagaacaatgcctcacatgctgttctctttgaagctcttgctctggtcatgcatctggatgctgagaaggagatgatgtcacagtgtgtggctcttcttgggaagtttattgcagtccgggagccaaacattcggtacctcggtctggaaaacatgactaggatgctgttagtaacagatgtgcaggatatcattagaaggcaccaggcccagatcattacatctttgaaggatccagatatcagcattagacggagggctcttgatttattatatggcatgtgtgatgttacaaacgcgaaagaaattgttgaggagttgttgcagtaccttgatacagctgaatttgcaatgcgtgaagagttgtctctgaaggcagctattcttgcagaaaaatttgctccacaactattgtggtaagattttgatcacaggatctgccaattctccagctacta

SEQ ID NO: 85013 - DNA, 1519 bp, Zea Mays
cagaaacgagcgaaaaagcgtccccgatccagcacagacagacacacaccggaaggaggcgcaccttcccccagccccactatacgacgaccgccgcggtcgaaccaaaacagcttcctcctcccggcgtcgcctccgcgacgatcctttccgccgccccatagggttctgctgctcccgatccgggcgccagatctcgcgtggcgacgcgcggatctcggatttctctagaggcggcggcggcggcggccggagcaggaggagatggcgctctcggggatgcgggggctctcggtcttcatcagcgacgtacgcaactgccacaacaaggagcaggagcgcctccgcgtcgacaaggagctcggcaacatccgtacgcggttcaaaaacgagaagggcttgtcaccatacgagaagaaaaaatatgtatggaaaatgctttacatttatatgctgggttatgatgttgattttgggcatatggaaactgtctcgttgatatctgcaccaaagtatcctgagaagcaggttggttatattgtgacatcttgcttactgaatgagaataacgatttcttaagaatggtaataaatacagtaaggaatgacataatcggacgaaatgagaccttccagtgcttagcattgacaatggtaggtaacattggtgggaaagaattttctgagtcactagccccagatgttcagaaacttcttatttcaagcagttgccgtcctgttgtcagaaagaaggctgctctatgccttctgcggctttataggaagaatcctgatgttgtgaatattgatggctgggctgatcgaatggcacaacttctagatgagcgtgatctaggtgtgctgacatctgtcatgagtctttttgtttcactagtatccaacaattctgaagcatattggaattgtcttccaaaatgtgtaagaatattggagagattagcaagaaatcaagatattccacaagagtacacttattatggaattccatctccttggcttcaggttaagacaatgagagctcttcagtacttccctaccattgaagatcccaacgcaagacgggctttgtttgaggttttacagcgtattttgatgggtactgatgttgttaaaaatgttaacaagaacaatgcctcacatgctgttctctttgaagctcttgctctggtcatgcatctggatgctgagaaggagatgatgtcacagtgtgtggctcttcttgggaagtttattgcagtccgggagccaaacattcggtacctcggtctggaaaacatgactaggatgctgttagtaacagatgtgcaggatatcattagaaggcaccaggcccagatcattacatctttgaaggatccagatatcagtaccttgatacagctgaatttgcaatgcgtgaagagttgtctctgaaggcagctattcttgcagaaaaatttgctccacaactattgtggtaagattttgatcacaggatctgccaattctccagctacta

SEQ ID NO: 85014 - DNA, 2191 bp, Zea Mays
ttaccgccaaaaatgaagactaagccatactccatcacattgttgggtttcaaaccttcactgatcatgatattcacattcacaggcactgggcaccaactcatgataagaaattactcgctcaagttctccatttgcagtttcatggtagagaagtgcactcgttgtgtttcataaatccagcaagccattcagatcctgagaatagctcagatctgttgatagcaaccgggtgtgaagatggaactgtgcgccttacaggatttttgactggtagttctggaaaatggcattcctcaaagttgctaggggagcatgtaggcgggtcagctgtgcgagctacatgcttcataccagagacctacacagtaacatataattcatgtaactacagttcgaacggtatttctgatggcattgctgttgaaaaagacgagactttcttactcatatctgttggatcaaagcaagtcctcactacttggattttgcaaccgaggaatgcagaaaacagacaagtatattcaagtggcttagatattgactccaagcaaaactccagaaacttggaaaacgttgattcagccatgtcatttcaatggctaactacccacatgccaccaaagcttcctaggaacagactgaaatctggccacataaaacagagggttgaggaaggaaatttttctgttgttcagccaaatatggacgttatggatcacatggaaaatgactggcgttacctttctgttacagcatttcatttgaagcatccggttctcagcaggttgacagtatgttttgttgctgttgcttgctcggatgcaacagttgtgctccgtgctcttctgttaccttctcgattgtggtttgacgttgccttcttggttccacatgcatcaccagttttggtgctgcggcatattatcatcaatgctagccactataaagatgatgctggagacagataccttattgcgagtggatcaacagatggtagcatcactttttggaacctgacagagaccattcatggcttcatgcaactaatatcagagactcaaccacatatgagtattgattatcaaaagcgtcccaggacaggaagagggagtcaaggtggtcgtctccggtggagatcactgtcatacgcttcgaagaagagagatggagatatgtcatcctctgacggaagcaacccgggtagcctaaacactgctgaaaattcatctgaagcttctggtgtggaaaacactcagattgtagtgcatgaagcaagtgacagctcaaaaactgagatgccttcaagtacccagtcatgtgatatacctgaattgagaccaatgcactcgttatccggtgttcaccagtcaggcgttaattgcctccacatatcattctcaacacctgacaagtcatactgcattataagtggtggagatgatcaatctgttcagcgcttcaacttcagagtaatatcttcggaggattgcttaacaaccccagcaaggctaaattcgcatgacaatgacacacttaaaattctatatcaacataaggtagcatcagctcatagtgcagcagttaaaggaatctggacagacggcacttggtcgttctctactggccttgatcagagagtaagatgctggaagatgggattagccggccaattcacggaatactcccatgctatcattagcgtgcccgagcctgaaactctagatgttttccatgaccgggcaaagaggaagtaccacattgctgttgctggaaggggtatgcaaatggtcgagttctcaccacctgaagatgattgactacaatgattgcaacccctgctatggatgtcacatggatgttgattttgctcggcttgcgtggatcatgtagttctatactgagacggttttttttaaaaaaaaaatggttaaggatgtaacaaacagagaatttgatgtgttatcaggctatgacaaacagatcctacatatacacatataaaacactgttttgcatttgcaatgtataatgtactatttacagagtggagtttcaaatgagggattgagatgagtaagctgctagagatagtcttagaaacgtttggtgcgcaggggagcactgtagcagggaagtgtggcctgacgatacgtaaactgttgagatcatcgttgatgagagaataata

SEQ ID NO: 85015 - DNA, 4515 bp, Zea Mays
ccaaacctaactgacattcgagcaatcgagcggcagccgtcgccgtcaattccaagcagcctacgccgcctcgccgatggccgccggcggccacctccgcccgggctcctacctgggggacgtatcagcgctctccttgctcccctcctcgccgcaccctctcctcctcgccgggactggatcgcagctgctcttgtacgaggtgggcgctgccaggctcgttgcgtcgttccgagtgttcgacggggtgcgcgtccacggcatcgagccccggagcggaggccccggctgtcacagctacacgcttgcgttgtttggcgagaggagggtgaagctattctccctcggattcggtgttgaagcagatggcggtgaggcgcggctggagctggagcagaggctcccggggtttgaccattgggtgctcgacactcgtttccttgaggtcgatgggctgcttgcgattggtctgagtgacaattcagtagcgctgtgggatctgagcaagcgtgcgttggttacccgagtgaagtctccagagaagtgccttctgtattccatgagaatgtggggagactctgttagagagtttcttgtggcatccgggaccattttaaacgagattctcatatggaaattggcaccgcaagttctgggatcctccatggtatgctccaatgaaggaaatacttctgatgtaaacagtcccaaaattatgaatcctgatgatagtcagcacatggcagttcatcttggtaggctcaaggagcatgaaggctcaatattccgaatagcttggtcctctgatggatcaaagtttatgtctgtttctgatgacctgctcgcgtgtggactttgagtttcaaatcacagggtttcgccaatcatacagccagtcacgacaatgttgaaattataccaaaactcacactttttggccatagtgctaggatatgggactgctatgtttctgattctatggttataactgctggtgaggattgtacttgttgcatttggggaatggatgggaagcttatcaagatgttcaaagaacacattggacgaggaatatggcgatgtttatttgacccaagctcactgcttgtggtcaccgctgggtttgattcagcaatcaaagtgcaccatctatgcaactccatttttcatgacatagtggacgataaaaaggtctctggcctgaactatgattctgagatctttgtagtatcctctccttctgtttcggggcagtatggtcccctggataggtgtgatgtacttctttatggtttcacaaattacatggtacctctatctctcatcttgtgacagtggaattgtttattcattggttcatcacagcaaaagcgagtatgttcgctgtctacactttgcagaagaaaatgttctgtatgttgccacaaataatggatatctgcgtcaggccaaactctctaacatagaggatgtaagatggactaagattattcaggtcactgagaaagcaccagttatctgcatggatgtcttgacaacatactcaaacctttctttgaatagggaggacataattgcccttggagatggacggggaaatgttactattgtccgtttaaccagtagcagcagtgaacctaaactagacctatcttttacctggtcagcagaaaaagataggcaactactaggagtgtactggtgcaaggctcttgaatgtagccacattttcacagctgatcctaggggtgtgcttaagttgtggaacataagaaatgtcctgttctcaagtactgatattatcaatgcacctcagatgtttccacctgtagcagtgtttgaaccgtcctttggagctcgaattatgtgtctagatgcatctcctgaagaggagatccttatagctggtgataaaaagggtaacatcacagcctatcctttccctaaaatattggtactgcatgacagtggtctgatgcaacagaagatgcttccatgttgtcgctttaaaggagctcatggcatttctagtgtcacgagtgttcatatagaagactccacttctgatcatattgaaattcacactaccgggggagatggttgcatttgctttttcaagtatggaagaattgcacaaaagattgaattttttggaatgaggcaagtaaaagaactgggcaccattcaatccatctacactaatcttgcatctgagagccaatctagtagtacctacgcaataggtttcacctctgcagattttatcatttgggaccttgagaatgaaacaaagatggctcaagtatcctgtggtggctggcggcgcccttattcttattatcttgggacagtccctgaatatcagaactgctttgcctttgtaaaggatcatgatattcacattcacaggcactgggcaccaactcatgataagaaattactcgctcaagttctccatttgcagtttcatggtagagaagtgcactcgttgtgtttcataaatccagcaagccattcagatcctgagaatagctcagatctgttgatagcaaccgggtgtgaagatggaactgtgcgccttacaggatttttgactggtagttctggaaaatggcattcctcaaagttgctaggggagcatgtaggcgggtcagctgtgcgagctacatgcttcataccagagacctacacagtaacatataattcatgtaactacagttcgaacggtatttctgatggcattgctgttgaaaaagacgagactttcttactcatatctgttggatcaaagcaagtcctcactacttggattttgcaaccgaggaatgcagaaaacagacaagtatattcaagtggcttagatattgactccaagcaaaactccagaaacttggaaaacgttgattcagccatgtcatttcaatggctaactacccacatgccaccaaagcttcctaggaacagactgaaatctggccacataaaacagagggttgaggaaggaaatttttctgttgttcagccaaatatggacgttatggatcacatggaaaatgactggcgttacctttctgttacagcatttcatttgaagcatccggttctcagcaggttgacagtatgttttgttgctgttgcttgctcggatgcaacagttgtgctccgtgctcttctgttaccttctcgattgtggtttgacgttgccttcttggttccacatgcatcaccagttttggtgctgcggcatattatcatcaatgctagccactataaagatgatgctggagacagataccttattgcgagtggatcaacagatggtagcatcactttttggaacctgacagagaccattcatggcttcatgcaactaatatcagagactcaaccacatatgagtattgattatcaaaagcgtcccaggacaggaagagggagtcaaggtggtcgtctccggtggagatcactgtcatacgcttcgaagaagagagatggagatatgtcatcctctgacggaagcaacccgggtagcctaaacactgctgaaaattcatctgaagcttctggtgtggaaaacactcagattgtagtgcatgaagcaagtgacagctcaaaaactgagatgccttcaagtacccagtcatgtgatatacctgaattgagaccaatgcactcgttatccggtgttcaccagtcaggcgttaattgcctccacatatcattctcaacacctgacaagtcatactgcattataagtggtggagatgatcaatctgttcagcgcttcaacttcagagtaatatcttcggaggattgcttaacaaccccagcaaggctaaattcgcatgacaatgacacacttaaaattctatatcaacataaggtagcatcagctcatagtgcagcagttaaaggaatctggacagacggcacttggtcgttctctactggccttgatcagagagtaagatgctggaagatgggattagccggccaattcacggaatactcccatgctatcattagcgtgcccgagcctgaaactctagatgttttccatgaccgggcaaagaggaagtaccacattgctgttgctggaaggggtatgcaaatggtcgagttctcaccacctgaagatgattgactacaatgattgcaacccctgctatggatgtcacatggatgttgattttgctcggcttgcgtggatcatgtagttctatactgagacggttttttttaaaaaaaaaatggttaaggatgtaacaaacagagaatttgatgtgttatcaggctatgacaaacagatcctacatatacacatataaaacactgttttgcatttgcaatgtataatgtactatttacagagtggagtttcaaatgagggattgagatgagtaagctgctagagatagtcttagaaacgtttggtgcgcaggggagcactgtagcagggaagtgtggcctgacgatacgtaaactgttgagatcatcgttgatgagagaataata

SEQ ID NO: 85016 - DNA, 4933 bp, Zea Mays
ccaaacctaactgacattcgagcaatcgagcggcagccgtcgccgtcaattccaagcagcctacgccgcctcgccgatggccgccggcggccacctccgcccgggctcctacctgggggacgtatcagcgctctccttgctcccctcctcgccgcaccctctcctcctcgccgggactggatcgcagctgctcttgtacgaggtgggcgctgccaggctcgttgcgtcgttccgagtgttcgacggggtgcgcgtccacggcatcgagccccggagcggaggccccggctgtcacagctacacgcttgcgttgtttggcgagaggagggtgaagctattctccctcggattcggtgttgaagcagatggcggtgaggcgcggctggagctggagcagaggctcccggggtttgaccattgggtgctcgacactcgtttccttgaggtcgatgggctgcttgcgattggtctgagtgacaattcagtagcgctgtgggatctgagcaagcgtgcgttggttacccgagtgaagtctccagagaagtgccttctgtattccatgagaatgtggggagactctgttagagagtttcttgtggcatccgggaccattttaaacgagattctcatatggaaattggcaccgcaagttctgggatcctccatggtatgctccaatgaaggaaatacttctgatgtaaacagtcccaaaattatgaatcctgatgatagtcagcacatggcagttcatcttggtaggctcaaggagcatgaaggctcaatattccgaatagcttggtcctctgatggatcaaagtttatgtctgtttctgatgaccgtagtgctcgcgtgtggactttgagtttcaaatcacagggtttcgccaatcatacagccagtcacgacaatgttgaaattataccaaaactcacactttttggccatagtgctaggatatgggactgctatgtttctgattctatggttataactgctggtgaggattgtacttgttgcatttggggaatggatgggaagcttatcaagatgttcaaagaacacattggacgaggaatatggcgatgtttatttgacccaagctcactgcttgtggtcaccgctgggtttgattcagcaatcaaagtgcaccatctatgcaactccatttttcatgacatagtggacgataaaaaggtctctggcctgaactatgattctgagatctttgtagtatcctctccttctgtttcggggcagtatggtcccctggatagcaaaagcgagtatgttcgctgtctacactttgcagaagaaaatgttctgtatgttgccacaaataatggatatctgcgtcaggccaaactctctaacatagaggatggaggacataattgcccttggagatggacggggaaatgttactattgtccgtttaaccagtagcagcagtgaacctaaactagacctatcttttacctggtcagcagaaaaagataggcaactactaggagtgtactggtgcaaggctcttgaatccacattttcacagctgatcctaggggtgtgcttaagttgtggaacataagaaatgtcctgttctcaagtactgatattatcaatgcacctcagatgtttccacctgtagcagtgtttgaaccgtcctttggagctcgaattatgtgtctagatgcatctcctgaagaggaggtgatgatcttaaagcatgctggattttcagatgaagacaaaatcacaaattcttattgatagaatcctttgtgtgaacattatgcattagtaactaggagtacaatgataatgtttgtatatctaggattagccaacagaagaatgatgataataaggaagctttaaattgtaagctgtagcttggaagctaaaagaggatgatatgatacagccctgttggggagaaaacatcattatcaatttaccatttaactgctaattagttgaacatctcataaaaggccacttcaatttattcagcaccttatctgccatcacaaacgttctaatcccttttatgccacccggatgcaatttcttaccctttcatatcattgtcagttgttggtccacacttagttggatcctgacggactgggtaaaatgacaaaatcacaaatgtcctaatcccctctatgccactcgagtgcaattttttattcttctatactatcgccgtcagtccatagttagtttgactctgatggcggtggcatggaagggtaagaaattacatccaagtggcatagaaaggattttgacattttttatgacaaataagatccttatagctggtgataaaaagggtaacatcacagcctatcctttccctaaaatattggtactgcatgacagtggtctgatgcaacagaagatgcttccatgttgtcgctttaaaggagctcatggcatttctagtgtcacgagtgttcatatagaagactccacttctgatcatattgaaattcacactaccgggggagatggttgcatttgctttttcaagtatggaagaattgcacaaaagattgaattttttggaatgaggcaagtaaaagaactgggcaccattcaatccatctacactaatcttgcatctgagagccaatctagtagtacctacgcaataggtttcacctctgcagattttatcatttgggaccttgagaatgaaacaaagatggctcaagtatcctgtggtggctggcggcgcccttattcttattatcttgggacagtccctgaatatcagaactgctttgcctttgtaaaggatcatgatattcacattcacaggcactgggcaccaactcatgataagaaattactcgctcaagttctccatttgcagtttcatggtagagaagtgcactcgttgtgtttcataaatccagcaagccattcagatcctgagaatagctcagatctgttgatagcaaccgggtgtgaagatggaactgtgcgccttacaggatttttgactggtagttctggaaaatggcattcctcaaagttgctaggggagcatgtaggcgggtcagctgtgcgagctacatgcttcataccagagacctacacagtaacatataattcatgtaactacagttcgaacggtatttctgatggcattgctgttgaaaaagacgagactttcttactcatatctgttggatcaaagcaagtcctcactacttggattttgcaaccgaggaatgcagaaaacagacaagtatattcaagtggcttagatattgactccaagcaaaactccagaaacttggaaaacgttgattcagccatgtcatttcaatggctaactacccacatgccaccaaagcttcctaggaacagactgaaatctggccacataaaacagagggttgaggaaggaaatttttctgttgttcagccaaatatggacgttatggatcacatggaaaatgactggcgttacctttctgttacagcatttcatttgaagcatccggttctcagcaggttgacagtatgttttgttgctgttgcttgctcggatgcaacagttgtgctccgtgctcttctgttaccttctcgattgtggtttgacgttgccttcttggttccacatgcatcaccagttttggtgctgcggcatattatcatcaatgctagccactataaagatgatgctggagacagataccttattgcgagtggatcaacagatggtagcatcactttttggaacctgacagagaccattcatggcttcatgcaactaatatcagagactcaaccacatatgagtattgattatcaaaagcgtcccaggacaggaagagggagtcaaggtggtcgtctccggtggagatcactgtcatacgcttcgaagaagagagatggagatatgtcatcctctgacggaagcaacccgggtagcctaaacactgctgaaaattcatctgaagcttctggtgtggaaaacactcagattgtagtgcatgaagcaagtgacagctcaaaaactgagatgccttcaagtacccagtcatgtgatatacctgaattgagaccaatgcactcgttatccggtgttcaccagtcaggcgttaattgcctccacatatcattctcaacacctgacaagtcatactgcattataagtggtggagatgatcaatctgttcagcgcttcaacttcagagtaatatcttcggaggattgcttaacaaccccagcaaggctaaattcgcatgacaatgacacacttaaaattctatatcaacataaggtagcatcagctcatagtgcagcagttaaaggaatctggacagacggcacttggtcgttctctactggccttgatcagagagtaagatgctggaagatgggattagccggccaattcacggaatactcccatgctatcattagcgtgcccgagcctgaaactctagatgttttccatgaccgggcaaagaggaagtaccacattgctgttgctggaaggggtatgcaaatggtcgagttctcaccacctgaagatgattgactacaatgattgcaacccctgctatggatgtcacatggatgttgattttgctcggcttgcgtggatcatgtagttctatactgagacggttttttttaaaaaaaaaatggttaaggatgtaacaaacagagaatttgatgtgttatcaggctatgacaaacagatcctacatatacacatataaaacactgttttgcatttgcaatgtataatgtactatttacagagtggagtttcaaatgagggattgagatgagtaagctgctagagatagtcttagaaacgtttggtgcgcaggggagcactgtagcagggaagtgtggcctgacgatacgtaaactgttgagatcatcgttgatgagagaataata

SEQ ID NO: 85017 - DNA, 4253 bp, Zea Mays
ccaaacctaactgacattcgagcaatcgagcggcagccgtcgccgtcaattccaagcagcctacgccgcctcgccgatggccgccggcggccacctccgcccgggctcctacctgggggacgtatcagcgctctccttgctcccctcctcgccgcaccctctcctcctcgccgggactggatcgcagctgctcttgtacgaggtgggcgctgccaggctcgttgcgtcgttccgagtgttcgacggggtgcgcgtccacggcatcgagccccggagcggaggccccggctgtcacagctacacgcttgcgttgtttggcgagaggagggtgaagctattctccctcggattcggtgttgaagcagatggcggtgaggcgcggctggagctggagcagaggctcccggggtttgaccattgggtgctcgacactcgtttccttgaggtcgatgggctgcttgcgattggtctgagtgacaattcagtagcgctgtgggatctgagcaagcgtgcgttggttacccgagtgaagtctccagagaagtgccttctgtattccatgagaatgtggggagactctgttagagagtttcttgtggcatccgggaccattttaaacgagattctcatatggaaattggcaccgcaagttctgggatcctccatggtatgctccaatgaaggaaatacttctgatgtaaacagtcccaaaattatgaatcctgatgatagtcagcacatggcagttcatcttggtaggctcaaggagcatgaaggctcaatattccgaatagcttggtcctctgatggatcaaagtttatgtctgtttctgatgaccgtagtgctcgcgtgtggactttgagtttcaaatcacagggtttcgccaatcatacagccagtcacgacaatgttgaaattataccaaaactcacactttttggccatagtgctaggatatgggactgctatgtttctgattctatggttataactgctggtgaggattgtacttgttgcatttggggaatggatgggaagcttatcaagatgttcaaagaacacattggacgaggaatatggcgatgtttatttgacccaagctcactgcttgtggtcaccgctgggtttgattcagcaatcaaagtgcaccatctatgcaactccatttttcatgacatagtggacgataaaaagcaaaagcgagtatgttcgctgtctacactttgcagaagaaaatgttctgtatgttgccacaaataatggatatctgcgtcaggccaaactctctaacatagaggatggaggacataattgcccttggagatggacggggaaatgttactattgtccgtttaaccagtagcagcagtgaacctaaactagacctatcttttacctggtcagcagaaaaagataggcaactactaggagtgtactggtgcaaggctcttgaatgtagccacattttcacagctgatcctaggggtgtgcttaagttgtggaacataagaaatgtcctgttctcaagtactgatattatcaatgcacctcagatgtttccacctgtagcagtgtttgaaccgtcctttggagctcgaattatgtgtctagatgcatctcctgaagaggagatccttatagctggtgataaaaagggtaacatcacagcctatcctttccctaaaatattggtactgcatgacagtggtctgatgcaacagaagatgcttccatgttgtcgctttaaaggagctcatggcatttctagtgtcacgagtgttcatatagaagactccacttctgatcatattgaaattcacactaccgggggagatggttgcatttgctttttcaagtatggaagaattgcacaaaagattgaattttttggaatgaggcaagtaaaagaactgggcaccattcaatccatctacactaatcttgcatctgagagccaatctagtagtacctacgcaataggtttcacctctgcagattttatcatttgggaccttgagaatgaaacaaagatggctcaagtatcctgtggtggctggcggcgcccttattcttattatcttgggacagtccctgaatatcagaactgctttgcctttgtaaaggatcatgatattcacattcacaggcactgggcaccaactcatgataagaaattactcgctcaagttctccatttgcagtttcatggtagagaagtgcactcgttgtgtttcataaatccagcaagccattcagatcctgagaatagctcagatctgttgatagcaaccgggtgtgaagatggaactgtgcgccttacaggatttttgactggtagttctggaaaatggcattcctcaaagttgctaggggagcatgtaggcgggtcagctgtgcgagctacatgcttcataccagagacctacacagtaacatataattcatgtaactacagttcgaacggtatttctgatggcattgctgttgaaaaagacgagactttcttactcatatctgttggatcaaagcaagtcctcactacttggattttgcaaccgaggaatgcagaaaacagacaagtatattcaagtggcttagatattgactccaagcaaaactccagaaacttggaaaacgttgattcagccatgtcatttcaatggctaactacccacatgccaccaaagcttcctaggaacagactgaaatctggccacataaaacagagggttgaggaaggaaatttttctgttgttcagccaaatatggacgttatggatcacatggaaaatgactggcgttacctttctgttacagcatttcatttgaagcatccggttctcagcaggttgacagtatgttttgttgctgttgcttgctcggatgcaacagttgtgctccgtgctcttctgttaccttctcgattgtggtttgacgttgccttcttggttccacatgcatcaccagttttggtgctgcggcatattatcatcaatgctagccactataaagatgatgctggagacagataccttattgcgagtggatcaacagatggtagcatcactttttggaacctgacagagaccattcatggcttcatgcaactaatatcagagactcaaccacatatgagtattgattatcaaaagcgtcccaggacaggaagagggagtcaaggtggtcgtctccggtggagatcactgtcatacgcttcgaagaagagagatggagatatgtcatcctctgacggaagcaacccgggtagcctaaacactgctgaaaattcatctgaagcttctggtgtggaaaacactcagattgtagtgcatgaagcaagtgacagctcaaaaactgagatgccttcaagtacccagtcatgtgatatacctgaattgagaccaatgcactcgttatccggtgttcaccagtcaggcgttaattgcctccacatatcattctcaacacctgacaagtcatactgcattataagtggtggagatgatcaatctgttcagcgcttcaacttcagagtaatatcttcggaggattgcttaacaaccccagcaaggctaaattcgcatgacaatgacacacttaaaattctatatcaacataaggtagcatcagctcatagtgcagcagttaaaggaatctggacagacggcacttggtcgttctctactggccttgatcagagagtaagatgctggaagatgggattagccggccaattcacggaatactcccatgctatcattagcgtgcccgagcctgaaactctagatgttttccatgaccgggcaaagaggaagtaccacattgctgttgctggaaggggtatgcaaatggtcgagttctcaccacctgaagatgattgactacaatgattgcaacccctgctatggatgtcacatggatgttgattttgctcggcttgcgtggatcatgtagttctatactgagacggttttttttaaaaaaaaaatggttaaggatgtaacaaacagagaatttgatgtgttatcaggctatgacaaacagatcctacatatacacatataaaacactgttttgcatttgcaatgtataatgtactatttacagagtggagtttcaaatgagggattgagatgagtaagctgctagagatagtcttagaaacgtttggtgcgcaggggagcactgtagcagggaagtgtggcctgacgatacgtaaactgttgagatcatcgttgatgagagaataata

SEQ ID NO: 85018 - DNA, 4341 bp, Zea Mays
ccaaacctaactgacattcgagcaatcgagcggcagccgtcgccgtcaattccaagcagcctacgccgcctcgccgatggccgccggcggccacctccgcccgggctcctacctgggggacgtatcagcgctctccttgctcccctcctcgccgcaccctctcctcctcgccgggactggatcgcagctgctcttgtacgaggtgggcgctgccaggctcgttgcgtcgttccgagtgttcgacggggtgcgcgtccacggcatcgagccccggagcggaggccccggctgtcacagctacacgcttgcgttgtttggcgagaggagggtgaagctattctccctcggattcggtgttgaagcagatggcggtgaggcgcggctggagctggagcagaggctcccggggtttgaccattgggtgctcgacactcgtttccttgaggtcgatgggctgcttgcgattggtctgagtgacaattcagtagcgctgtgggatctgagcaagcgtgcgttggttacccgagtgaagtctccagagaagtgccttctgtattccatgagaatgtggggagactctgttagagagtttcttgtggcatccgggaccattttaaacgagattctcatatggaaattggcaccgcaagttctgggatcctccatggtatgctccaatgaaggaaatacttctgatgtaaacagtcccaaaattatgaatcctgatgatagtcagcacatggcagttcatcttggtaggctcaaggagcatgaaggctcaatattccgaatagcttggtcctctgatggatcaaagtttatgtctgtttctgatgaccgtagtgctcgcgtgtggactttgagtttcaaatcacagggtttcgccaatcatacagccagtcacgacaatgttgaaattataccaaaactcacactttttggccatagtgctaggatatgggactgctatgtttctgattctatggttataactgctggtgaggattgtacttgttgcatttggggaatggatgggaagcttatcaagatgttcaaagaacacattggacgaggaatatggcgatgtttatttgacccaagctcactgcttgtggtcaccgctgggtttgattcagcaatcaaagtgcaccatctatgcaactccatttttcatgacatagtggacgataaaaagcaaaagcgagtatgttcgctgtctacactttgcagaagaaaatgttctgtatgttgccacaaataatggatatctgcgtcaggccaaactctctaacatagaggatgtaagatggactaagattattcaggtcactgagaaagcaccagttatctgcatggatgtcttgacaacatactcaaacctttctttgaatagggaggacataattgcccttggagatggacggggaaatgttactattgtccgtttaaccagtagcagcagtgaacctaaactagacctatcttttacctggtcagcagaaaaagataggcaactactaggagtgtactggtgcaaggctcttgaatccacattttcacagctgatcctaggggtgtgcttaagttgtggaacataagaaatgtcctgttctcaagtactgatattatcaatgcacctcagatgtttccacctgtagcagtgtttgaaccgtcctttggagctcgaattatgtgtctagatgcatctcctgaagaggagatccttatagctggtgataaaaagggtaacatcacagcctatcctttccctaaaatattggtactgcatgacagtggtctgatgcaacagaagatgcttccatgttgtcgctttaaaggagctcatggcatttctagtgtcacgagtgttcatatagaagactccacttctgatcatattgaaattcacactaccgggggagatggttgcatttgctttttcaagtatggaagaattgcacaaaagattgaattttttggaatgaggcaagtaaaagaactgggcaccattcaatccatctacactaatcttgcatctgagagccaatctagtagtacctacgcaataggtttcacctctgcagattttatcatttgggaccttgagaatgaaacaaagatggctcaagtatcctgtggtggctggcggcgcccttattcttattatcttgggacagtccctgaatatcagaactgctttgcctttgtaaaggatcatgatattcacattcacaggcactgggcaccaactcatgataagaaattactcgctcaagttctccatttgcagtttcatggtagagaagtgcactcgttgtgtttcataaatccagcaagccattcagatcctgagaatagctcagatctgttgatagcaaccgggtgtgaagatggaactgtgcgccttacaggatttttgactggtagttctggaaaatggcattcctcaaagttgctaggggagcatgtaggcgggtcagctgtgcgagctacatgcttcataccagagacctacacagtaacatataattcatgtaactacagttcgaacggtatttctgatggcattgctgttgaaaaagacgagactttcttactcatatctgttggatcaaagcaagtcctcactacttggattttgcaaccgaggaatgcagaaaacagacaagtatattcaagtggcttagatattgactccaagcaaaactccagaaacttggaaaacgttgattcagccatgtcatttcaatggctaactacccacatgccaccaaagcttcctaggaacagactgaaatctggccacataaaacagagggttgaggaaggaaatttttctgttgttcagccaaatatggacgttatggatcacatggaaaatgactggcgttacctttctgttacagcatttcatttgaagcatccggttctcagcaggttgacagtatgttttgttgctgttgcttgctcggatgcaacagttgtgctccgtgctcttctgttaccttctcgattgtggtttgacgttgccttcttggttccacatgcatcaccagttttggtgctgcggcatattatcatcaatgctagccactataaagatgatgctggagacagataccttattgcgagtggatcaacagatggtagcatcactttttggaacctgacagagaccattcatggcttcatgcaactaatatcagagactcaaccacatatgagtattgattatcaaaagcgtcccaggacaggaagagggagtcaaggtggtcgtctccggtggagatcactgtcatacgcttcgaagaagagagatggagatatgtcatcctctgacggaagcaacccgggtagcctaaacactgctgaaaattcatctgaagcttctggtgtggaaaacactcagattgtagtgcatgaagcaagtgacagctcaaaaactgagatgccttcaagtacccagtcatgtgatatacctgaattgagaccaatgcactcgttatccggtgttcaccagtcaggcgttaattgcctccacatatcattctcaacacctgacaagtcatactgcattataagtggtggagatgatcaatctgttcagcgcttcaacttcagagtaatatcttcggaggattgcttaacaaccccagcaaggctaaattcgcatgacaatgacacacttaaaattctatatcaacataaggtagcatcagctcatagtgcagcagttaaaggaatctggacagacggcacttggtcgttctctactggccttgatcagagagtaagatgctggaagatgggattagccggccaattcacggaatactcccatgctatcattagcgtgcccgagcctgaaactctagatgttttccatgaccgggcaaagaggaagtaccacattgctgttgctggaaggggtatgcaaatggtcgagttctcaccacctgaagatgattgactacaatgattgcaacccctgctatggatgtcacatggatgttgattttgctcggcttgcgtggatcatgtagttctatactgagacggttttttttaaaaaaaaaatggttaaggatgtaacaaacagagaatttgatgtgttatcaggctatgacaaacagatcctacatatacacatataaaacactgttttgcatttgcaatgtataatgtactatttacagagtggagtttcaaatgagggattgagatgagtaagctgctagagatagtcttagaaacgtttggtgcgcaggggagcactgtagcagggaagtgtggcctgacgatacgtaaactgttgagatcatcgttgatgagagaataata

SEQ ID NO: 85019 - DNA, 4326 bp, Zea Mays
ccaaacctaactgacattcgagcaatcgagcggcagccgtcgccgtcaattccaagcagcctacgccgcctcgccgatggccgccggcggccacctccgcccgggctcctacctgggggacgtatcagcgctctccttgctcccctcctcgccgcaccctctcctcctcgccgggactggatcgcagctgctcttgtacgaggtgggcgctgccaggctcgttgcgtcgttccgagtgttcgacggggtgcgcgtccacggcatcgagccccggagcggaggccccggctgtcacagctacacgcttgcgttgtttggcgagaggagggtgaagctattctccctcggattcggtgttgaagcagatggcggtgaggcgcggctggagctggagcagaggctcccggggtttgaccattgggtgctcgacactcgtttccttgaggtcgatgggctgcttgcgattggtctgagtgacaattcagtagcgctgtgggatctgagcaagcgtgcgttggttacccgagtgaagtctccagagaagtgccttctgtattccatgagaatgtggggagactctgttagagagtttcttgtggcatccgggaccattttaaacgagattctcatatggaaattggcaccgcaagttctgggatcctccatggtatgctccaatgaaggaaatacttctgatgtaaacagtcccaaaattatgaatcctgatgatagtcagcacatggcagttcatcttggtaggctcaaggagcatgaaggctcaatattccgaatagcttggtcctctgatggatcaaagtttatgtctgtttctgatgaccgtagtgctcgcgtgtggactttgagtttcaaatcacagggtttcgccaatcatacagccagtcacgacaatgttgaaattataccaaaactcacactttttggccatagtgctaggatatgggactgctatgtttctgattctatggttataactgctggtgaggattgtacttgttgcatttggggaatggatgggaagcttatcaagatgttcaaagaacacattggacgaggaatatggcgatgtttatttgacccaagctcactgcttgtggtcaccgctgggtttgattcagcaatcaaagtgcaccatctatgcaactccatttttcatgacatagtggacgataaaaaggtctctggcctgaactatgattctgagatctttgtagtatcctctccttctgtttcggggcagtatggtcccctggatagcaaaagcgagtatgttcgctgtctacactttgcagaagaaaatgttctgtatgttgccacaaataatggatatctgcgtcaggccaaactctctaacatagaggatggaggacataattgcccttggagatggacggggaaatgttactattgtccgtttaaccagtagcagcagtgaacctaaactagacctatcttttacctggtcagcagaaaaagataggcaactactaggagtgtactggtgcaaggctcttgaatccacattttcacagctgatcctaggggtgtgcttaagttgtggaacataagaaatgtcctgttctcaagtactgatattatcaatgcacctcagatgtttccacctgtagcagtgtttgaaccgtcctttggagctcgaattatgtgtctagatgcatctcctgaagaggagatccttatagctggtgataaaaagggtaacatcacagcctatcctttccctaaaatattggtactgcatgacagtggtctgatgcaacagaagatgcttccatgttgtcgctttaaaggagctcatggcatttctagtgtcacgagtgttcatatagaagactccacttctgatcatattgaaattcacactaccgggggagatggttgcatttgctttttcaagtatggaagaattgcacaaaagattgaattttttggaatgaggcaagtaaaagaactgggcaccattcaatccatctacactaatcttgcatctgagagccaatctagtagtacctacgcaataggtttcacctctgcagattttatcatttgggaccttgagaatgaaacaaagatggctcaagtatcctgtggtggctggcggcgcccttattcttattatcttgggacagtccctgaatatcagaactgctttgcctttgtaaaggatcatgatattcacattcacaggcactgggcaccaactcatgataagaaattactcgctcaagttctccatttgcagtttcatggtagagaagtgcactcgttgtgtttcataaatccagcaagccattcagatcctgagaatagctcagatctgttgatagcaaccgggtgtgaagatggaactgtgcgccttacaggatttttgactggtagttctggaaaatggcattcctcaaagttgctaggggagcatgtaggcgggtcagctgtgcgagctacatgcttcataccagagacctacacagtaacatataattcatgtaactacagttcgaacggtatttctgatggcattgctgttgaaaaagacgagactttcttactcatatctgttggatcaaagcaagtcctcactacttggattttgcaaccgaggaatgcagaaaacagacaagtatattcaagtggcttagatattgactccaagcaaaactccagaaacttggaaaacgttgattcagccatgtcatttcaatggctaactacccacatgccaccaaagcttcctaggaacagactgaaatctggccacataaaacagagggttgaggaaggaaatttttctgttgttcagccaaatatggacgttatggatcacatggaaaatgactggcgttacctttctgttacagcatttcatttgaagcatccggttctcaggttgacagtatgttttgttgctgttgcttgctcggatgcaacagttgtgctccgtgctcttctgttaccttctcgattgtggtttgacgttgccttcttggttccacatgcatcaccagttttggtgctgcggcatattatcatcaatgctagccactataaagatgatgctggagacagataccttattgcgagtggatcaacagatggtagcatcactttttggaacctgacagagaccattcatggcttcatgcaactaatatcagagactcaaccacatatgagtattgattatcaaaagcgtcccaggacaggaagagggagtcaaggtggtcgtctccggtggagatcactgtcatacgcttcgaagaagagagatggagatatgtcatcctctgacggaagcaacccgggtagcctaaacactgctgaaaattcatctgaagcttctggtgtggaaaacactcagattgtagtgcatgaagcaagtgacagctcaaaaactgagatgccttcaagtacccagtcatgtgatatacctgaattgagaccaatgcactcgttatccggtgttcaccagtcaggcgttaattgcctccacatatcattctcaacacctgacaagtcatactgcattataagtggtggagatgatcaatctgttcagcgcttcaacttcagagtaatatcttcggaggattgcttaacaaccccagcaaggctaaattcgcatgacaatgacacacttaaaattctatatcaacataaggtagcatcagctcatagtgcagcagttaaaggaatctggacagacggcacttggtcgttctctactggccttgatcagagagtaagatgctggaagatgggattagccggccaattcacggaatactcccatgctatcattagcgtgcccgagcctgaaactctagatgttttccatgaccgggcaaagaggaagtaccacattgctgttgctggaaggggtatgcaaatggtcgagttctcaccacctgaagatgattgactacaatgattgcaacccctgctatggatgtcacatggatgttgattttgctcggcttgcgtggatcatgtagttctatactgagacggttttttttaaaaaaaaaatggttaaggatgtaacaaacagagaatttgatgtgttatcaggctatgacaaacagatcctacatatacacatataaaacactgttttgcatttgcaatgtataatgtactatttacagagtggagtttcaaatgagggattgagatgagtaagctgctagagatagtcttagaaacgtttggtgcgcaggggagcactgtagcagggaagtgtggcctgacgatacgtaaactgttgagatcatcgttgatgagagaataata

SEQ ID NO: 85020 - DNA, 4268 bp, Zea Mays
agggaatgcaaatcgagcccaaacctaactgacattcgagcaatcgagcggcagccgtcgccgtcaattccaagcagcctacgccgcctcgccgatggccgccggcggccacctccgcccgggctcctacctgggggacgtatcagcgctctccttgctcccctcctcgccgcaccctctcctcctcgccgggactggatcgcagctgctcttgtacgaggtgggcgctgccaggctcgttgcgtcgttccgagtgttcgacggggtgcgcgtccacggcatcgagccccggagcggaggccccggctgtcacagctacacgcttgcgttgtttggcgagaggagggtgaagctattctccctcggattcggtgttgaagcagatggcggtgaggcgcggctggagctggagcagaggctcccggggtttgaccattgggtgctcgacactcgtttccttgaggtcgatgggctgcttgcgattggtctgagtgacaattcagtagcgctgtgggatctgagcaagcgtgcgttggttacccgagtgaagtctccagagaagtgccttctgtattccatgagaatgtggggagactctgttagagagtttcttgtggcatccgggaccattttaaacgagattctcatatggaaattggcaccgcaagttctgggatcctccatgttcatcttggtaggctcaaggagcatgaaggctcaatattccgaatagcttggtcctctgatggatcaaagtttatgtctgtttctgatgaccgtagtgctcgcgtgtggactttgagtttcaaatcacagggtttcgccaatcatacagccagtcacgacaatgttgaaattataccaaaactcacactttttggccatagtgctaggatatgggactgctatgtttctgattctatggttataactgctggtgaggattgtacttgttgcatttggggaatggatgggaagcttatcaagatgttcaaagaacacattggacgaggaatatggcgatgtttatttgacccaagctcactgcttgtggtcaccgctgggtttgattcagcaatcaaagtgcaccatctatgcaactccatttttcatgacatagtggacgataaaaaggtctctggcctgaactatgattctgagatctttgtagtatcctctccttctgtttcggggcagtatggtcccctggatagcaaaagcgagtatgttcgctgtctacactttgcagaagaaaatgttctgtatgttgccacaaataatggatatctgcgtcaggccaaactctctaacatagaggatggaggacataattgcccttggagatggacggggaaatgttactattgtccgtttaaccagtagcagcagtgaacctaaactagacctatcttttacctggtcagcagaaaaagataggcaactactaggagtgtactggtgcaaggctcttgaatccacattttcacagctgatcctaggggtgtgcttaagttgtggaacataagaaatgtcctgttctcaagtactgatattatcaatgcacctcagatgtttccacctgtagcagtgtttgaaccgtcctttggagctcgaattatgtgtctagatgcatctcctgaagaggagatccttatagctggtgataaaaagggtaacatcacagcctatcctttccctaaaatattggtactgcatgacagtggtctgatgcaacagaagatgcttccatgttgtcgctttaaaggagctcatggcatttctagtgtcacgagtgttcatatagaagactccacttctgatcatattgaaattcacactaccgggggagatggttgcatttgctttttcaagtatggaagaattgcacaaaagattgaattttttggaatgaggcaagtaaaagaactgggcaccattcaatccatctacactaatcttgcatctgagagccaatctagtagtacctacgcaataggtttcacctctgcagattttatcatttgggaccttgagaatgaaacaaagatggctcaagtatcctgtggtggctggcggcgcccttattcttattatcttgggacagtccctgaatatcagaactgctttgcctttgtaaaggatcatgatattcacattcacaggcactgggcaccaactcatgataagaaattactcgctcaagttctccatttgcagtttcatggtagagaagtgcactcgttgtgtttcataaatccagcaagccattcagatcctgagaatagctcagatctgttgatagcaaccgggtgtgaagatggaactgtgcgccttacaggatttttgactggtagttctggaaaatggcattcctcaaagttgctaggggagcatgtaggcgggtcagctgtgcgagctacatgcttcataccagagacctacacagtaacatataattcatgtaactacagttcgaacggtatttctgatggcattgctgttgaaaaagacgagactttcttactcatatctgttggatcaaagcaagtcctcactacttggattttgcaaccgaggaatgcagaaaacagacaagtatattcaagtggcttagatattgactccaagcaaaactccagaaacttggaaaacgttgattcagccatgtcatttcaatggctaactacccacatgccaccaaagcttcctaggaacagactgaaatctggccacataaaacagagggttgaggaaggaaatttttctgttgttcagccaaatatggacgttatggatcacatggaaaatgactggcgttacctttctgttacagcatttcatttgaagcatccggttctcagcaggttgacagtatgttttgttgctgttgcttgctcggatgcaacagttgtgctccgtgctcttctgttaccttctcgattgtggtttgacgttgccttcttggttccacatgcatcaccagttttggtgctgcggcatattatcatcaatgctagccactataaagatgatgctggagacagataccttattgcgagtggatcaacagatggtagcatcactttttggaacctgacagagaccattcatggcttcatgcaactaatatcagagactcaaccacatatgagtattgattatcaaaagcgtcccaggacaggaagagggagtcaaggtggtcgtctccggtggagatcactgtcatacgcttcgaagaagagagatggagatatgtcatcctctgacggaagcaacccgggtagcctaaacactgctgaaaattcatctgaagcttctggtgtggaaaacactcagattgtagtgcatgaagcaagtgacagctcaaaaactgagatgccttcaagtacccagtcatgtgatatacctgaattgagaccaatgcactcgttatccggtgttcaccagtcaggcgttaattgcctccacatatcattctcaacacctgacaagtcatactgcattataagtggtggagatgatcaatctgttcagcgcttcaacttcagagtaatatcttcggaggattgcttaacaaccccagcaaggctaaattcgcatgacaatgacacacttaaaattctatatcaacataaggtagcatcagctcatagtgcagcagttaaaggaatctggacagacggcacttggtcgttctctactggccttgatcagagagtaagatgctggaagatgggattagccggccaattcacggaatactcccatgctatcattagcgtgcccgagcctgaaactctagatgttttccatgaccgggcaaagaggaagtaccacattgctgttgctggaaggggtatgcaaatggtcgagttctcaccacctgaagatgattgactacaatgattgcaacccctgctatggatgtcacatggatgttgattttgctcggcttgcgtggatcatgtagttctatactgagacggttttttttaaaaaaaaaatggttaaggatgtaacaaacagagaatttgatgtgttatcaggctatgacaaacagatcctacatatacacatataaaacactgttttgcatttgcaatgtataatgtactatttacagagtggagtttcaaatgagggattgagatgagtaagctgctagagatagtcttagaaacgtttggtgcgcaggggagcactgtagcagggaagtgtggcctgacgatacgtaaactgttgagatcatcgttgatgagagaataata

SEQ ID NO: 85021 - DNA, 4380 bp, Zea Mays
ccaatgtttgaagggaccgatggaggttatggagggaatgcaaatcgagcccaaacctaactgacattcgagcaatcgagcggcagccgtcgccgtcaattccaagcagcctacgccgcctcgccgatggccgccggcggccacctccgcccgggctcctacctgggggacgtatcagcgctctccttgctcccctcctcgccgcaccctctcctcctcgccgggactggatcgcagctgctcttgtacgaggtgggcgctgccaggctcgttgcgtcgttccgagtgttcgacggggtgcgcgtccacggcatcgagccccggagcggaggccccggctgtcacagctacacgcttgcgttgtttggcgagaggagggtgaagctattctccctcggattcggtgttgaagcagatggcggtgaggcgcggctggagctggagcagaggctcccggggtttgaccattgggtgctcgacactcgtttccttgaggtcgatgggctgcttgcgattggtctgagtgacaattcagtagcgctgtgggatctgagcaagcgtgcgttggttacccgagtgaagtctccagagaagtgccttctgtattccatgagaatgtggggagactctgttagagagtttcttgtggcatccgggaccattttaaacgagattctcatatggaaattggcaccgcaagttctgggatcctccatggtatgctccaatgaaggaaatacttctgatgtaaacagtcccaaaattatgaatcctgatgatagtcagcacatggcagttcatcttggtaggctcaaggagcatgaaggctcaatattccgaatagcttggtcctctgatggatcaaagtttatgtctgtttctgatgaccgtagtgctcgcgtgtggactttgagtttcaaatcacagggtttcgccaatcatacagccagtcacgacaatgttgaaattataccaaaactcacactttttggccatagtgctaggatatgggactgctatgtttctgattctatggttataactgctggtgaggattgtacttgttgcatttggggaatggatgggaagcttatcaagatgttcaaagaacacattggacgaggaatatggcgatgtttatttgacccaagctcactgcttgtggtcaccgctgggtttgattcagcaatcaaagtgcaccatctatgcaactccatttttcatgacatagtggacgataaaaaggtctctggcctgaactatgattctgagatctttgtagtatcctctccttctgtttcggggcagtatggtcccctggatagcaaaagcgagtatgttcgctgtctacactttgcagaagaaaatgttctgtatgttgccacaaataatggatatctgcgtcaggccaaactctctaacatagaggatggaggacataattgcccttggagatggacggggaaatgttactattgtccgtttaaccagtagcagcagtgaacctaaactagacctatcttttacctggtcagcagaaaaagataggcaactactaggagtgtactggtgcaaggctcttgaatgtagccacattttcacagctgatcctaggggtgtgcttaagttgtggaacataagaaatgtcctgttctcaagtactgatattatcaatgcacctcagatgtttccacctgtagcagtgtttgaaccgtcctttggagctcgaattatgtgtctagatgcatctcctgaagaggagatccttatagctggtgataaaaagggtaacatcacagcctatcctttccctaaaatattggtactgcatgacagtggtctgatgcaacagaagatgcttccatgttgtcgctttaaaggagctcatggcatttctagtgtcacgagtgttcatatagaagactccacttctgatcatattgaaattcacactaccgggggagatggttgcatttgctttttcaagtatggaagaattgcacaaaagattgaattttttggaatgaggcaagtaaaagaactgggcaccattcaatccatctacactaatcttgcatctgagagccaatctagtagtacctacgcaataggtttcacctctgcagattttatcatttgggaccttgagaatgaaacaaagatggctcaagtatcctgtggtggctggcggcgcccttattcttattatcttgggacagtccctgaatatcagaactgctttgcctttgtaaaggatcatgatattcacattcacaggcactgggcaccaactcatgataagaaattactcgctcaagttctccatttgcagtttcatggtagagaagtgcactcgttgtgtttcataaatccagcaagccattcagatcctgagaatagctcagatctgttgatagcaaccgggtgtgaagatggaactgtgcgccttacaggatttttgactggtagttctggaaaatggcattcctcaaagttgctaggggagcatgtaggcgggtcagctgtgcgagctacatgcttcataccagagacctacacagtaacatataattcatgtaactacagttcgaacggtatttctgatggcattgctgttgaaaaagacgagactttcttactcatatctgttggatcaaagcaagtcctcactacttggattttgcaaccgaggaatgcagaaaacagacaagtatattcaagtggcttagatattgactccaagcaaaactccagaaacttggaaaacgttgattcagccatgtcatttcaatggctaactacccacatgccaccaaagcttcctaggaacagactgaaatctggccacataaaacagagggttgaggaaggaaatttttctgttgttcagccaaatatggacgttatggatcacatggaaaatgactggcgttacctttctgttacagcatttcatttgaagcatccggttctcaggttgacagtatgttttgttgctgttgcttgctcggatgcaacagttgtgctccgtgctcttctgttaccttctcgattgtggtttgacgttgccttcttggttccacatgcatcaccagttttggtgctgcggcatattatcatcaatgctagccactataaagatgatgctggagacagataccttattgcgagtggatcaacagatggtagcatcactttttggaacctgacagagaccattcatggcttcatgcaactaatatcagagactcaaccacatatgagtattgattatcaaaagcgtcccaggacaggaagagggagtcaaggtggtcgtctccggtggagatcactgtcatacgcttcgaagaagagagatggagatatgtcatcctctgacggaagcaacccgggtagcctaaacactgctgaaaattcatctgaagcttctggtgtggaaaacactcagattgtagtgcatgaagcaagtgacagctcaaaaactgagatgccttcaagtacccagtcatgtgatatacctgaattgagaccaatgcactcgttatccggtgttcaccagtcaggcgttaattgcctccacatatcattctcaacacctgacaagtcatactgcattataagtggtggagatgatcaatctgttcagcgcttcaacttcagagtaatatcttcggaggattgcttaacaaccccagcaaggctaaattcgcatgacaatgacacacttaaaattctatatcaacataaggtagcatcagctcatagtgcagcagttaaaggaatctggacagacggcacttggtcgttctctactggccttgatcagagagtaagatgctggaagatgggattagccggccaattcacggaatactcccatgctatcattagcgtgcccgagcctgaaactctagatgttttccatgaccgggcaaagaggaagtaccacattgctgttgctggaaggggtatgcaaatggtcgagttctcaccacctgaagatgattgactacaatgattgcaacccctgctatggatgtcacatggatgttgattttgctcggcttgcgtggatcatgtagttctatactgagacggttttttttaaaaaaaaaatggttaaggatgtaacaaacagagaatttgatgtgttatcaggctatgacaaacagatcctacatatacacatataaaacactgttttgcatttgcaatgtataatgtactatttacagagtggagtttcaaatgagggattgagatgagtaagctgctagagatagtcttagaaacgtttggtgcgcaggggagcactgtagcagggaagtgtggcctgacgatacgtaaactgttgagatcatcgttgatgagagaataata

SEQ ID NO: 85022 - DNA, 4304 bp, Zea Mays
ccaatgtttgaagggaccgatggaggttatggagggaatgcaaatcgagcccaaacctaactgacattcgagcaatcgagcggcagccgtcgccgtcaattccaagcagcctacgccgcctcgccgatggccgccggcggccacctccgcccgggctcctacctgggggacgtatcagcgctctccttgctcccctcctcgccgcaccctctcctcctcgccgggactggatcgcagctgctcttgtacgaggtgggcgctgccaggctcgttgcgtcgttccgagtgttcgacggggtgcgcgtccacggcatcgagccccggagcggaggccccggctgtcacagctacacgcttgcgttgtttggcgagaggagggtgaagctattctccctcggattcggtgttgaagcagatggcggtgaggcgcggctggagctggagcagaggctcccggggtttgaccattgggtgctcgacactcgtttccttgaggtcgatgggctgcttgcgattggtctgagtgacaattcagtagcgctgtgggatctgagcaagcgtgcgttggttacccgagtgaagtctccagagaagtgccttctgtattccatgagaatgtggggagactctgttagagagtttcttgtggcatccgggaccattttaaacgagattctcatatggaaattggcaccgcaagttctgggatcctccatgttcatcttggtaggctcaaggagcatgaaggctcaatattccgaatagcttggtcctctgatggatcaaagtttatgtctgtttctgatgaccgtagtgctcgcgtgtggactttgagtttcaaatcacagggtttcgccaatcatacagccagtcacgacaatgttgaaattataccaaaactcacactttttggccatagtgctaggatatgggactgctatgtttctgattctatggttataactgctggtgaggattgtacttgttgcatttggggaatggatgggaagcttatcaagatgttcaaagaacacattggacgaggaatatggcgatgtttatttgacccaagctcactgcttgtggtcaccgctgggtttgattcagcaatcaaagtgcaccatctatgcaactccatttttcatgacatagtggacgataaaaaggtctctggcctgaactatgattctgagatctttgtagtatcctctccttctgtttcggggcagtatggtcccctggatagcaaaagcgagtatgttcgctgtctacactttgcagaagaaaatgttctgtatgttgccacaaataatggatatctgcgtcaggccaaactctctaacatagaggatggaggacataattgcccttggagatggacggggaaatgttactattgtccgtttaaccagtagcagcagtgaacctaaactagacctatcttttacctggtcagcagaaaaagataggcaactactaggagtgtactggtgcaaggctcttgaatgtagccacattttcacagctgatcctaggggtgtgcttaagttgtggaacataagaaatgtcctgttctcaagtactgatattatcaatgcacctcagatgtttccacctgtagcagtgtttgaaccgtcctttggagctcgaattatgtgtctagatgcatctcctgaagaggagatccttatagctggtgataaaaagggtaacatcacagcctatcctttccctaaaatattggtactgcatgacagtggtctgatgcaacagaagatgcttccatgttgtcgctttaaaggagctcatggcatttctagtgtcacgagtgttcatatagaagactccacttctgatcatattgaaattcacactaccgggggagatggttgcatttgctttttcaagtatggaagaattgcacaaaagattgaattttttggaatgaggcaagtaaaagaactgggcaccattcaatccatctacactaatcttgcatctgagagccaatctagtagtacctacgcaataggtttcacctctgcagattttatcatttgggaccttgagaatgaaacaaagatggctcaagtatcctgtggtggctggcggcgcccttattcttattatcttgggacagtccctgaatatcagaactgctttgcctttgtaaaggatcatgatattcacattcacaggcactgggcaccaactcatgataagaaattactcgctcaagttctccatttgcagtttcatggtagagaagtgcactcgttgtgtttcataaatccagcaagccattcagatcctgagaatagctcagatctgttgatagcaaccgggtgtgaagatggaactgtgcgccttacaggatttttgactggtagttctggaaaatggcattcctcaaagttgctaggggagcatgtaggcgggtcagctgtgcgagctacatgcttcataccagagacctacacagtaacatataattcatgtaactacagttcgaacggtatttctgatggcattgctgttgaaaaagacgagactttcttactcatatctgttggatcaaagcaagtcctcactacttggattttgcaaccgaggaatgcagaaaacagacaagtatattcaagtggcttagatattgactccaagcaaaactccagaaacttggaaaacgttgattcagccatgtcatttcaatggctaactacccacatgccaccaaagcttcctaggaacagactgaaatctggccacataaaacagagggttgaggaaggaaatttttctgttgttcagccaaatatggacgttatggatcacatggaaaatgactggcgttacctttctgttacagcatttcatttgaagcatccggttctcagcaggttgacagtatgttttgttgctgttgcttgctcggatgcaacagttgtgctccgtgctcttctgttaccttctcgattgtggtttgacgttgccttcttggttccacatgcatcaccagttttggtgctgcggcatattatcatcaatgctagccactataaagatgatgctggagacagataccttattgcgagtggatcaacagatggtagcatcactttttggaacctgacagagaccattcatggcttcatgcaactaatatcagagactcaaccacatatgagtattgattatcaaaagcgtcccaggacaggaagagggagtcaaggtggtcgtctccggtggagatcactgtcatacgcttcgaagaagagagatggagatatgtcatcctctgacggaagcaacccgggtagcctaaacactgctgaaaattcatctgaagcttctggtgtggaaaacactcagattgtagtgcatgaagcaagtgacagctcaaaaactgagatgccttcaagtacccagtcatgtgatatacctgaattgagaccaatgcactcgttatccggtgttcaccagtcaggcgttaattgcctccacatatcattctcaacacctgacaagtcatactgcattataagtggtggagatgatcaatctgttcagcgcttcaacttcagagtaatatcttcggaggattgcttaacaaccccagcaaggctaaattcgcatgacaatgacacacttaaaattctatatcaacataaggtagcatcagctcatagtgcagcagttaaaggaatctggacagacggcacttggtcgttctctactggccttgatcagagagtaagatgctggaagatgggattagccggccaattcacggaatactcccatgctatcattagcgtgcccgagcctgaaactctagatgttttccatgaccgggcaaagaggaagtaccacattgctgttgctggaaggggtatgcaaatggtcgagttctcaccacctgaagatgattgactacaatgattgcaacccctgctatggatgtcacatggatgttgattttgctcggcttgcgtggatcatgtagttctatactgagacggttttttttaaaaaaaaaatggttaaggatgtaacaaacagagaatttgatgtgttatcaggctatgacaaacagatcctacatatacacatataaaacactgttttgcatttgcaatgtataatgtactatttacagagtggagtttcaaatgagggattgagatgagtaagctgctagagatagtcttagaaacgtttggtgcgcaggggagcactgtagcagggaagtgtggcctgacgatacgtaaactgttgagatcatcgttgatgagagaataata

SEQ ID NO: 85023 - DNA, 4320 bp, Zea Mays
aaagcggtcagtgggtggaggcagccaagagtcaccctgtcgccgttgccgtcgccgaggcaggcagagtctccctgtcgccgttgccgtcgccggcctcctcctcctctgccacttcctcccaactcccagccgcaggggccgacggcgacgggagggaagaggcggcagaggtactccgaggggcgcggagagaggctgtgccaggccacgccgtccagtgcctccgggtccgtcgccgcagcttccggccgcgtcggagaggtagcccccggagctcttcgcggaggctcgggaatggtgcactgggttagcgacagtgatggcagtgataacttcgaatgggacagtgatggtaacggggagcagacagtgagcttcaacgctgctggtgctggttcatcagctctggcagcgacgaacactgatgctcctggcccatcgacacgggttgctaatggcaatgggaaggctgggcgatctgcctctttggttcagaagtatgtggacatgggtttctcagaagagattgttctgaaggccatgaaggacaatggggataatggagcagattcattagttgagctccttcttacttaccaggaactaggcaatgacctcaaagtggataatgactttgcttctagttgtgcccccaaaactgctgacgatagtgatgatgatgacacactggaaatctgggatgatgaggatgctggagggagaagcaccagggttgctaactctgttgatgattctgatgacgaggatttcttacatgagatgtcacggaaggacgaaaaagttgattccttagttaaaatggggtttcctgaagacgaggctgcactggctattaccagatgcgggccggatgcatctatttctgttctggtggattcaatctatgcttcacagaccgcaggagatggttactgtggcaatctgtctgactatgaggataattcctatggagggagaagcacagggaacaagaaaaagagaaaaagatatggaggccaagcacagggaagtagaggcccattagatggtagctgtgatgaacccatgcctctcccacatccaatggttggatttaacttgccagaccagtggtcaagacgagtggacagatcgttgcctgcacaagctattggtccgccgtacttctactacgagaacgttgctcttgctccaaaaggtgtctggactaccatatcaagattcttgtatgatattcaaccagagtttgtggactcaaagtacttctgtgctgctgccaggaaaaggggttacatacacaacctgccacttgagaacaggtcacctctcctccccatacccccaaagacgatatcggaagcatttcctcggaccaagaggtggtggccttcatgggacccaagacgacagttcaattgcctccagacttgcgtgtctagtgcaaaattgttagagaggattcgcgtagccctcacaaacagttcagacccacctcctccaagagttcagaagtatgtgttggaggagtgtaggaaatggaacctggcatgggttggcttaaacaaggttgctcctctagagcctgacgagatggagtttctactcggctttccgaaggatcacacgagaggtatcagcaggacagagaggtatcgatctctaggaaattcatttcaggtcgatactgttgcttaccatctctcagttctgaaggatctgttcccacaaggcatgaatgtgctgtctttattctctggtattggaggagcagaggtggctctccacaggcttggcatacagatgaacacggttatttcagtggagaagtccgaggtcaaccggacgattctgaagagttggtgggatcagacgcagacgggtactctgattgagatcactgatgtgcagacactgtcatctgagaggatcgaggcgtatattagaagaattgggggcttcgatcttgtgattggtggaagtccctgtaacaacctcactgggagcaaccgtcaccacagagatggtttggagggcgagcattctgcattgttccatcattattttaggatcttacacgccgtcaagtccatcatggagcgtttgtagttcttagaatctttactgttgttttggttctagtagaatactttgtgaccgaacttgtaaatggtttgcaggttgactggtttagttctcttgccactctaatttaggctagttttttttttatttaatcttctttggtgatcttggtgcagttctgtggcactgttgggtattcaaatgcagattgatccgagaggctgccctgttgcattttctttttaaaatttgtatttgtcaatgagagatcaggtattctggttgccaaaaaaaaatctgaagttgtggagctgagaaaaggacggtgctaagctacaaccacccactgccacaccatgcgcacccccaacccaaaagatcctgcttttgctcacgcttatcaccactcccatctccatccaaaaccataaaaaaaaccagtgcgagctgaagcatccaggctctggaatcatcgtcgggatgtctgtgccagcatcagcccaggtgcctcacaccatacgatctgctgggagctgctgcttcaggtcgtcgcatcaactatctgcgcagaatctgggccgacatcgcaggtggcgggggaccggaaagaagaagatcctttccacccgtggcgtgcttgagtccagaaacggcgcacatcctggtggccttatgaagagaaggaaggtcgtggagcacatcatcctgctcagagccaagcccaacatctcagacgctgaagagaaagacatgctggactacctatacacatcgcagtaccagatgcgagggatactcgcggtctcgctaggccgcatcgaggaccccaacagcgacaacttcacgcacgctgtgttcatgcgtttccagcagaagcaagacatcgcggagttccagagtaacgcgtactactccaaagttgtcgacgagcacgtaaagcccgtttcctatggctcggtttctgtagatttcgagtccgaggtggaagacgacattatacctctctttcgcaggggagaggattttaactacggcgtcgagtttatgctgctggtgtctttcttgaagactgcgtctagagaggcaacggaggacgcattagcgtctcttgacaagttgatcagccaatgcagcgcttctattgtgcaggcaacatgtggctgctgtttggatcgtccggataacgggtacagtcatgctgcagtaatccgtttcccatcatctgatgagttgaagctgttcagggagagcgaggagtacaaggatatgtgggcgtccaagttccgcccgatcgtggagagatccctgcacctgcacttcaccgttgaccccgtggggaaccagctgatgtagaccaaccgagtggtcatccctatacatgggaccaagagcatctgtactgtacagtgtaaaacagagagatggggtaatatagaggataccgatagggtcaacaagtgccagtgctcggttacattacatcacggcaaaaaaaaaacaaaaaaaacaagagaaaatagcctcccttgtcgctcaggagctcagatagatagatagacagatagatgctgagcaccgaccgagttgaggtccctcttgagagttcagttgtgcagcgggtttgacccctgcggcacccttctcttagcctcggacagatcctgcacctgcacgactcgcctccagccaagtttctgttgaccgtgctgcctgaaagacgacgtcccctcggcgtcggattccggaacccgtcggccgtggcagaagaggcctctctgctctgctcccaggagcgagactgtgagcactactactaccatgagcctgaccaagctttgttgcggcaatcccatgctttttcaggcagggtttcaacagcacaagttggagatggcaagggacggtagtttgtaatacatcacgcacaagcaacggaataaagattttatatacgcagacaacaagggcggcacagaaagtaaatccagctcggccatctggagacccgtggcggtgataccagacaccggggcaggcgtgcgcttgcctcaccaattttggtttggtgcggcggacagcgatgcatgcattttcatcaggtttcggtttgggagaaagaacaaggatacatcatcaaagtcacaacatgaatgaattcttgctactctggagaagaattgactggtttctttgcacttgaacaagaaaaccccacgcgatcttattttgtgagta

SEQ ID NO: 85024 - DNA, 4304 bp, Zea Mays
aaagcggtcagtgggtggaggcagccaagagtcaccctgtcgccgttgccgtcgccgaggcaggcagagtctccctgtcgccgttgccgtcgccggcctcctcctcctctgccacttcctcccaactcccagccgcaggggccgacggcgacgggagggaagaggcggcagaggtactccgaggggcgcggagagaggctgtgccaggccacgccgtccagtgcctccgggtccgtcgccgcagcttccggccgcgtcggagaggtagcccccggagctcttcgcggaggctcgggaatggtgcactgggttagcgacagtgatggcagtgataacttcgaatgggacagtgatggtaacggggagcagacagtgagcttcaacgctgctggtgctggttcatcagctctggcagcgacgaacactgatgctcctggcccatcgacacgggttgctaatggcaatgggaaggctgggcgatctgcctctttggttcagaagtatgtggacatgggtttctcagaagagattgttctgaaggccatgaaggacaatggggataatggagcagattcattagttgagctccttcttacttaccaggaactaggcaatgacctcaaagtggataatgactttgcttctagttgtgcccccaaaactgctgacgatagtgatgatgatgacacactggaaatctgggatgatgaggatgctggagggagaagcaccagggttgctaactctgttgatgattctgatgacgaggatttcttacatgagatgtcacggaaggacgaaaaagttgattccttagttaaaatggggtttcctgaagacgaggctgcactggctattaccagatgcgggccggatgcatctatttctgttctggtggattcaatctatgcttcacagaccgcaggagatggttactgtggcaatctgtctgactatgaggataattcctatggagggagaagcacagggaacaagaaaaagagaaaaagatatggaggccaagcacagggaagtagaggcccattagatggtagctgtgatgaacccatgcctctcccacatccaatggttggatttaacttgccagaccagtggtcaagacgagtggacagatcgttgcctgcacaagctattggtccgccgtacttctactacgagaacgttgctcttgctccaaaaggtgtctggactaccatatcaagattcttgtatgatattcaaccagagtttgtggactcaaagtacttctgtgctgctgccaggaaaaggggttacatacacaacctgccacttgagaacaggtcacctctcctccccatacccccaaagacgatatcggaagcatttcctcggaccaagaggtggtggccttcatgggacccaagacgacagttcaattgcctccagacttgcgtgtctagtgcaaaattgttagagaggattcgcgtagccctcacaaacagttcagacccacctcctccaagagttcagaagtatgtgttggaggagtgtaggaaatggaacctggcatgggttggcttaaacaaggttgctcctctagagcctgacgagatggagtttctactcggctttccgaaggatcacacgagaggtatcagcaggacagagaggtatcgatctctaggaaattcatttcaggtcgatactgttgcttaccatctctcagttctgaaggatctgttcccacaaggcatgaatgtgctgtctttattctctggtattggaggagcagaggtggctctccacaggcttggcatacagatgaacacggttatttcagtggagaagtccgaggtcaaccggacgattctgaagagttggtgggatcagacgcagacgggtactctgattgagatcactgatgtgcagacactgtcatctgagaggatcgaggcgtatattagaagaattgggggcttcgatcttgtgattggtggaagtccctgtaacaacctcactgggagcaaccgtcaccacagagatggtttggagggcgagcattctgcattgttccatcattattttaggatcttacacgccgtcaagtccatcatggagcgtttgtagttcttagaatctttactgttgttttggttctagtagaatactttgtgaccgaacttgtaaatggtttgcaggttgactggtttagttctcttgccactctaatttaggctagttttttttttatttaatcttctttggtgatcttggtgcagttctgtggcactgttgggtattcaaatgcagattgatccgagaggctgccctgttgcattttctttttaaaatttgtatttgtcaatgagagatcaggtattctggttgccaaaaaaaaatctgaagttgtggagctgagaaaaggacggtgctaagctacaaccacccactgccacaccatgcgcacccccaacccaaaagatcctgcttttgctcacgcttatcaccactcccatctccatccaaaaccataaaaaaaaccagtgcgagctgaagcatccaggctctggaatcatcgtcgggatgtctgtgccagcatcagcccaggtgcctcacaccatacgatctgctgggagctgctgcttcaggtcgtcgcatcaactatctgcgcagaatctgggccgacatcgcaggtggcgggggaccggaaagaagaagatcctttccacccgtggcgtgcttgagtccagaaacggcgcacatcctggtggccttatgaagagaaggaaggtcgtggagcacatcatcctgctcagagccaagcccaacatctcagacgctgaagagaaagacatgctggactacctatacacatcgcagtaccagatgcgagggatactcgcggtctcgctaggccgcatcgaggaccccaacagcgacaacttcacgcacgctgtgttcatgcgtttccagcagaagcaagacatcgcggagttccagagtaacgcgtactactccaaagttgtcgacgagcacgtaaagcccgtttcctatatttcgagtccgaggtggaagacgacattatacctctctttcgcaggggagaggattttaactacggcgtcgagtttatgctgctggtgtctttcttgaagactgcgtctagagaggcaacggaggacgcattagcgtctcttgacaagttgatcagccaatgcagcgcttctattgtgcaggcaacatgtggctgctgtttggatcgtccggataacgggtacagtcatgctgcagtaatccgtttcccatcatctgatgagttgaagctgttcagggagagcgaggagtacaaggatatgtgggcgtccaagttccgcccgatcgtggagagatccctgcacctgcacttcaccgttgaccccgtggggaaccagctgatgtagaccaaccgagtggtcatccctatacatgggaccaagagcatctgtactgtacagtgtaaaacagagagatggggtaatatagaggataccgatagggtcaacaagtgccagtgctcggttacattacatcacggcaaaaaaaaaacaaaaaaaacaagagaaaatagcctcccttgtcgctcaggagctcagatagatagatagacagatagatgctgagcaccgaccgagttgaggtccctcttgagagttcagttgtgcagcgggtttgacccctgcggcacccttctcttagcctcggacagatcctgcacctgcacgactcgcctccagccaagtttctgttgaccgtgctgcctgaaagacgacgtcccctcggcgtcggattccggaacccgtcggccgtggcagaagaggcctctctgctctgctcccaggagcgagactgtgagcactactactaccatgagcctgaccaagctttgttgcggcaatcccatgctttttcaggcagggtttcaacagcacaagttggagatggcaagggacggtagtttgtaatacatcacgcacaagcaacggaataaagattttatatacgcagacaacaagggcggcacagaaagtaaatccagctcggccatctggagacccgtggcggtgataccagacaccggggcaggcgtgcgcttgcctcaccaattttggtttggtgcggcggacagcgatgcatgcattttcatcaggtttcggtttgggagaaagaacaaggatacatcatcaaagtcacaacatgaatgaattcttgctactctggagaagaattgactggtttctttgcacttgaacaagaaaaccccacgcgatcttattttgtgagta

SEQ ID NO: 85025 - DNA, 4301 bp, Zea Mays
aaagcggtcagtgggtggaggcagccaagagtcaccctgtcgccgttgccgtcgccgaggcaggcagagtctccctgtcgccgttgccgtcgccggcctcctcctcctctgccacttcctcccaactcccagccgcaggggccgacggcgacgggagggaagaggcggcagaggtactccgaggggcgcggagagaggctgtgccaggccacgccgtccagtgcctccgggtccgtcgccgcagcttccggccgcgtcggagaggtagcccccggagctcttcgcggaggctcgggaatgcactgggttagcgacagtgatggcagtgataacttcgaatgggacagtgatggtaacggggagcagacagtgagcttcaacgctgctggtgctggttcatcagctctggcagcgacgaacactgatgctcctggcccatcgacacgggttgctaatggcaatgggaaggctgggcgatctgcctctttggttcagaagtatgtggacatgggtttctcagaagagattgttctgaaggccatgaaggacaatggggataatggagcagattcattagttgagctccttcttacttaccaggaactaggcaatgacctcaaagtggataatgactttgcttctagttgtgcccccaaaactgctgacgatagtgatgatgatgacacactggaaatctgggatgatgaggatgctggagggagaagcaccagggttgctaactctgttgatgattctgatgacgaggatttcttacatgagatgtcacggaaggacgaaaaagttgattccttagttaaaatggggtttcctgaagacgaggctgcactggctattaccagatgcgggccggatgcatctatttctgttctggtggattcaatctatgcttcacagaccgcaggagatggttactgtggcaatctgtctgactatgaggataattcctatggagggagaagcacagggaacaagaaaaagagaaaaagatatggaggccaagcacagggaagtagaggcccattagatggtagctgtgatgaacccatgcctctcccacatccaatggttggatttaacttgccagaccagtggtcaagacgagtggacagatcgttgcctgcacaagctattggtccgccgtacttctactacgagaacgttgctcttgctccaaaaggtgtctggactaccatatcaagattcttgtatgatattcaaccagagtttgtggactcaaagtacttctgtgctgctgccaggaaaaggggttacatacacaacctgccacttgagaacaggtcacctctcctccccatacccccaaagacgatatcggaagcatttcctcggaccaagaggtggtggccttcatgggacccaagacgacagttcaattgcctccagacttgcgtgtctagtgcaaaattgttagagaggattcgcgtagccctcacaaacagttcagacccacctcctccaagagttcagaagtatgtgttggaggagtgtaggaaatggaacctggcatgggttggcttaaacaaggttgctcctctagagcctgacgagatggagtttctactcggctttccgaaggatcacacgagaggtatcagcaggacagagaggtatcgatctctaggaaattcatttcaggtcgatactgttgcttaccatctctcagttctgaaggatctgttcccacaaggcatgaatgtgctgtctttattctctggtattggaggagcagaggtggctctccacaggcttggcatacagatgaacacggttatttcagtggagaagtccgaggtcaaccggacgattctgaagagttggtgggatcagacgcagacgggtactctgattgagatcactgatgtgcagacactgtcatctgagaggatcgaggcgtatattagaagaattgggggcttcgatcttgtgattggtggaagtccctgtaacaacctcactgggagcaaccgtcaccacagagatggtttggagggcgagcattctgcattgttccatcattattttaggatcttacacgccgtcaagtccatcatggagcgtttgtagttcttagaatctttactgttgttttggttctagtagaatactttgtgaccgaacttgtaaatggtttgcaggttgactggtttagttctcttgccactctaatttaggctagttttttttttatttaatcttctttggtgatcttggtgcagttctgtggcactgttgggtattcaaatgcagattgatccgagaggctgccctgttgcattttctttttaaaatttgtatttgtcaatgagagatcaggtattctggttgccaaaaaaaaatctgaagttgtggagctgagaaaaggacggtgctaagctacaaccacccactgccacaccatgcgcacccccaacccaaaagatcctgcttttgctcacgcttatcaccactcccatctccatccaaaaccataaaaaaaaccagtgcgagctgaagcatccaggctctggaatcatcgtcgggatgtctgtgccagcatcagcccaggtgcctcacaccatacgatctgctgggagctgctgcttcaggtcgtcgcatcaactatctgcgcagaatctgggccgacatcgcaggtggcgggggaccggaaagaagaagatcctttccacccgtggcgtgcttgagtccagaaacggcgcacatcctggtggccttatgaagagaaggaaggtcgtggagcacatcatcctgctcagagccaagcccaacatctcagacgctgaagagaaagacatgctggactacctatacacatcgcagtaccagatgcgagggatactcgcggtctcgctaggccgcatcgaggaccccaacagcgacaacttcacgcacgctgtgttcatgcgtttccagcagaagcaagacatcgcggagttccagagtaacgcgtactactccaaagttgtcgacgagcacgtaaagcccgtttcctatatttcgagtccgaggtggaagacgacattatacctctctttcgcaggggagaggattttaactacggcgtcgagtttatgctgctggtgtctttcttgaagactgcgtctagagaggcaacggaggacgcattagcgtctcttgacaagttgatcagccaatgcagcgcttctattgtgcaggcaacatgtggctgctgtttggatcgtccggataacgggtacagtcatgctgcagtaatccgtttcccatcatctgatgagttgaagctgttcagggagagcgaggagtacaaggatatgtgggcgtccaagttccgcccgatcgtggagagatccctgcacctgcacttcaccgttgaccccgtggggaaccagctgatgtagaccaaccgagtggtcatccctatacatgggaccaagagcatctgtactgtacagtgtaaaacagagagatggggtaatatagaggataccgatagggtcaacaagtgccagtgctcggttacattacatcacggcaaaaaaaaaacaaaaaaaacaagagaaaatagcctcccttgtcgctcaggagctcagatagatagatagacagatagatgctgagcaccgaccgagttgaggtccctcttgagagttcagttgtgcagcgggtttgacccctgcggcacccttctcttagcctcggacagatcctgcacctgcacgactcgcctccagccaagtttctgttgaccgtgctgcctgaaagacgacgtcccctcggcgtcggattccggaacccgtcggccgtggcagaagaggcctctctgctctgctcccaggagcgagactgtgagcactactactaccatgagcctgaccaagctttgttgcggcaatcccatgctttttcaggcagggtttcaacagcacaagttggagatggcaagggacggtagtttgtaatacatcacgcacaagcaacggaataaagattttatatacgcagacaacaagggcggcacagaaagtaaatccagctcggccatctggagacccgtggcggtgataccagacaccggggcaggcgtgcgcttgcctcaccaattttggtttggtgcggcggacagcgatgcatgcattttcatcaggtttcggtttgggagaaagaacaaggatacatcatcaaagtcacaacatgaatgaattcttgctactctggagaagaattgactggtttctttgcacttgaacaagaaaaccccacgcgatcttattttgtgagta

SEQ ID NO: 85026 - DNA, 4275 bp, Zea Mays
aaagcggtcagtgggtggaggcagccaagagtcaccctgtcgccgttgccgtcgccgaggcaggcagagtctccctgtcgccgttgccgtcgccggcctcctcctcctctgccacttcctcccaactcccagccgcaggggccgacggcgacgggagggaagaggcggcagaggtactccgaggggcgcggagagaggctgtgccaggccacgccgtccagtgcctccgggtccgtcgccgcagcttccggccgcgtcggagaggtagcccccggagctcttcgcggaggctcgggaatggtgcactgggttagcgacagtgatggcagtgataacttcgaatgggacagtgatggtaacggggagcagacagtgagcttcaacgctgctggtgctggttcatcagctctggcagcgacgaacactgatgctcctggcccatcgacacgggttgctaatggcaatgggaaggctgggcgatctgcctctttggttcagaagtatgtggacatgggtttctcagaagagattgttctgaaggccatgaaggacaatggggataatggagcagattcattagttgagctccttcttacttaccaggaactaggcaatgacctcaaagtggataatgactttgcttctagttgtgcccccaaaactgctgacgatagtgatgatgatgacacactggaaatctgggatgatgaggatgctggagggagaagcaccagggttgctaactctgttgatgattctgatgacgaggatttcttacatgagatgtcacggaaggacgaaaaagttgattccttagttaaaatggggtttcctgaagacgaggctgcactggctattaccagatgcgggccggatgcatctatttctgttctggtggattcaatctatgcttcacagaccgcaggagatggttactgtggcaatctgtctgactatgaggataattcctatggagggagaagcacagggaacaagaaaaagagaaaaagatatggaggccaagcacagggaagtagaggcccattagatggtagctgtgatgaacccatgcctctcccacatccaatggttggatttaacttgccagaccagtggtcaagacgagtggacagatcgttgcctgcacaagctattggtccgccgtacttctactacgagaacgttgctcttgctccaaaaggtgtctggactaccatatcaagattcttgtatgatattcaaccagagtttgtggactcaaagtacttctgtgctgctgccaggaaaaggggttacatacacaacctgccacttgagaacaggtcacctctcctccccatacccccaaagacgatatcggaagcatttcctcggaccaagaggtggtggccttcatgggacccaagacgacagttcaattgcctccagacttgcgtgtctagtgcaaaattgttagagaggattcgcgtagccctcacaaacagttcagacccacctcctccaagagttcagaagtatgtgttggaggagtgtaggaaatggaacctggcatgggttggcttaaacaaggttgctcctctagagcctgacgagatggagtttctactcggctttccgaaggatcacacgagaggtatcagcaggacagagaggtatcgatctctaggaaattcatttcaggtcgatactgttgcttaccatctctcagttctgaaggatctgttcccacaaggcatgaatgtgctgtctttattctctggtattggaggagcagaggtggctctccacaggcttggcatacagatgaacacggttatttcagtggagaagtccgaggtcaaccggacgattctgaagagttggtgggatcagacgcagacgggtactctgattgagatcactgatgtgcagacactgtcatctgagaggatcgaggcgtatattagaagaattgggggcttcgatcttgtgattggtggaagtccctgtaacaacctcactgggagcaaccgtcaccacagagatggtttggagggcgagcattctgcattgttccatcattattttaggatcttacacgccgtcaagtccatcatggagcgtttgtagttcttagaatctttactgttgttttggttctagtagaatactttgtgaccgaacttgtaaatggtttgcaggttgactggtttagttctcttgccactctaatttaggctagttttttttttatttaatcttctttggtgatcttggtgcagttctgtggcactgttgggtattcaaatgcagattgatccgagaggctgccctgttgcattttctttttaaaatttgtatttgtcaatgagagatcaggtattctggttgccaaaaaaaaatctgaagttgtggagctgagaaaaggacggtgctaagctacaaccacccactgccacaccatgcgcacccccaacccaaaagatcctgcttttgctcacgcttatcaccactcccatctccatccaaaaccataaaaaaaaccagtgcgagctgaagcatccaggctctggaatcatcgtcgggatgtctgtgccagcatcagcccaggtgcctcacaccatacgatctgctgggagctgctgcttcaggtcgtcgcatcaactatctgcgcagaatctgggccgacatcgcaggtggcgggggaccggaaagaagaagatcctttccacccgtggcgtgcttgagtccagaaacggcgcacatcctggtggccttatgaagagaagcgcacgccttgcaggaaggtcgtggagcacatcatcctgctcagagccaagcccaacatctcagacgctgaagagaaagacatgctggactacctatacacatcgcagtaccagatgcgagggatactcgcggtctcgctaggccgcatcgaggaccccaacagcgacaacttcacgcacgctgtgttcatgcgtttccagcagaagcaagacatcgcggagttccagagtaacgcgtactactccaaagttgtcgacgagcacgtaaagcccgtttcctatgtacgccccagcccccagccccagcatatttcgagtccgaggtggaagacgacattatacctctctttcgcaggggagagactgcgtctagagaggcaacggaggacgcattagcgtctcttgacaagttgatcagccaatgcagcgcttctattgtgcaggcaacatgtggctgctgtttggatcgtccggataacgggtacagtcatgctgcagtaatccgtttcccatcatggagagcgaggagtacaaggatatgtgggcgtccaagttccgcccgatcgtggagagatccctgcacctgcacttcaccgttgaccccgtggggaaccagctgatgtagaccaaccgagtggtcatccctatacatgggaccaagagcatctgtactgtacagtgtaaaacagagagatggggtaatatagaggataccgatagggtcaacaagtgccagtgctcggttacattacatcacggcaaaaaaaaaacaaaaaaaacaagagaaaatagcctcccttgtcgctcaggagctcagatagatagatagacagatagatgctgagcaccgaccgagttgaggtccctcttgagagttcagttgtgcagcgggtttgacccctgcggcacccttctcttagcctcggacagatcctgcacctgcacgactcgcctccagccaagtttctgttgaccgtgctgcctgaaagacgacgtcccctcggcgtcggattccggaacccgtcggccgtggcagaagaggcctctctgctctgctcccaggagcgagactgtgagcactactactaccatgagcctgaccaagctttgttgcggcaatcccatgctttttcaggcagggtttcaacagcacaagttggagatggcaagggacggtagtttgtaatacatcacgcacaagcaacggaataaagattttatatacgcagacaacaagggcggcacagaaagtaaatccagctcggccatctggagacccgtggcggtgataccagacaccggggcaggcgtgcgcttgcctcaccaattttggtttggtgcggcggacagcgatgcatgcattttcatcaggtttcggtttgggagaaagaacaaggatacatcatcaaagtcacaacatgaatgaattcttgctactctggagaagaattgactggtttctttgcacttgaacaagaaaaccccacgcgatcttattttgtgagta

SEQ ID NO: 85027 - DNA, 535 bp, Zea Mays
gtgctttgttcctccgacaaccgataggatatggccggcatgtgcctgacgaggcaccacgtacgcatgcaatcgctgcacgctccaaaaagtgacgcgctccgtcgtctcttccggttccggccacccgcgcgcgcgttataagcacccttgccgcccgcgccctagctctacaagcctctctcacacacacacacatcgttgtccaaacaagatcggcgcggctcacgcggcctagctcgccggcctaacgaggccggatattccttaacctagctagctaacagctaactagatagatcgatccatcagctggcagccatgaatatgatcagggcagtacggcgccggttcaccgtcggccacctggctacggccaaagaccccgccacgctgcgccacgcggccgccgaactcctcgccaccgccatcttcgtcttcgccgccgagggtgccacgctctctctcggttggcttttggctatgcctatcctgcctatgaatgctacaagactgttgaactgaacaaaccaga

SEQ ID NO: 85028 - DNA, 752 bp, Zea Mays
cgcgcgcgcgttataagcacccttgccgcccgcgccctagctctacaagcctctctcacacacacacacatcgttgtccaaacaagatcggcgcggctcacgcggcctagctcgccggcctaacgaggccggatattccttaacctagctagctaacagctaactagatagatcgatccatcagctggcagccatgaatatgatcagggcagtacggcgccggttcaccgtcggccacctggctacggccaaagaccccgccacgctgcgccacgcggccgccgaactcctcgccaccgccatcttcgtcttcgccgccgagggtgccacgctctctctcgggaggatgcaccaccatgacaagggcggcggcggcctggtggcggtggcgctcgcgcacgccctcgcgctcgcggccgcagtggggtgcgccgccaacatctccggcggccacgtcaacccggccgtcaccttcggcgcgctgctcgccggccggatctgcctcgtccgctccctcgtctactggcccgcgccgagctgcggcgaccgccgtcgtgcgtagaggactacatgcatgcaggagcagcaggacgtcgtcgtcgtccccgctcctcggaatcttctgaataaaaaaaacagcttgcatgcgtgctcaattgttgtgtgtcgtggtcgatcatgagtagaattaatgtttcatgcatgcactcttaccgtcttctacttatgtccttgtttgcttcaataatcta

SEQ ID NO: 85029 - DNA, 1281 bp, Zea Mays
cccttttccttttcttatggagggattttgatgtagaaggacatcatacttatattatttaatggatgctctgcatatgctgcagccttcaataataatagcttaatagtgctgccatttgacgccttctcaccatgctgactaaactagtgttcaatgtcggtgccccctcttggctatgtacacttcattatcaatatggtttctttcagagaatggacaacacgccgccctcccaaaaatgccgcttccatggacccatttcttaaaccaccacggagcacagtttcgccgtccatgagccttctgcagggatactatggccttccaccgactccacaggagaacctcacctacgaaggcactgagatggcgacgtacgctcaaggtcatcataggaaggctagaagcttatcgagcagcgaacatggagatggtgctgacgatgctgagaagcccataaggcggcgccagaaagccgactctgagctgacgacaggtagggaggacaatggcggttgcctcttgccaagggctgggcaagggctggccctgaggccaaaatctgggagtcgaccagacgggaacggcagccagctagatctctcggccacgtgggtgccctcgtacggggatgggctgcacaccgtgaagaaatcatcgagcaccccggagttccaagactcagacagcatcagcatcgcctcggaatggctgaagagcaagtggaacctgaagccggacgcgttcaccctcacgcttcctcctctcccgctcttggacagcatacccaagcctctcctcgacaacattcccaactccatcgctgcttggcgaaacaaggcggccaaagattagcaagaggtaggtccatagcttcgtttcctatacttgttccttcttcttcttcttgggtaatttagttggagtgcgggaaacaaagggccggccggggcctggagaagttggtttgcactgtacctcccccccagtccccagccaaaaaaagaaggcacgaacggccagacatgctgctgaaatgggatgatggataccgtgacacattgcttacactgttacacatacatgctgtactgaatctgctgagccaaagcagaagcagatgatttcaagctgggagctaggacatgagcaccctttgtggggtattcttttctttttctttttgtttgtatgtatacttataggaatgaaggcaaacacacctaagcagcatgtgtgatattcccatgtgctaataaagaaaatggcttgttcatc

SEQ ID NO: 85030 - DNA, 1509 bp, Zea Mays
gaccacaggagaggaggggaagagggaggggagcccgacccgccaaaaatagcaggggcagggaccgcaggcgccgcgaccgatgggcgtcaagcaggtcctcgtccgcccccgctacggcgacggcgacggcgacgacgatggcggtaccagcagcagcagcagcacgggccgctgcgatgaggatgtggtcgaccagtcgccgccgcccatgtcgtcctgcggccgctacctcctccaccgcgtctgcaggttcgacacactcgccggcgtcgccatcaagtggcggacgtgaagcgcgccaacggcctcaacgccgacctgcagatgttcgcgcacaagactctccgggtcccgctccacgggagccaccagcccgccgccgcaccaccgtctcttccctcctattccccaaggaaccacgccgatcgcgtcgccagagaatggacaacacgccgccctcccaaaaatgccgcttccatggacccatttcttaaaccaccacggagcacagtttcgccgtccatgagccttctgcagggatactatggccttccaccgactccacaggagaacctcacctacgaaggcactgagatggcgacgtacgctcaaggtcatcataggaaggctagaagcttatcgagcagcgaacatggagatggtgctgacgatgctgagaagcccataaggcggcgccagaaagccgactctgagctgacgacaggtagggaggacaatggcggttgcctcttgccaagggctgggcaagggctggccctgaggccaaaatctgggagtcgaccagacgggaacggcagccagctagatctctcggccacgtgggtgccctcgtacggggatgggctgcacaccgtgaagaaatcatcgagcaccccggagttccaagactcagacagcatcagcatcgcctcggaatggctgaagagcaagtggaacctgaagccggacgcgttcaccctcacgcttcctcctctcccgctcttggacagcatacccaagcctctcctcgacaacattcccaactccatcgctgcttggcgaaacaaggcggccaaagattagcaagaggtaggtccatagcttcgtttcctatacttgttccttcttcttcttcttgggtaatttagttggagtgcgggaaacaaagggccggccggggcctggagaagttggtttgcactgtacctcccccccagtccccagccaaaaaaagaaggcacgaacggccagacatgctgctgaaatgggatgatggataccgtgacacattgcttacactgttacacatacatgctgtactgaatctgctgagccaaagcagaagcagatgatttcaagctgggagctaggacatgagcaccctttgtggggtattcttttctttttctttttgtttgtatgtatacttataggaatgaaggcaaacacacctaagcagcatgtgtgatattcccatgtgctaataaagaaaatggcttgttcatc

SEQ ID NO: 85031 - DNA, 2546 bp, Zea Mays
ggcagtcgtgaatcgtgatcccctgtggttccttccgagcaagggagaaagaatgcagtcgtctcctccgcgtcgccctcctccagtgtagaaaactgcagcccgtatagtaagtgcgtctctccctctagtgtttactcccttccctttgcagactagtggacaagtagtggtgatctctctctccctccctccaccatcccctcttgttcttgcttcgccgcccgccgatcccccccccccctctcttaaatttggtattgtatttctcgagattcttttttgttttgttcttgtagtattgtatttcatcttctctctatttggtatgtagacagcagtagcagataacctctactaccaggctgtgaacggagtgctgattctgcttgcatattgatagggggatagatagatggttgtagaaatggacacacaggggaactgcaatctttgtagtagcaggaggaggagggatagaagagataagactataagaggacaatgggatcactagcatgaaaggaggaatttccaatattctcttccagatcgcgatttttcttactgcgtctccatcagcagcagtatatacacagcagtaataaataaataaataataaaaaaatagataaataaataaaagtagctggtacactggtatagtagtagccatttgaaatgctccccgccaagggtacgcattttcttttcttttttaaaccgcaggaaacacgcatactgactccgacacgcgaggcccacccccatcccaaagtcccaccatgtatagcggccggagaaaagaaatatagagagatagatacagtagtagtacaagtagcttttaccgctagcaagtttttaccggcacggcacaagggatggggaacgggcggcccaccggggccgagtcgtcagatcagcaggccgtcgcgtcacgtcagtacaggaggcgtcagatcctcgtgttgggcgaggggcaccggacacgtctcgcttgccctttctgctagtacgtgcagtgcagtagtcgcttgccctttccttgactcttgtggcttgtgtcaggtgtcctcggcgctaagggacgaggatgcaggaggcggcagcaggcgcctatccctcctacatggagccggagccggagccggagcagacgggtgcatcggcgactgtgggtgtgatgggctgccgctcgcccacgtgcccgccttggctccaagcggccattgcagacatcgatcagcgggtgcgcgcgctggcggtggacgatgccgcgccgcccacggagcactccttcgcggagcgcgccgaggagtactaccagaagcggccgcagctgctggccctcctcgccgacctccaccgccgctacctctgcctggccgaccgctactgccaccaccagcacaagcgagagcagccctcgctgccggcgtctgcctcctccgactgcggctcgtccgacgtcgacgaccgctgctccgacgccggcagctcgctctccttccaggcccagcacgcgccgccgcgggccggactccccgccgacgaagaggaggagctgctggtggcggagctggtggccgcgtgggtggagcgcgacgtgctggcggacgaggcggcgcggcgcgcggcggagtcggcgcgcaggatccagctgcaggggagcctggtggaggtgctggagtcggagcgcctggtgctgctgggcgagaacgcgcgcctggggttccgcgcgacggcggccgaggacgaggccgcggcggcggcggccgacctgggctacgcgcgccgccgcgccgccgagatggcccgcctcgtgctcaggctccgcgaggaccaccgcgcctgcgtgctggggcgcagggccgaggcgctgcaggcgcgggtgtacgcgctggagctccgcaaccgcgagtgctgcgaggccacggcggcgtgggaggccgaggtccagcggctcagcgcagagaaccgacgcctcgcggaccaagccatgatggcgaggaggaagcgcaagggcggtggtggtgggtggtgggcgagggtcaggatggcagcggccgggtggacgccgtgtgcgcccgcggtcacggtcgccgagcagaccaaggggaaggaggacggcaagtaccaccactacggcggcggatgcttctgtgtctagactaggagatgagacggcggcggcgatctagccctcctttttgttagtagtaattactattataattcaggacttggcaggtgaatgtgaatgctgctgggtcggatgcataattctggagaagacgatgattgtgctccgcaggcactagtaaaacaacatgcaattcgtatgatctgttcaatacattataccatggtgttcccgtattctgtagtacaagaaattccaagatctcaatatattgctcttgggaatttagcacacggttcaaaacttgtgaatttggccgcgtgaggatgtgatgaatggcacttgcttcaggttgtaatcaattttccctattcagtcaatctttgctctggaggtttta

SEQ ID NO: 85032 - DNA, 1700 bp, Zea Mays
cctgcattggctctcattgaaccaaaagctttgcactggaatagatgagaaatctgtgggttcctccttccagcttgtgtttgcaccaattgatgagcatttcccagatgatgctccattgatttcttctggctttcgtgtcataccacttgatgtgaaaacagatggtgtatcctctggtaggacgctagatttggcatctagtcttgatgtgggctctgctgcaccccaagcctcaggggaatctccagatgactgcagtttgagatctgtgctgacaatcgcctttcaattcccgtatgagatgcaccttcaggacagcgttgcagcaatggcccgtcaatatgttcgtagtgtcatttctgctgtgcaaagagtgtcgatggctatatctccctcccaatctggtctaaatgctgggcataggatgctttctggcttccctgaagctgccacacttgctagatgggtttgccagagttatcactattcttttgggccccaatacagctaccatctaggtatggaattacttaatcaatcagatggagctggtgaagcattgttgaaaatgctctggcatcatccagatgctgttctgtgctgctcctttaaggagaaacctatgtttacgtttgcaaacaaggcagggctggacatgttagaaacatctcttgttgccctgcaagacctgacgctagacaagatcttcgacgagtcaggaaggaaagcactattctcagacatctcgaaactaatggaacagggctacgcgtacctgccgtcaggcgtgtgcatgtcaggaatgggccgccatgtttctttcgaccaagctgtagcgtggaaggtgctcggcgaggatagcaacatccactgcctggcgttctgcttcgtcaactggtccttcgtgtgactgacgcccaacccgtcgggtggttatggcgagctgaccctttttttgtatggaaaatcatcagctgtgacaaaaggcatatgttgcatgcactagttgaagaaactggtccaaatgctttttttgtttgtcattccattcagatgttgctaggtgtggagtggaaatggggcaatagtgtcacggttacacatgacccagcattaaccaaacaaccgcgtcgccagtttctttctattcgatcagggagatgcattttctggcaaaaatctcctatttttttgttgcaaatttggtctatgtatatggaactgctgctggacgccgagaaagcaagacatatgcggaaactcactatggctcgaggaaaatatatgcctacactgtcttcagaaaacataatgcagtaatgcttttcgaacccaaagcacacttgacacaaagctggagcacatgtaaagaggcacgccagatgagcaggtagggtctctcgcaaggctgatgccaacaattaaaccgacgacccttcacaacaaaatcacgattctttgttctcatcctgctccagttgaggctccttctctgcagcctcctcaaatgtctctccttggacaagctcagggacgtcgtcatcatcctgtgcagctgcttcagcaccaggtacctgcctctggaaaatctcagccagcttcttaaggttgtccaggttatcagggcctgaagaggaggaggaagctaaggtttgtcaggaagctgaggcaaataatcagagtgaagtctgcaaaac

SEQ ID NO: 85033 - DNA, 2039 bp, Zea Mays
ttccatctattcttttgttttcaagtcctgcattgcctctctttttttctcggaaaacgcaggagggctgcacatcattatattaagtagagggggaaaagaaagtccaagcggacagatacaagcatcctagccccccttaaggcggccaaaaacacaaaaacagaaactgatccatcacaatagaaacacggccacacactacccgctaaaacattcctgccaagctaagggctgttgctaggcctaaactttccagattcttggccccagccatcacccaacatgctagctcatcaagcagggatctctgcactttgccaatggtaggagattcaccatcaaagacagcctggtttctttgccatcaaagtcctgcattggctctcattgaaccaaaagctttgcactggaatagatgagaaatctgtgggttcctccttccagcttgtgtttgcaccaattgatgagcatttcccagatgatgctccattgatttcttctggctttcgtgtcataccacttgatgtgaaaacagatggtgtatcctctggtaggacgctagatttggcatctagtcttgatgtgggctctgctgcaccccaagcctcaggggaatctccagatgactgcagtttgagatctgtgctgacaatcgcctttcaattcccgtatgagatgcaccttcaggacagcgttgcagcaatggcccgtcaatatgttcgtagtgtcatttctgctgtgcaaagagtgtcgatggctatatctccctcccaatctggtctaaatgctgggcataggatgctttctggcttccctgaagctgccacacttgctagatgggtttgccagagttatcagtatggaattacttaatcaatcagatggagctggtgaagcattgttgaaaatgctctggcatcatccagatgctgttctgtgctgctcctttaaggagaaacctatgtttacgtttgcaaacaaggcagggctggacatgttagaaacatctcttgttgccctgcaagacctgacgctagacaagatcttcgacgagtcaggaaggaaagcactattctcagacatctcgaaactaatggaacagggctacgcgtacctgccgtcaggcgtgtgcatgtcaggaatgggccgccatgtttctttcgaccaagctgtagcgtggaaggtgctcggcgaggatagcaacatccactgcctggcgttctgcttcgtcaactggtccttcgtgtgactgacgcccaacccgtcgggtggttatggcgagctgaccctttttttgtatggaaaatcatcagctgtgacaaaaggcatatgttgcatgcactagttgaagaaactggtccaaatgctttttttgtttgtcattccattcagatgttgctaggtgtggagtggaaatggggcaatagtgtcacggttacacatgacccagcattaaccaaacaaccgcgtcgccagtttctttctattcgatcagggagatgcattttctggcaaaaatctcctatttttttgttgcaaatttggtctatgtatatggaactgctgctggacgccgagaaagcaagacatatgcggaaactcactatggctcgaggaaaatatatgcctacactgtcttcagaaaacataatgcagtaatgcttttcgaacccaaagcacacttgacacaaagctggagcacatgtaaagaggcacgccagatgagcaggtagggtctctcgcaaggctgatgccaacaattaaaccgacgacccttcacaacaaaatcacgattctttgttctcatcctgctccagttgaggctccttctctgcagcctcctcaaatgtctctccttggacaagctcagggacgtcgtcatcatcctgtgcagctgcttcagcaccaggtacctgcctctggaaaatctcagccagcttcttaaggttgtccaggttatcagggcctgaagaggaggaggaagctaaggtttgtcaggaagctgaggcaaataatcagagtgaagtctgcaaaac

SEQ ID NO: 85034 - DNA, 3534 bp, Zea Mays
ctcggaagttgttcccccgcttttgttggatcctcgcgggctggaggtcgaagcgcgagcggagagctaagagcaacaaggcgacgagatttgtgtggctacgattttgcgttgccgacggaacatgggaacaatggttgcagcggtggcgttgcgagggggaagcagcgatagcggaggatttgataaggttcccgggatggactcgggaaaatacgtgcgctacaccccggagcaagttgaggtgctcgagcggctctacatagattgccccaagccaagctcctcacggcggcagcaactgctgcgcgagtgtcctatactctccaacattgagccaaagcagatcaaggtctggttccagaaccggaggtgccgcgataagcagcggaaggagtcttcgcggcttcaggctgtgaacagaaagttgacggcaatgaacaagcttctaatggaagagaatgagcggcttcagaagcaagtctctcagttggttcatgaaaacgcgcacatgcggcagcagctgcagaatacttcattggccaatgacacaagctgtgaatcaaatgtcactacccctccaaaccctataagggacgcaagtaacccttctggactccttgcgattgcagaggagaccttcacagagttcctctcaaaggctactgggacagctattgattgggtccagatgcctgggatgaaggttatatgtcaactctcaatccctgttctttggcttaagttacattttttttccagaaaactgctaggtgctaactacattctgttttctgaagcctggtccggattcagttggtatcgtggccatttcgcatggttgccgtggcgttgctgcccgcgcctgtggtttggtgaatctagaaccaacaaaaggcatagagatcttgaaagatcgtccctcttggttccgtgattgccgaagtcttgaagtgtttacaaggtttccagctggaaatgggggaacaattgaacttatttacatgcagatgtatgccccaacaactttagtccctgcacgtgatttttggacactacgatacacgacaacaatggaagatggcagccttgtggtctgtgagagatccttgagtggttctggtggtggtccaaatgcagcctctacacaacaatttgttagggctgagatgcttccaagtgggtatttagttcgcccatgcgaaggtggaggatcaattgtgcatatagtggaccatctagatctcgaagcatggagtgttcctgaagtgcttcgaccactgtatgagtcttctagagttgttgctcagaaaatgactactgtggcactgcgccaccttagacaaattgctcaagaaacaagtggagaagtagtgtacgccttgggaaggcaacctgcagtcctacggacctttagtcaaagactaagcagggggtttaatgatgccattagcggtttcaatgatgatggctggtctgtaatggggggagatggcattgaagacgttgttattgcttgcaactcaaccaagaaaattaggaataccagcaatgctgggattacatttggagccccaggaggcattatttgtgcgaaggcatccatgttactgcagagcgtcccaccggcagtactggtacgatttctgagggagcatagatctgaatgggctgattacaatattgatgcgtatttggcttcatcattgaagaccagtgcgtgctcacttcctgggttgcgacccatgagattttctgaggggcagatgatcatgccacttgctcacacagttgagaacgaggagattcttgaagttgtccgccttgaaggtcagcctcttactcatgatgaagctcttctttcaagggacatccaccttctccagctttgcactggaatagatgagaaatctgtgggttcctccttccagcttgtgtttgcaccaattgatgagcatttcccagatgatgctccattgatttcttctggctttcgtgtcataccacttgatgtgaaaacagatggtgtatcctctggtaggacgctagatttggcatctagtcttgatgtgggctctgctgcaccccaagcctcaggggaatctccagatgactgcagtttgagatctgtgctgacaatcgcctttcaattcccgtatgagatgcaccttcaggacagcgttgcagcaatggcccgtcaatatgttcgtagtgtcatttctgctgtgcaaagagtgtcgatggctatatctccctcccaatctggtctaaatgctgggcataggatgctttctggcttccctgaagctgccacacttgctagatgggtttgccagagttatcactaccatctaggtatggaattacttaatcaatcagatggagctggtgaagcattgttgaaaatgctctggcatcatccagatgctgttctgtgctgctcctttaaggagaaacctatgtttacgtttgcaaacaaggcagggctggacatgttagaaacatctcttgttgccctgcaagacctgacgctagacaagatcttcgacgagtcaggaaggaaagcactattctcagacatctcgaaactaatggaacagggctacgcgtacctgccgtcaggcgtgtgcatgtcaggaatgggccgccatgtttctttcgaccaagctgtagcgtggaaggtgctcggcgaggatagcaacatccactgcctggcgttctgcttcgtcaactggtccttcgtgtgactgacgcccaacccgtcgggtggttatggcgagctgaccctttttttgtatggaaaatcatcagctgtgacaaaaggcatatgttgcatgcactagttgaagaaactggtccaaatgctttttttgtttgtcattccattcagatgttgctaggtgtggagtggaaatggggcaatagtgtcacggttacacatgacccagcattaaccaaacaaccgcgtcgccagtttctttctattcgatcagggagatgcattttctggcaaaaatctcctatttttttgttgcaaatttggtctatgtatatggaactgctgctggacgccgagaaagcaagacatatgcggaaactcactatggctcgaggaaaatatatgcctacactgtcttcagaaaacataatgcagtaatgcttttcgaacccaaagcacacttgacacaaagctggagcacatgtaaagaggcacgccagatgagcaggtagggtctctcgcaaggctgatgccaacaattaaaccgacgacccttcacaacaaaatcacgattctttgttctcatcctgctccagttgaggctccttctctgcagcctcctcaaatgtctctccttggacaagctcagggacgtcgtcatcatcctgtgcagctgcttcagcaccaggtacctgcctctggaaaatctcagccagcttcttaaggttgtccaggttatcagggcctgaagaggaggaggaagctaaggtttgtcaggaagctgaggcaaataatcagagtgaagtctgcaaaac

SEQ ID NO: 85035 - DNA, 4379 bp, Zea Mays
gcttttaaggctgtcacctttccccatcccctgcgcgccctcctgcactctccccactcaacaatcaaccacggcgtcacaaccgcacccctccgaaccctagctagcaccgcgcgccggagccccggagtaggtgcctgcttgccctcctgcggtggccgtcgcgctgccgccgcctgatccgattcgtctagccgtgtcaagcgccaccaccggtgatcgatgcgaggcgccgcgggaggcggctcgggctcgggcaggctgtgaggagaggctgtccgctcgctgcgtcgtgcgcctgtctgcgcgcgcgtctgctccgccgtccgcgccaagccgtccctcgccgaggggggctgcctctcacggccgctcggcctcgccgcgcgtctgcttcccaccacccacgcagggatcctcgcgggctggaggtcgaagcgcgagcggagagctaagagcaacaaggcgacgagatttgtgtggctacgattttgcgttgccgacggaacatgggaacaatggttgcagcggtggcgttgcgagggggaagcagcgatagcggaggatttgataaggttcccgggatggactcgggaaaatacgtgcgctacaccccggagcaagttgaggtgctcgagcggctctacatagattgccccaagccaagctcctcacggcggcagcaactgctgcgcgagtgtcctatactctccaacattgagccaaagcagatcaaggtctggttccagaaccggaggtgccgcgataagcagcggaaggagtcttcgcggcttcaggctgtgaacagaaagttgacggcaatgaacaagcttctaatggaagagaatgagcggcttcagaagcaagtctctcagttggttcatgaaaacgcgcacatgcggcagcagctgcagaatacttcattggccaatgacacaagctgtgaatcaaatgtcactacccctccaaaccctataagggacgcaagtaacccttctggactccttgcgattgcagaggagaccttcacagagttcctctcaaaggctactgggacagctattgattgggtccagatgcctgggatgaagcctggtccggattcagttggtatcgtggccatttcgcatggttgccgtggcgttgctgcccgcgcctgtggtttggtgaatctagaaccaacaaaaggcatagagatcttgaaagatcgtccctcttggttccgtgattgccgaagtcttgaagtgtttacaaggtttccagctggaaatgggggaacaattgaacttatttacatgcagatgtatgccccaacaactttagtccctgcacgtgatttttggacactacgatacacgacaacaatggaagatggcagccttgtggtctgtgagagatccttgagtggttctggtggtggtccaaatgcagcctctacacaacaatttgttagggctgagatgcttccaagtgggtatttagttcgcccatgcgaaggtggaggatcaattgtgcatatagtggaccatctagatctcgaagcatggagtgttcctgaagtgcttcgaccactgtatgagtcttctagagttgttgctcagaaaatgactactgtggcactgcgccaccttagacaaattgctcaagaaacaagtggagaagtagtgtacgccttgggaaggcaacctgcagtcctacggacctttagtcaaagactaagcagggggtttaatgatgccattagcggtttcaatgatgatggctggtctgtaatggggggagatggcattgaagacgttgttattgcttgcaactcaaccaagaaaattaggaataccagcaatgctgggattacatttggagccccaggaggcattatttgtgcgaaggcatccatgttactgcaggtaagggtgattattgtttgtgtgaaggcattatctgtacagtcttttcatattttatacttagaaataaagggggaaaagcaggtaccgttgcatattgcattgtgcagaagtaaacaaatgaactgcagaattttgttaagttacattgtacctcttaatcaaaaacataatatcgtccttgtttgatttgcactttagtgaatacatttctggctgtgcatgttatttctgataccatctatgcattgagagtatagtaacttctgattttttatctggttgtgccacaattaatgttaagcagaaaaaggcacaatagatgactttttaattgtacatggacattgtacactagaaatttaggagttccgcttaaatgcagtggtgggtgcacatttgacactagaaatttgagttttcacccctgtaaaatggaagagctccatcccagttttaaaataataaatatgctactgatatacacgattttaacatgattttctgaacctagattccctatatgctatgcttttttaaacatgtttctttattggtattctagagcgtcccaccggcagtactggtacgatttctgagggagcatagatctgaatgggctgattacaatattgatgcgtatttggcttcatcattgaagaccagtgcgtgctcacttcctgggttgcgacccatgagattttctgaggggcagatgatcatgccacttgctcacacagttgagaacgaggagattcttgaagttgtccgccttgaaggtcagcctcttactcatgatgaagctcttctttcaagggacatccaccttctccagctttgcactggaatagatgagaaatctgtgggttcctccttccagcttgtgtttgcaccaattgatgagcatttcccagatgatgctccattgatttcttctggctttcgtgtcataccacttgatgtgaaaacagatggtgtatcctctggtaggacgctagatttggcatctagtcttgatgtgggctctgctgcaccccaagcctcaggggaatctccagatgactgcagtttgagatctgtgctgacaatcgcctttcaattcccgtatgagatgcaccttcaggacagcgttgcagcaatggcccgtcaatatgttcgtagtgtcatttctgctgtgcaaagagtgtcgatggctatatctccctcccaatctggtctaaatgctgggcataggatgctttctggcttccctgaagctgccacacttgctagatgggtttgccagagttatcagtatggaattacttaatcaatcagatggagctggtgaagcattgttgaaaatgctctggcatcatccagatgctgttctgtgctgctcctttaaggagaaacctatgtttacgtttgcaaacaaggcagggctggacatgttagaaacatctcttgttgccctgcaagacctgacgctagacaagatcttcgacgagtcaggaaggaaagcactattctcagacatctcgaaactaatggaacagggctacgcgtacctgccgtcaggcgtgtgcatgtcaggaatgggccgccatgtttctttcgaccaagctgtagcgtggaaggtgctcggcgaggatagcaacatccactgcctggcgttctgcttcgtcaactggtccttcgtgtgactgacgcccaacccgtcgggtggttatggcgagctgaccctttttttgtatggaaaatcatcagctgtgacaaaaggcatatgttgcatgcactagttgaagaaactggtccaaatgctttttttgtttgtcattccattcagatgttgctaggtgtggagtggaaatggggcaatagtgtcacggttacacatgacccagcattaaccaaacaaccgcgtcgccagtttctttctattcgatcagggagatgcattttctggcaaaaatctcctatttttttgttgcaaatttggtctatgtatatggaactgctgctggacgccgagaaagcaagacatatgcggaaactcactatggctcgaggaaaatatatgcctacactgtcttcagaaaacataatgcagtaatgcttttcgaacccaaagcacacttgacacaaagctggagcacatgtaaagaggcacgccagatgagcaggtagggtctctcgcaaggctgatgccaacaattaaaccgacgacccttcacaacaaaatcacgattctttgttctcatcctgctccagttgaggctccttctctgcagcctcctcaaatgtctctccttggacaagctcagggacgtcgtcatcatcctgtgcagctgcttcagcaccaggtacctgcctctggaaaatctcagccagcttcttaaggttgtccaggttatcagggcctgaagaggaggaggaagctaaggtttgtcaggaagctgaggcaaataatcagagtgaagtctgcaaaac

SEQ ID NO: 85036 - DNA, 1289 bp, Zea Mays
atcgtcaaataattaaactaaaagaactggaagctgttggactccgtcttaacaaaaggcctccccagatatacttcaagaggaagaagacgggtgggatttctttcaataccactgttcctttgactcatattgatgagaagctgtgctatcagattctgcacgagtacaaaattcacaatgctgaggtgttattccgtgaagatgctactgtggatgatctcattgacgttatcgaagggaaccgaaagtacataaagtgcgtctacgtatataacaagatcgatgttgttggtatcgatgacgttgataatcttgctcggcaaccaaattcactagtgatcagctgcaatttgaagctgaacttggacagactacttgcgagaatgtgggaggagatgggcctagtgagggtgtatacaaagccacagggccagcagcctgatttcacagaccccgttgttctttccaccaggtggctgcacggtggaggacttctgcaatcatatccatagaagtttgctcaaggacgtgaagtatgtgctcgtatggggaaccagcgcaaggcactatccacagcattgcggcctcggccatggccttaacgacgaggatgtcgtccagatagtaaagaagaaggaaaaggaggagggtgggcgaggccggttcaagtcgcacacgaacgcacctgaccggatatctgatagggtgaagaaagccccactgaagacataataacgggttccctgagcgcgtcgtgatcagcttctccaaaccagatggacaacacaagctcggtgggagatcataaaatctggaactagctgagccgcggcgtgctacttgttttgtagtaccagaacagaaggggccaccgccatgtttggagtactccaccttccacaatacctacaccaatgcggcaccaccatgaacactgctgcgtcttgctcgtatgatgtgggcttatcactgtgtgttacctgctatatatgatatgataaatacttgccaactcacggattctgcgtctgcttattagcagcagcctagcctttgttgtgggaaacatttgtgggtaccaacgcgagggcagtttgagaaaggtccgagccgacatcttgagtgtgatagattgaacatgagggtgaaggggattacaagttctagtatcacctttatgggagggcaagggataagagatgatctaaataatattgttcattggatttgagtgagtctagtgatctaaaccgttagttttgatgatgtgttaagtttggatataa

SEQ ID NO: 85037 - DNA, 1391 bp, Zea Mays
aagaggaaggacgattctttttccggggtacacgcacacatgaacggcaggcaactcgtgaaacaaagtaaagttggaccccctgagaaagtaaactgattgaatggcaaaaggtagccattgaatcaccaggggagggaggggactgggagaggaagcaaataatgcgatttgcatatgagattggtttggtacaagcaaagcagcacggcttcccgtttgccttcccttttgggagtggctttgaggtaggcacacacgtgacgtgacgtgagtaaccaaggaaaggaggcacaataataattcgtacgatacgagctactccagtaagctcgagcatgatcctacattgatgtagcaaaggtgaaggaatgtaggttggatgacgagtgtctgccatcacatcagcagcggccttggcctagcgggagagagcaaatcagcagatgaaaggcaagcagcaaagcgattactccagtagataagatatgagagaagaatttgtggtaatcgcagggcctctcttttgtatcggatcgggtaagcgaggttttggtactgtctgtcctcccccgctggccggccggctagtccctgaaggaaggagggagggagagcaggaagagagtaagagagagagagagagagagagagagagagagagagagagagagagagagaggaaaggaaccaacctggacggcgcggaagttggagaatctgaagtcgaagcgctcgccgacgcggtcggaggagcggtggcggtgaagcttgaacatcctgccctgctggtggtggttaccatgcgatgcggccgaggggagagcggcggccctcctcctagattgcggctggggtcgggaggtggaactgcggttggtgatgctgacctgagactgagatacggcggcgcatggagcggccgtgcaggtgcggcgcagcaaaaggtgtaggtggtgggttggggggaagaagaggaatcttaggaagcggagaaagaaaccatgtcccccgacttcagccacctcacctcagggggagggggagggagagctctgctggagaggggagggaggaggccaggtcggggtcgggagagaagaccggaccggagcagaccagaccagacctggttgggaatgggaatgcaggcatatacctaccgagcccgagcccgagaggagaaggcgcaacctcaacttctctggctggtgcgtgcaatggctgtcgtcagaacagcaggccagctgccttgtggttgcgagatttctgaggcgatctcgcgtgtcgtcgtcgtcgttgtcgtcgatgtcgcccttgtctggtatagtttgaaggatgttggaggagtttgtgttcgaccacccgactcttcaaaggacaacaaggac

SEQ ID NO: 85038 - DNA, 4357 bp, Zea Mays
cggcgatggctacatcctcctaattaaaaaataattaactttttcagtgaataggaagttcccttaaataagcaggtgggaaatccaaatacctagggtgggaaatcagatgacctaagctcaaattggcaagaattaaatgaacataatcactactgtatcgggtttggattcagaactaggtgagctgcattccttagtggcagtgctcgatcccagtcacgactaactggtgtgtgccatttccaagccagagcgcaagaaaattagtaacttgttacttgcaatctcctatttacacgcaatggatttaggtgcgcaagcaggacgcaaccacccaccgcaacaaactgagcccagaaaaagtcgggagcttttcgccggacacgctcaccatgggatggaagcaggcgccgaagtcgtgggaggcgacgaagacgtggtcggccccggcggagcgattccaatacggcatcccggcctggacgaggtcgacggcgtcggcgagcatgccccgggcgtgcgacagcgaggggaagccgttgggcgtggagaagttgcaggagacgtagacggggacgaagaagaggtcggcgtcctcgggccgcgcggcgcggccggtgtaggcgagcagcgcttcatgcaccgctacctcggccgcgaagaggtggcgcgcgcaccgcgcgtcggcgaccgcccagtcgcggttgaagcgggcggggaggtcgtagacgtagatgcggacggggggcgccgcggctgcgccggtggcggcgagggcgcggggcttggagcggaggaaggaggagcggcggagcggagcagctgcgggcggcgtggcggagaggaagagggcgagggagacggcgaaccagagcaggaggaggagccacgtggagtgcttccgcagcttgtcggcgagagtgggggctgctgggcttctcctcggcctgggatctcccatggccgatgcgcgagggtggacggagatcacaccgaagctcctctcagctatgcttttgtttggctttgtggcatcatgttgtttttttcagagctcgctggttcggctgctgtgctgtgcgtataaacgcaccgttctaatttataattgctttaactttttaaatttaagtttaacctactcatcttattcaaaaaattataattattgttgatttttattgtaatattgtttaagtatataatatactttaaatatgtttttaaaattttattttaaaaaattgaatagaacgagtgggtcaacgtggcaaaaaaggtcaaattaattatatttagaatggagtggttatatataaacgcataaaaacttatattacactatagactatattataataaaatataagaatataaaagctgataaatttagcctaagtttaagttttaatattacaaagaacaattatcaaatagtcaacatcgtaggtttgactaaaagcattaaaaacctattcaaatacaattaataaaataatttatttgaaattataaatatttgatattataaatattatttttgtattatataaaatctatcaaagttaaaataatttgactaaaagatagaatgatttattgtcgtggtttcgaaaaccagagacaatagaatttgtattcgataagagatgctagtggagactcacttctaatggtgaatccctgagattcgagcaggggatccgagacaaagaattatactggtccaagcttacacatagtccaatgtagttctgatcgttgtattgcttgaggactatgttacagctagtgcatgcgttaggaggggggtcttctcttttatagctcaagggtaaggccatatagagagacttgtttcctacaaacatgagcggtaaggatgtgatctgctgcccagttgacacgtagtgcccctgacgtccttgtagggtcgtgcttagccgtactccggtatagcgtatcgcttcgcctgtccggtgtatgggtccctttaggctgtagcgagtctaatgctgatgtcctcgtcgtggtgtatgataggactggacgaaatactcgtggcttgtcggctcgattggttcgtggccagctcgattatgctacaatgtcaataaatgcaaacatattttagcagtggctcttggttaactttctcccatagggctatgcctcaaacacaaaatatgacttgtatatataagctcgatccgatgcccgcatgcacataacacgccaatgacgaataggcatgagaaatccccaaaatcgcaaacatggatgattaagtttaatgcatcacacataatacataataggcatgagatcagaccttgccccacggcgcctctcccacttgctctccttcagcttcgatgtcgagtgtcttcgctggaagaaacacaaaaaataacagaactcggatcaaattggaacactgcgcaatcaaaccaaaccaggaatcgaaccggcgggacacacgactgggagaacagcgcgaagaagtggttggctagcgtgaacagcggctggaacttggtgctggaggcggtgccagcagggtacgaagcgagctcctctaaatgggggctgctctgacctgagaaagcctgttgtctgaaaaaacatagtggatgtctgtttcttcgagaaaggcataacgagacgattcacattcaaagccacaatttgtaataccacaacaacttggtatttttgatctgatttacacgggtgattttattgctatggcggtaactttgcatatttgatttgatttacacaggtgggtactgcttgcttcgtcgttcttttttatttgtcaaatttttgaaatgaactatcaaatgacaaatatttgagaacggaagcaagtactccgtaataaataaataaataaataaaaagaagcgccaccgcttgcgctttgcttgttgcagcaacaagaagcagacagatgcagcagcaaaaactaaaaagggagtggttggttggtgcgtgcaagctacgttacgctaacccaattcaattcatgctgcgcagctgcagctgagcaccatgtttcgtggcggatctggggctggggccggagccggagcggcgccgcttgtcggtggtggtggtggtcggcggcggacaggggcggaagaggcgctccagctcgtcgaggcggatgctgataacagggacggggcccgcctcagcaagctgctgatccgccgcttggaagaggcgcttcctgcacatgggcggcggcggcggcggcttccggggcgcgggcgggcacgtggtgggctccctcaggtagcagatcccgctgcccgtcggcgtcctgcagcagtagtcgtcgccggcgaacacgagcggctgcgtggcgcaggacggcgagaaggccggcgcttccgcgggcctgtacaactccggggacgccgacatgctgtaatcctaatcctgatcctggtgggttcaaattcaatcgatcgacagtagtggctgtgtatagggcaggtgaggctagagggggagagctgagcagaagagcgaggtgctgatggtggtatgtataccaaccaagcactaaggaggtaggcgtggaccgtggggtgggggagaagacgaggacgaagacgaagaccaagacgcgtgccgcgtgcgatggaaggaagggaagggaagggaagggaaggctcgctgcgctgattttaatatagctagcgctttggaccccaactcctgctgtcggaaggaaccaccattaccgaaaggggcagctgatcgaattctcctcctccttccaccactccactctgcatctcctggtcccggttcccggaagggtcagccagcgacggaacgaagcctcctatggacagagacgtgtgtgacgcgttcggcggcacacccgactctctgacttttcatcgcatccgcgtcggtccttcttatcctcacatccttttacgtctgtggtctccaatttcagacgtaacagttagattccaatgcagatgtataaatagatataccatctggttggccttgactgatatcgttgcactctatgctctcgtgaagacctattaatgatagagaaacacattctattcacttccatcttttagctcattatttacatgagattagagagatactaccgcatcacatatggttattgtatcttatgtcactagttgaacgacttgagttggttatacttttgttattcttggcgtttgtcgccatcttttttcgctttttgaccttttttgttgttgccttttgacctttttacgaagattttttataaatacattatttctggtttaaatttaagaaattgatccttacttcggcg

SEQ ID NO: 85039 - DNA, 4634 bp, Zea Mays
cttgcctcactcctcaaaaaatctcgccagctctctctccaatctcgcctcccccgcgtctccggctgcgtttgctccgccggcgctccactcgcctcccccgcgtctccggccgcgtttgcttcgcggcgctccaaggttccagaacccgtcgtcgcggcggtgtcctcgcgccatgcccttcttcctggaccagcgccgcgacccgcgcctgttgtcggtgccaccgccgcagtcccactcccgctgcagcaactggtgcagcgcgctgccgttgtcgctcgagctcagctgccccaggaagtgctcgcagctgctccccgctgctccccatcgatccactcccgctaccgccgcgaggtgcgtgtgcgcgtggcttggtgcgtgcgcgctctgtggtggtgtcgagagctgggcttggctttggtgcacatcaaatgtggttcatcctctcatttgaagccctacatgaaaataataaaacgtgtcacacatcaacatattacaatggcatctctgttttgctttgatatttatagtttccctcttaattatatgaagcccacatgtttcaattctgtattgctctgcttaataaatgggatgcttcatattggtgagggtaaaacataagcgaaggcaaatgatgctaaaacagagaaatattggacaaaaatcactcaagatcttctactattgcctgatcatgacgatttgcagtgcattgtagttgtagattatgcttatctaaatctagaagacaagtttgcaagcattgaatacttcaaggataatgtagacttcaaatttaatagttatattatagataccattttctggataaacaaaggaatatcttagcaaaaatagattgccaaaggaccagatagacattgttgggactatgcttcgtcgcgccgaaggtcttgtaggaagaagcagcttcagctgaagctgtccgcaggagatgaccgaaggttcttcttcatgaagcttcggaattacaaaccgacttaaaagtagaatgacttttcagtccataaatgtttgggtcgctgttgtaatcccttatgaaggacataattgtaattcctcacagactgtgtcccgtgcctataaatagtgaacagtactcccttactgagggaggacatttttccgatatttgcaatcgcatcatttgggaaccaacctttgttaaggcagaggtataattgtattcaacacttaaatatattgaatgaatacaatatggttcatttatgattcacttacctatgatactctatattttttcttatacaatctgttgtaattcaattacgaagatttaaccttcgtaattgtattgacttcaaccttcgtccaaggcccattattctcgagggaataatgcttcattggacgaagaacattaacatttaacattttatgttgccttgttcttaattcatagcatttgagaacttctatttccgtttttgacaatttttctccaaccaaattttggaacatgaaagcttcgtcctctgaagcttcgtcagcaatctccttttctttcccagacactgcggccatggcctcttcggcggcggtagtggcttcttctgcggccatgtctagcagtattttgtcgatgtgttcaattgtgctttccaagttcaagccttcagttgaggtagcttcggcagccgtgacctccgaaggtgtgatttcaatatttgttatttcttcagccgttggtatcttttgagctgaagctcttggtggtgtcttgtcaataacttctgtcactgcaatgattctttgtctctttgttttagttgttttcttcgttttttcgggctccttttccttctgaaaaaattttgtcagttgaggccctaatggacttagtttcacaggcagggattcagtcattaccttcaaaatctcttccacgtcagtagcagagtgtgatgcgggagtctcttcttcgtcagatactttttgcttcggagatgatattttcttcttcttcggaatattcttctcttttggtggttctttctcatcttcatttaaagcttcgactccccttttccttttccgaccttcgacaattttattcagttgttcgtagtcagggtattcaaaacccaaggcgtccagcactcgattcaatcttcgcttcggtcgggtaccgaaagccgcagtcatcagctgatcttcttttttggagtaattaccgagtatttcattgcacattatttcaactgtgtccagccactcttggcaaggttttttaaagtatttcttaaacttgtaatagtaaggtaaccgcacaagttccccttctttcttctccccctctagcttcggcatttcccattcttttaagttaggaaaaaccctgaaggccaagaactcttgaaccaggtccctagtgctgatatgctctgaaataattttaaactcagccagtgcagcccaagtgggaccttctaatgacatttggcatcgcggtcttgtttctccgaagatcaattcaagagggctttgtaccagcttctctttgtcttcgtcaattctcacataaaactattctgatttccagcctgccggccatttgcttcggtagctgattacaggaaactttgtggttttccgataggcaaaattgtagcaaccaaagttatcatgtaatccatcttttctagccttcgtctggtaatgcagctcatgaactcgacaaaagctgtcggcaaacggctccaccgcctggcttcggagggcccagatataaacactaagcctaacgatagcgttaggagtcaactgatgaaagtagataccaaacctcttcaatacatctgcaataatcctatgaagggggaatctcaacccagcctttagaaagctcttgaaaatgactatttcatccttctctggcttcggggtagtttcttcccctccgaagcgaagtagcttcttctgactttcactgaaataacccgactttaccatcttggagagatcagccttcgaaacagtcgactttccgaagtccaagtggctaggcttacttggcatggcaatacgataatcatcttcgggatcagtttcttcaatgttctcttcttctgcttcggtagttacttgttctgcttcaacagtggggatttcttccgaagttaccagtccggatcgttgcattgcttcggagatgggaatagtctccgagccttcagcttcgcctccctcacgctcaaccctagcggtagaacgcactctggccatttaattctgaatttgtgggaattaaatactttttcttccgaagttttttctcctgacgaagcaggcttcaagctggagcttcgtttgaacccgagagtcaagcttcggctatggttaaaaattttggcagcaaaatagtgcaaatagcaatgaatgttgtggtaacttcacacctacttgtttgtttatatagtactgcaggtaagaaggcgaaacgccaggatttttacaccaggcggacagccgcttgcactcgctgcgcggtggaccgcagagaccaaacagtaactgtgcaaggtgggaccgctacgcgctcggaaactgaatcgtttctcgacaacgagctcagggaaggtgttttttggaccttcgtcttcccgaagcttaagagacatttttcacggaccaagctcgttacgaaaaacgatctagcgccgcgaaaggggctactgttgggactatgcttcgtcgcgccgaaggtcttgtaggaagaagcagcttcagctgaagctgtccgcaggagatgaccgaaggttcttcttcatgaagcttcggaattacaaaccgacttaaaagtagaatgacttttcagtccataaatgtttgggtcgctgttgtaatcccttatgaaggacataattgtaattcctcacagactgtgtcccgtgcctataaatagtgaacagtactcccttactgagggaggacatttttccgatatttgcaatcgcatcatttgggaaccaacctttgttaaggcagaggtataattgtattcaacacttaaatatattgaatgaatacaatatggttcatttatgattcacttacctatgatactctatattttttcttatacaatctgttgtaattcaattacaaagatttaaccttcgtaattgtattgacttcaaccttcgtccaaggcccattattctcaagggaataatgcttcattggacgaagaacattaacatttaacaatttatgttgccttgttcttaattcatagcatttgagaacaagtccccaacagacatgacttatgatctatattgcactaacttttatctctgcacttacattagaattattctattctcaatttattggaattgttgttatagaaaatttatttacacttcaaatctgcttttctaagttcaatagttcagcatggaatactcattataatatttgttgtagggcaagaaacaaatatttttcacccatgtcctcctagttgttcactcttaagtgatggaagagtaagtacttttgttctttcctttgaaattttttggctaagaactttgttttcgacttgctgctgtgcttggttgaaaacatgaaat

SEQ ID NO: 85040 - DNA, 198 bp, Zea Mays
ccccagtgtaaaatgtatattccttttcctttttatttttcttttcgaaatcgacagaaaccttctaaaagccataacttgagatccactaactcaaagatgctaaaactaatattctactatttctttttagtagatatacagtagaaaaatataggatgagagttttgagacctttttatgtaaagttttaatgaa

SEQ ID NO: 85041 - DNA, 2255 bp, Zea Mays
gtgacttccaacttcctttttgcagttttattaggaataacatcgctaagcaagctggaccaaccccatggtttccaaacctgtgcctttgttgaaagcccttttcgttgggcaatatgaacaagctgctgtcttgttgacctgcggccaagaatagcatcttgcccttgtaaaatccatttcacatccataacaagggactcctgaagcttgccaagaaggcggacagcttctgaatagagaggagcagcatcaggtctagcaagtagccttgacagaatgacttcagtaaaccctttttcactatcagaaagggtaaacccctcagctttaggggataacgaccgaagtgattcaagtgctgtcttgcctgctgcaactttttccataagagcttgttcatctaaaagaagcctcatctcaacccattgccaatggaactttgcaggttgaagagtatcaagaagttgcataagcctctctgaaagctttaattcattatctttggggtcacaaggctccgaagctccatctccctgaatagttggtgtgttgcaatcaataagagcgtccagaaaaagccgggcacggagaggtataaatggcagtatttttgaattcctgtcaggactatgagtttcaagcattgctgcaaactctgaatcaccaacatctgaagccagaagattatacagccgatgtgtattgcggaagcaaatctcccgaaaaggttgatgtctggtaatatcgcttattgcgtttgacagagactgataaagctgtggatcttcgcggttaaaaatatatcgtctccaaagaaccatggcaaaaattgagtaggccggaggaaagattacactaagaggaagcatctgctgcaaccttgagagtgcaagaatgtacgaatctccaagaatatctgcaataagcccatcatagacagttctgcagttccccaatagaaccctaaaccaatgtaccaaaacatctgtggaatgttcaatcctaaaagttccagtaggacgggatacaccattcgaacttgatttcaaacctctcaggagctgcagaatatccaaaccatcttttatttttaaagcagcaaccatccgctcaagactaacagctccatgaacaacagcccccacgacaagagcagaaacagcagcagatactttagcagttctcccaacaaaacctttccctgagttgctgagatcacttgtatgatttccatatgcatcatgggcctcaggagatggttgaaactgattgcggtgcatctttggagaagcaaaagctgctgtaacagctccagaagtttcaacagccagagctatttcaaatgcacggctgaagcggtccccaagagtttctttcagcaagcaaagagaatttatatggacacgcaaagtgtgcctaacgaaatttagtgaattactcacagaattaacaccttgatagttacctcctgcaaaatccaaatgttttgctatcacatgcccagcattcgcaacaattgcagaaacagcagaagcaactgttgaaaggtctccatctggatttgcacccccattttgcctgatgcattctactaagcccgaaacaatgtcatgtgcaatttgatagctatcttctttctcaaaagtgggtggattcctgggagttgctagaactttcttttccttcaaactgcgctgaatttcatcagcttgccgttgcactatttctttcatattctgcacaagtcttgaactccttccattcaacttttggcggacctgctcatcaatctcctcgcctgctgaaacccccgaagaagaaatcaattcgccatcaatggaccgcccgttatcaagctcagctaacaggcgctgatcacaagtggtccgaaagcttttttcccacttggccacaccagccacatctctatatttcttcaaaaagtatcgtacgtaagcaaaagctgttgaaccaggatgcctgacaattgctgacacagaatttctgttcactaaagcacttagaacatcaggcaggatgtcagccgcaagaagtatgttctcgtacctgcaagcattgcataatagagatatcaaaaatatataaaagcataacgaagttcaacgtaggaatgcaaccattagtccattacaactgatgaacaaagaaccttgtctagctgcttgctgaaactcctcactgatacaacagtgaccaattctcattttatttcctaactaattatgtgtatg

SEQ ID NO: 85042 - DNA, 1364 bp, Zea Mays
tagtctccgagcaaattgttgctcctggtggatcatctcagcaatcaccacagcaaccccatatttcatatttttccattgattcatatgcaaagctcgtggttatggttctcaagtactcttcagtggagataacaccaaataaaggcagtatactttccaagattatttctgttactgtgaggaccattcagaaagatgctgaggaaaagaaagcttcatttaatccccgaccatacttccgattgtttataaattggctctatgaccttactactactgatggccatcatgatggttctaattttcaggttttgactgcatttgccaatgcattccacttgctacaacccttgagagttcctgcctggagctttgcttggcttgagctggtgagtcataggagcttcatgccaaaattgctgatgtccaattcacagaaaggttggccgttttttcagcggttgcttgttgctcttttcaaattcatggaaccatatctgagaaatgctgaactcccagaggcggtggaccttttatacaaaggaactatgagagttttgcttgtattactgcatgactttcctgaatttatttgtgattaccacttcagtttctgtgatgtgattccttcaagttgcattcaaatgcgcaatgtcattcttagtgcttttccacgtaacatgagactgccagacccttctactcctaatctaaagattgatttgttggctgaaatttcaatagcaccacgaatcatgtcagatgttgatggtaccctcaaatcaaagcagttgaagactgagtttgatgaatatctcaagaggccggaaggctcttcctttctaagtgtcctgaagcaaaatttgctgctgcctcagaatgaagcagctgttgctgggacacgctacaatgtgcctctgatcaattcacttgttctttatgttggcatccaagctgtgcaacaactgcaacagaacaaggctaatgcatctgcatcagtgcagcagattaaacatacgcctacgatggacagtttccagattgaaacagctaccgagatgttcacaaatctcataacaagttttgatacagagggccgctaccttctgttgaatgcaattgcaaaccaactgcgctatccaaatagccatacacactactactccttcatcattctgcatctatttgctgaggctacccaggagattatccaggagcaaataacaagggttcttctggagcgtctaatagtgaaccgcccccatccttgggggttacttattacttccattgaattgataaagaagacaaccagactatggagctcgatggagttgttaatgaagatccttagctacagt

SEQ ID NO: 85043 - DNA, 1801 bp, Zea Mays
tagtctccgagcaaattgttgctcctggtggatcatctcagcaatcaccacagcaaccccatatttcatatttttccattgattcatatgcaaagctcgtggttatggttctcaagtactcttcagtggagataacaccaaataaaggcagtatactttccaagattatttctgttactgtgaggaccattcagaaagatgctgaggaaaagaaagcttcatttaatccccgaccatacttccgattgtttataaattggctctatgaccttactactactgatggccatcatgatggttctaattttcaggttttgactgcatttgccaatgcattccacttgctacaacccttgagagttcctgcctggagctttgcttggcttgagctggtgagtcataggagcttcatgccaaaattgctgatgtccaattcacagaaaggttggccgttttttcagcggttgcttgttgctcttttcaaattcatggaaccatatctgagaaatgctgaactcccagaggcggtggaccttttatacaaaggaactatgagagttttgcttgtattactgcatgactttcctgaatttatttgtgattaccacttcagtttctgtgatgtgattccttcaagttgcattcaaatgcgcaatgtcattcttagtgcttttccacgtaacatgagactgccagacccttctactcctaatctaaagattgatttgttggctgaaatttcaatagcaccacgaatcatgtcagatgttgatggtaccctcaaatcaaagcagttgaagactgagtttgatgaatatctcaagaggccggaaggctcttcctttctaagtgtcctgaagcaaaatttgctgctgcctcagaatgaagcagctgttgctgggacacgctacaatgtgcctctgatcaattcacttgttctttatgttggcatccaacagattaaacatacgcctacgatggacagtttccagattgaaacagctaccgagatgttcacaaatctcataacaagttttgatacagagggccgctaccttctgttgaatgcaattgcaaaccaactgcgctatccaaatagccatacacactactactccttcatcattctgcatctatttgctgaggctacccaggagattatccaggagcaaataacaagggttcttctggagcgtctaatagtgaaccgcccccatccttgggggttacttattacttccattgaattgataaagaatccgcgttacaacttttggaaccggtcttttacacatagtgcacctgagattgagaaactgtttgagtcagtggctaggtcctgcggcgcaaaagctgtagatgaaggaatcagtgtgcaggatggcagtcactaataaagtaatttgctttgttagtgctgtttttgtgctatttcgcactgtaaattgtgtgctaccctatctgggcttgtacagaccacggaaatacatagtgcgtcacgtcagctatttgggtgcctgtgctttgcctggtagctaggaattactattgatcgccagatgctccaggtgcaaatttttccgtggactggttcacttatttgattcaactatgtcagaatggtagatggtgcgaacttcagcttagatagtgagttgagttgcaggcatgtttgtaaattatatttttgatgccattctgttttctcagagaacggaacatttcaagatcagtctatactcctatgccgttttaaaattgcacaccaaatgggattgcaagtagaatggatgggtttttg

SEQ ID NO: 85044 - DNA, 1795 bp, Zea Mays
tagtctccgagcaaattgttgctcctggtggatcatctcagcaatcaccacagcaaccccatatttcatatttttccattgattcatatgcaaagctcgtggttatggttctcaagtactcttcagtggagataacaccaaataaaggcagtatactttccaagattatttctgttactgtgaggaccattcagaaagatgctgaggaaaagaaagcttcatttaatccccgaccatacttccgattgtttataaattggctctatgaccttactactactgatggccatcatgatggttctaattttcaggttttgactgcatttgccaatgcattccacttgctacaacccttgagagttcctgcctggagctttgcttggcttgagctggtgagtcataggagcttcatgccaaaattgctgatgtccaattcacagaaaggttggccgttttttcagcggttgcttgttgctcttttcaaattcatggaaccatatctgagaaatgctgaactcccagaggcggtggaccttttatacaaaggaactatgagagttttgcttgtattactgcatgactttcctgaatttatttgtgattaccacttcagtttctgtgatgtgattccttcaagttgcattcaaatgcgcaatgtcattcttagtgcttttccacgtaacatgagactgccagacccttctactcctaatctaaagattgatttgttggctgaaatttcaatagcaccacgaatcatgtcagatgttgatggtaccctcaaatcaaagcagttgaagactgagtttgatgaatatctcaagaatgaagcagctgttgctgggacacgctacaatgtgcctctgatcaattcacttgttctttatgttggcatccaagctgtgcaacaactgcaacagaacaaggctaatgcatctgcatcagtgcagcagattaaacatacgcctacgatggacagtttccagattgaaacagctaccgagatgttcacaaatctcataacaagttttgatacagagggccgctaccttctgttgaatgcaattgcaaaccaactgcgctatccaaatagccatacacactactactccttcatcattctgcatctatttgctgaggctacccaggagattatccaggagcaaataacaagggttcttctggagcgtctaatagtgaaccgcccccatccttgggggttacttattacttccattgaattgataaagaatccgcgttacaacttttggaaccggtcttttacacatagtgcacctgagattgagaaactgtttgagtcagtggctaggtcctgcggcgcaaaagctgtagatgaaggaatcagtgtgcaggatggcagtcactaataaagtaatttgctttgttagtgctgtttttgtgctatttcgcactgtaaattgtgtgctaccctatctgggcttgtacagaccacggaaatacatagtgcgtcacgtcagctatttgggtgcctgtgctttgcctggtagctaggaattactattgatcgccagatgctccaggtgcaaatttttccgtggactggttcacttatttgattcaactatgtcagaatggtagatggtgcgaacttcagcttagatagtgagttgagttgcaggcatgtttgtaaattatatttttgatgccattctgttttctcagagaacggaacatttcaagatcagtctatactcctatgccgttttaaaattgcacaccaaatgggattgcaagtagaatggatgggtttttg

SEQ ID NO: 85045 - DNA, 1804 bp, Zea Mays
tagtctccgagcaaattgttgctcctggtggatcatctcagcaatcaccacagcaaccccatatttcatatttttccattgattcatatgcaaagctcgtggttatggttctcaagattatttctgttactgtgaggaccattcagaaagatgctgaggaaaagaaagcttcatttaatccccgaccatacttccgattgtttataaattggctctatgaccttactactactgatggccatcatgatggttctaattttcaggttttgactgcatttgccaatgcattccacttgctacaacccttgagagttcctgcctggagctttgcttggcttgagctggtgagtcataggagcttcatgccaaaattgctgatgtccaattcacagaaaggttggccgttttttcagcggttgcttgttgctcttttcaaattcatggaaccatatctgagaaatgctgaactcccagaggcggtggaccttttatacaaaggaactatgagagttttgcttgtattactgcatgactttcctgaatttatttgtgattaccacttcagtttctgtgatgtgattccttcaagttgcattcaaatgcgcaatgtcattcttagtgcttttccacgtaacatgagactgccagacccttctactcctaatctaaagattgatttgttggctgaaatttcaatagcaccacgaatcatgtcagatgttgatggtaccctcaaatcaaagcagttgaagactgagtttgatgaatatctcaagaggccggaaggctcttcctttctaagtgtcctgaagcaaaatttgctgctgcctcagaatgaagcagctgttgctgggacacgctacaatgtgcctctgatcaattcacttgttctttatgttggcatccaagctgtgcaacaactgcaacagaacaaggctaatgcatctgcatcagtgcagcagattaaacatacgcctacgatggacagtttccagattgaaacagctaccgagatgttcacaaatctcataacaagttttgatacagagggccgctaccttctgttgaatgcaattgcaaaccaactgcgctatccaaatagccatacacactactactccttcatcattctgcatctatttgctgaggctacccaggagattatccaggagcaaataacaagggttcttctggagcgtctaatagtgaaccgcccccatccttgggggttacttattacttccattgaattgataaagaatccgcgttacaacttttggaaccggtcttttacacatagtgcacctgagattgagaaactgtttgagtcagtggctaggtcctgcggcgcaaaagctgtagatgaaggaatcagtgtgcaggatggcagtcactaataaagtaatttgctttgttagtgctgtttttgtgctatttcgcactgtaaattgtgtgctaccctatctgggcttgtacagaccacggaaatacatagtgcgtcacgtcagctatttgggtgcctgtgctttgcctggtagctaggaattactattgatcgccagatgctccaggtgcaaatttttccgtggactggttcacttatttgattcaactatgtcagaatggtagatggtgcgaacttcagcttagatagtgagttgagttgcaggcatgtttgtaaattatatttttgatgccattctgttttctcagagaacggaacatttcaagatcagtctatactcctatgccgttttaaaattgcacaccaaatgggattgcaagtagaatggatgggtttttg

SEQ ID NO: 85046 - DNA, 1825 bp, Zea Mays
ctttgtcatacctggatacttattttgaatcattcaggaacttgctgttacacactctctagtctccgagcaaattgttgctcctggtggatcatctcagcaatcaccacagcaaccccatatttcatatttttccattgattcatatgcaaagctcgtggttatggttctcaagtactcttcagtggagataacaccaaataaaggcagtatactttccaagattatttctgttactgtgaggaccattcagaaagatgctgaggaaaagaaagcttcatttaatccccgaccatacttccgattgtttataaattggctctatgaccttactactactgatggccatcatgatggttctaattttcaggttttgactgcatttgccaatgcattccacttgctacaacccttgagagttcctgcctggagctttgcttggcttgagctggtgagtcataggagcttcatgccaaaattgctgatgtccaattcacagaaaggttggccgttttttcagcggttgcttgttgctcttttcaaattcatggaaccatatctgagaaatgctgaactcccagaggcgtttctgtgatgtgattccttcaagttgcattcaaatgcgcaatgtcattcttagtgcttttccacgtaacatgagactgccagacccttctactcctaatctaaagattgatttgttggctgaaatttcaatagcaccacgaatcatgtcagatgttgatggtaccctcaaatcaaagcagttgaagactgagtttgatgaatatctcaagaggccggaaggctcttcctttctaagtgtcctgaagcaaaatttgctgctgcctcagaatgaagcagctgttgctgggacacgctacaatgtgcctctgatcaattcacttgttctttatgttggcatccaagctgtgcaacaactgcaacagaacaaggctaatgcatctgcatcagtgcagcagattaaacatacgcctacgatggacagtttccagattgaaacagctaccgagatgttcacaaatctcataacaagttttgatacagagggccgctaccttctgttgaatgcaattgcaaaccaactgcgctatccaaatagccatacacactactactccttcatcattctgcatctatttgctgaggctacccaggagattatccaggagcaaataacaagggttcttctggagcgtctaatagtgaaccgcccccatccttgggggttacttattacttccattgaattgataaagaatccgcgttacaacttttggaaccggtcttttacacatagtgcacctgagattgagaaactgtttgagtcagtggctaggtcctgcggcgcaaaagctgtagatgaaggaatcagtgtgcaggatggcagtcactaataaagtaatttgctttgttagtgctgtttttgtgctatttcgcactgtaaattgtgtgctaccctatctgggcttgtacagaccacggaaatacatagtgcgtcacgtcagctatttgggtgcctgtgctttgcctggtagctaggaattactattgatcgccagatgctccaggtgcaaatttttccgtggactggttcacttatttgattcaactatgtcagaatggtagatggtgcgaacttcagcttagatagtgagttgagttgcaggcatgtttgtaaattatatttttgatgccattctgttttctcagagaacggaacatttcaagatcagtctatactcctatgccgttttaaaattgcacaccaaatgggattgcaagtagaatggatgggtttttg

SEQ ID NO: 85047 - DNA, 5552 bp, Zea Mays
tcgaaactaacctttccaatctattcggcaggatctgctttgcgacgctgtcaaaggaactcgctcgaccaccgaaccccccttgccctagcgctccccgcctccgcctctcgccgccggcgagatgatccctgtcagcgccgatatccctgtggagctgcgcttccttctcgaatgcgccaccggctccaacttcgactccattcggctcgagctctgccagttagttgacagtggcttggatggatgcattttggtgctccgagtatgtctgaatcaaatgttgctaaatgctggggaggtcaagaacctccagttgcaacaaaagcttctatctgatgttttcagatattgtttacataagacctgcttcacaactagtttttgtgaggcgctggcaacgatagccttgacggatgattttcttgaaagcttgacaaatctgctggagctctcagttgctgagaaaattggtgttggacttgcgctgtcagattctgaggactcagagatgaagcaaaaagggcaatggttttcaattgctcaaattgaaaagctgtgtacgagtcatatccaatctctatcaaatggtcaaattcatgaaattgtcatgtttctgcatcagtctgatggcctgtcaaagcatatggacacttttaataatattatatctctactaaaagtcacggagaggccattttttgtacctgttacgaatggagattttgatagccaagcaaatccttcaagacatttggagatgtactttggtagcacaaatgatgattttgagtcacttctgtctgaaattgggaaagagataagcatggctgacattgtagccgagttaggttacggatttactgttgacagcactcactgtaaggaaatactttccattgtggagcctcttgatgatatcgccatatctaagttgcttggggctgttgtcggcactcatattggtcttggagaggcccataacacatatgcaacatttgtatctgctattcgtaatagccacacgaatgactcacctcagccgactaaatggaacacagatgtccttgtggactcaatcaatgaacttgccccaagtacaaactgggtgcgtgtaattgaatatcttgatcatgagggtttcaatatacctgatgaagcgagcttttatctattgatgtctatatacgagtgtgcttgcaaggatccatttccacttcatgctgtttgtgggtcattgtgggaaaacacagaaggccagatatcgttcttaaagcatgcagtttgtgctccatctgataaatttacatttgcacattcttctagacacctggcatttcaggacttggcaggccctagtcaaggcaatcatgcttggttctgccttgaccttctagaagttttatgccaactagctgaagttgggtacactgcatctgtacgatcaatgcttgagtatccactgggacattgccctgagctcttacttgttggtgttagccatatcagtaccgtgtataatcttctccaaaatgaagtactgtcctgcgtatttcctgctttactgaaggatccaacaaagcgcaatgtagtgaattatctctggcatacaaactcatatctcacacttcaaggttttgttgatgctcataatgatccagattgtttgctaagaattgttgatgtttgtcatgacttgaagattctgtcgactgtccttgattctactccatttgcattttccattaaattggctgctgcttccttgaggaaagactatagtaatcttgagaaatggctgactgaaaagctatctctttatggaaaaggttttgttgaggaatgtgtgaattttctgaaagcaactatgagcaacacagattacgtcttagagggcacgacacaacctcaatctattgtcagaaacatatattgggagtcttcttatgccttcataaagtctcactcggggcagctcttgtcagatgcaatattggatgaaataaggaaactgtgtgtttcgtttgaatcgaggaatcctagctctgctgtaagagagcttgctaattcagacggagggtcagatgacattgaagtagaggctaatgcatattttcaacacatgttctctggacagataagtgttgattccatgatacaaatgcttgggcgcttcaaagaatctacagataagagggaggtatcaattttcaactgtatgatctcaaatctttttaaagaatatacattcttccccaagtatcctgataagcagcttaagatagcagctgttctgtttggatctcttattaaacatcaacttgtggctcactccgaacttggaattgctctgcgtggtgttcgtgatgccttacgcaaacctgttgattcaaagatgtttatgtttggtacatcagcactggaacagtttatggaccgtgtcatagagtggccacgatactgtaattacatattgcagatctcacatcttcgtggaacacatttagaaatggtttctgttattgagagagccctagccaaaatctcctcaagtcaaaatgagccaaatgttggcaacctgctttctgcagagcagcatgtttctggttcatcatccatggaaggcatagaggcatctgaatcatcatggttgatgggtaccatcccaagtcaactaggaaggcctctttcttctcctttgcaacataggcagcagggtcttctctcggagaggtctgaggtttctatgaattcactgaataagagcaatttatccagtcagcctccccttgcttcatcgtctgctgatttgactattaattcaaagacaactgctccaccctctttactagcttcacctcatcagtctatcagtgtgtcaacgagtgtgcatgttggatttctgcgttctcgaagtaccccaggattaccgaggcagccttcatatactactggatttgggactgctttgaatatagagacgcttgttgcagcagcggaacaaagagatataccaattgagacacctccacctgaagttcaggacaagattctttttatgatcaacaatatatccatctcaaacatggaagctaaggcaaaggaatttaatgaggtcatacaggaacaacattatccttggtttgcacaatacatggtcatgaaaagggcaagcattgaaccaaatttccatgatctgtatttgaagttctttgataaattaaactcaaaatccttgaacaaggaaatgctgaaggctacgtatgagaactgcaaggtcttgttaagatcagaccttatcaaatctagttctgaggagcgttccttgctaaaaaacttaggcagctggttgggcaagttcaccattggtaggaaccaggcactaagggctaaggagattgacccaaaatctcttattgtggaggcgtacgagaaaggattgatgattgcggtcataccattcacttcaaagattcttgaaccttgccagtcaagtatcgcatatcgtcctccaaatccctggaccattggaattctaagtctacttgctgaaatttataatcttccaaacctgaagatgaatctgaaatttgatatcgaggttctgtttaagaatcttacagttgacatgaaggatgtgaaaccaacttccctgcttaaagatcgtctgcgcgaggtcgaaggaaatccggatttttcaaataaagatgttactacctctcaaacccctgtggttccagaagttcttccagggactattccttcatcaactcatgttgaactgcagcctgagatcaatattacatcccgagctatgagtcttccaaatatactcaatcagtatgtggctcctgtccgtctacccacaaacagcacggtagaagctgacaaagttgctctgatgatgcctgagcaagtgtcctccttgacccagcttatggcagctattccacgtgatgagatatgcttcaaaataaacccaaagcttggctcaattggtccacaattgcagtatagcaaaattatggatttggctttggataaggctaacagggagataatactccctgttattcaaagaagtgtgacaatagcaagccgaactacaaaagaacttatcctgaaggattatgcactggagtctgataacaatatgataactcgatctgcacatttgatggttggaacattagccggaagtcttgcccatgttacttgcaaggaacctcttcgtgtcgcactatattccaatcttcggaatctcattcaaaaccttatgagtggcagtgaaactatcgagcaaattattcacatgctagtcaacgataatctggatcttggctgtgccatcattgaggctgtggcaacacgtcaggctgttgaattgattgatgcagaaatagcccagtcattttcacaacaaaggaaacaaagagagggcggtggtcctacatatcatgaaacttttgcttatgctcaagggccgtttgctcgtgtacctgaagcattaagttctaagcctgggcatttatctgcttcccaacagagagtgtacgaggactttgttcatgtatggcatccccacaatcaaaatgtgggagctacaggttctggtctgtctggtgttgctactgtctcgagtactcttggtgtacttcgagcttacagtccaaattcgacatcagcatcctccagtaatttgtcaactgtccatatgggtggactaacatgtataactcagccgacagaactggggtctgaggatactgttatcgcacaatttttgagtaatcctgcccaagttggaccaagcgagtctcctgtcctatttagtggaacagttggtgctgcatctacattttctccattggcatctaatgaccttcctgaaataagtgctatggtgccccctccatcaacatctgctgatcgtctgggatctattttacctgaacctttgaatactggggatgctttggagagatacaaacaggttgctcagaagctggaagccttgattgctaatgatggtaaacatgtggaaattcagtctgttattgcagaagttcctgatatgttacgccggtgtgttagccgtgatgaggctgcattagtagtagcgcaaaaggttttcaaaagtttgtacgataatgcatcaaatagtgcttatgtctcctggcttctagcaaccttaattgcaatacgagatgtctgcaagcttgttgtcaaagagttaacaagttgggtaatatattcagatgaagagaagaagtttaacattgaaatcatttttggccttattcattccaagttgctgaatcttggggagtacaacgttcatttgacaaagctaattgatgggggaagaaataaggttgcaacggagtttgcaatgtctcttgtccaaacattgattacacaagatcctgttagcatatcagagcttcacaatgttgttgatgcaatatcgaaagtggcagtcctgttttctgagtggtgtcagatatgtagtcatgtaaatgctagtgatgcaatatacagtcgttttgtca

SEQ ID NO: 85048 - DNA, 5676 bp, Zea Mays
atcgaaactaacctttccaatctattcggcaggatctgctttgcgacgctgtcaaaggaactcgctcgaccaccgaaccccccttgccctagcgctccccgcctccgcctctcgccgccggcgagatgatccctgtcagcgccgatatccctgtggagctgcgcttccttctcgaatgcgccaccggctccaacttcgactccattcggctcgagctctgccagttagttgacagtggcttggatggatgcattttggtgctccgagtatgtctgaatcaaatgttgctaaatgctggggaggtcaagaacctccagttgcaacaaaagcttctatctgatgttttcagatattgtttacataagacctgcttcacaactagtttttgtgaggcgctggcaacgatagccttgacggatgattttcttgaaagcttgacaaatctgctggagctctcagttgctgagaaaattggtgttggacttgcgctgtcagattctgaggactcagagatgaagcaaaaaggtagtcatttctgtatggtcattgatatcgcctcttctgttccagggcaatggttttcaattgctcaaattgaaaagctgtgtacgagtcatatccaatctctatcaaatggtcaaattcatgaaattgtcatgtttctgcatcagtctgatggcctgtcaaagcatatggacacttttaataatattatatctctactaaaagtcacggagaggccattttttgtacctgttacgaatggagattttgatagccaagcaaatccttcaagacatttggagatgtactttggtagcacaaatgatgattttgagtcacttctgtctgaaattgggaaagagataagcatggctgacattgtagccgagttaggttacggatttactgttgacagcactcactgtaaggaaatactttccattgtggagcctcttgatgatatcgccatatctaagttgcttggggctgttgtcggcactcatattggtcttggagaggcccataacacatatgcaacatttgtatctgctattcgtaatagccacacgaatgactcacctcagccgactaaatggaacacagatgtccttgtggactcaatcaatgaacttgccccaagtacaaactgggtgcgtgtaattgaatatcttgatcatgagggtttcaatatacctgatgaagcgagcttttatctattgatgtctatatacgagtgtgcttgcaaggatccatttccacttcatgctgtttgtgggtcattgtgggaaaacacagaaggccagatatcgttcttaaagcatgcagtttgtgctccatctgataaatttacatttgcacattcttctagacacctggcatttcaggacttggcaggccctagtcaaggcaatcatgcttggttctgccttgaccttctagaagttttatgccaactagctgaagttgggtacactgcatctgtacgatcaatgcttgagtatccactgggacattgccctgagctcttacttgttggtgttagccatatcagtaccgtgtataatcttctccaaaatgaagtactgtcctgcgtatttcctgctttactgaaggatccaacaaagcgcaatgtagtgaattatctctggcatacaaactcatatctcacacttcaaggttttgttgatgctcataatgatccagattgtttgctaagaattgttgatgtttgtcatgacttgaagattctgtcgactgtccttgattctactccatttgcattttccattaaattggctgctgcttccttgaggaaagactatagtaatcttgagaaatggctgactgaaaagctatctctttatggaaaaggttttgttgaggaatgtgtgaattttctgaaagcaactatgagcaacacagattacgtcttagagggcacgacacaacctcaatctattgtcagaaacatatattgggagtcttcttatgccttcataaaggttctccagtctcactcggggcagctcttgtcagatgcaatattggatgaaataaggaaactgtgtgtttcgtttgaatcgaggaatcctagctctgctgtaagagagcttgctaattcagacggagggtcagatgacattgaagtagaggctaatgcatattttcaacacatgttctctggacagataagtgttgattccatgatacaaatgcttgggcgcttcaaagaatctacagataagagggaggtatcaattttcaactgtatgatctcaaatctttttaaagaatatacattcttccccaagtatcctgataagcagcttaagatagcagctgttctgtttggatctcttattaaacatcaacttgtggctcactccgaacttggaattgctctgcgtggtgttcgtgatgccttacgcaaacctgttgattcaaagatgtttatgtttggtacatcagcactggaacagtttatggaccgtgtcatagagtggccacgatactgtaattacatattgcagatctcacatcttcgtggaacacatttagaaatggtttctgttattgagagagccctagccaaaatctcctcaagtcaaaatgagccaaatgttggcaacctgctttctgcagagcagcatgtttctggttcatcatccatggaaggcatagaggcatctgaatcatcatggttgatgggtaccatcccaagtcaactaggaaggcctctttcttctcctttgcaacataggcagcagggtcttctctcggagaggtctgaggtttctatgaattcactgaataagagcaatttatccagtcagcctccccttgcttcatcgtctgctgatttgactattaattcaaagacaactgctccaccctctttactagcttcacctcatcagtctatcagtgtgtcaacgagtgtgcatgttggatttctgcgttctcgaagtaccccaggattaccgaggcagccttcatatactactggatttgggactgctttgaatatagagacgcttgttgcagcagcggaacaaagagatataccaattgagacacctccacctgaagttcaggacaagattctttttatgatcaacaatatatccatctcaaacatggaagctaaggcaaaggaatttaatgaggtcatacaggaacaacattatccttggtttgcacaatacatggtcatgaaaagggcaagcattgaaccaaatttccatgatctgtatttgaagttctttgataaattaaactcaaaatccttgaacaaggaaatgctgaaggctacgtatgagaactgcaaggtcttgttaagatcagaccttatcaaatctagttctgaggagcgttccttgctaaaaaacttaggcagctggttgggcaagttcaccattggtaggaaccaggcactaagggctaaggagattgacccaaaatctcttattgtggaggcgtacgagaaaggattgatgattgcggtcataccattcacttcaaagattcttgaaccttgccagtcaagtatcgcatatcgtcctccaaatccctggaccattggaattctaagtctacttgctgaaatttataatcttccaaacctgaagatgaatctgaaatttgatatcgaggttctgtttaagaatcttacagttgacatgaaggatgtgaaaccaacttccctgcttaaagatcgtctgcgcgaggtcgaaggaaatccggatttttcaaataaagatgttactacctctcaaacccctgtggttccagaagttcttccagggactattccttcatcaactcatgttgaactgcagcctgagatcaatattacatcccgagctatgagtcttccaaatatactcaatcagtatgtggctcctgtccgtctacccacaaacagcacggtagaagctgacaaagttgctctgatgatgcctgagcaagtgtcctccttgacccagcttatggcagctattccacgtgatgagatatgcttcaaaataaacccaaagcttggctcaattggtccacaattgcagtatagcaaaattatggatttggctttggataaggctaacagggagataatactccctgttattcaaagaagtgtgacaatagcaagccgaactacaaaagaacttatcctgaaggattatgcactggagtctgataacaatatgataactcgatctgcacatttgatggttggaacattagccggaagtcttgcccatgttacttgcaaggaacctcttcgtgtcgcactatattccaatcttcggaatctcattcaaaaccttatgagtggcagtgaaactatcgagcaaattattcacatgctagtcaacgataatctggatcttggctgtgccatcattgaggctgtggcaacacgtcaggctgttgaattgattgatgcagaaatagcccagtcattttcacaacaaaggaaacaaagagagggcggtggtcctacatatcatgaaacttttgcttatgctcaagggccgtttgctcgtgtacctgaagcattaagttctaagcctgggcatttatctgcttcccaacagagagtgtacgaggactttgttcatgtatggcatccccacaatcaaaatgtgggagctacaggttctggtctgtctggtgttgctactgtctcgagtactcttggtgtacttcgagcttacagtccaaattcgacatcagcatcctccagtaatttgtcaactgtccatatgggtggactaacatgtataactcagccgacagaactggggtctgaggatactgttatcgcacaatttttgagtaatcctgcccaagttggaccaagcgagtctcctgtcctatttagtggaacagttggtgctgcatctacattttctccattggcatctaatgaccttcctgaaataagtgctatggtgccccctccatcaacatctgctgatcgtctgggatctattttacctgaacctttgaatactggggatgctttggagagatacaaacaggttgctcagaagctggaagccttgattgctaatgatggtaaacatgtggaaattcagtctgttattgcagaagttcctgatatgttacgccggtgtgttagccgtgatgaggctgcattagtagtagcgcaaaaggttttcaaaagtttgtacgataatgcatcaaatagtgcttatgtctcctggcttctagcaaccttaattgcaatacgagatgtctgcaagcttgttgtcaaagagttaacaagttgggtaatatattcagatgaagagaagaagtttaacattgaaatcatttttggccttattcattccaagttgctgaatcttggggagtacaacgttcatttgacaaagctaattgatgggggaagaaataaggttgcaacggagtttgcaatgtctcttgtccaaacattgattacacaagatcctgttagcatatcagagcttcacaatgttgttgatgcaatatcgaaagttctagctgcccaggtaaacaaagaggaaagcattgctaatgaaactacactaattgatccaaatcaggtggcagtcctgttttctgagtggtgtcagatatgtagtcatgtaaatgctagtgatgcaatatacagtcgttttgtca

SEQ ID NO: 85049 - DNA, 1353 bp, Zea Mays
atggagatgagggcagccccggacagggctacgcctagaatggtcgcggcgatgagtccgcccacgccggagagggggacgctggggaggagggttgcagctgtggctgtgtcggcgggctcgccgcgaagttcgccggacagagggagaccggcgctggtggagagaagctccgctacagcgctggctgttgaattgattgatgcagaaatagcccagtcattttcacaacaaaggaaacaaagagagggcggtggtcctacatatcatgaaacttttgcttatgctcaagggccgtttgctcgtgtacctgaagcattaagttctaagcctgggcatttatctgcttcccaacagagagtgtacgaggactttgttcatgtatggcatccccacaatcaaaatgtgggagctacaggttctggtctgtctggtgttgctactgtctcgagtactcttggtgtacttcgagcttacagtccaaattcgacatcagcatcctccagtaatttgtcaactgtccatatgggtggactaacatgtataactcagccgacagaactggggtctgaggatactgttatcgcacaatttttgagtaatcctgcccaagttggaccaagcgagtctcctgtcctatttagtggaacagttggtgctgcatctacattttctccattggcatctaatgaccttcctgaaataagtgctatggtgccccctccatcaacatctgctgatcgtctgggatctattttacctgaacctttgaatactggggatgctttggagagatacaaacaggttgctcagaagctggaagccttgattgctaatgatggtaaacatgtggaaattcagtctgttattgcagaagttcctgatatgttacgccggtgtgttagccgtgatgaggctgcattagtagtagcgcaaaaggttttcaaaagtttgtacgataatgcatcaaatagtgcttatgtctcctggcttctagcaaccttaattgcaatacgagatgtctgcaagcttgttgtcaaagagttaacaagttgggtaatatattcagatgaagagaagaagtttaacattgaaatcatttttggccttattcattccaagttgctgaatcttggggagtacaacgttcatttgacaaagctaattgatgggggaagaaataaggttgcaacggagtttgcaatgtctcttgtccaaacattgattacacaagatcctgttagcatatcagagcttcacaatgttgttgatgcaatatcgaaagttctagctgcccaggtaaacaaagaggaaagcattgctaatgaaactacactaattgatccaaatcag

SEQ ID NO: 85050 - DNA, 5520 bp, Zea Mays
atgatccctgtcagcgccgatatccctgtggagctgcgcttccttctcgaatgcgccaccggctccaacttcgactccattcggctcgagctctgccagttagttgacagtggcttggatggatgcattttggtgctccgagtatgtctgaatcaaatgttgctaaatgctggggaggtcaagaacctccagttgcaacaaaagcttctatctgatgttttcagatattgtttacataagacctgcttcacaactagtttttgtgaggcgctggcaacgatagccttgacggatgattttcttgaaagcttgacaaatctgctggagctctcagttgctgagaaaattggtgttggacttgcgctgtcagattctgaggactcagagatgaagcaaaaaggtagtcatttctgtatggtcattgatatcgcctcttctgttccagggcaatggttttcaattgctcaaattgaaaagctgtgtacgagtcatatccaatctctatcaaatggtcaaattcatgaaattgtcatgtttctgcatcagtctgatggcctgtcaaagcatatggacacttttaataatattatatctctactaaaagtcacggagaggccattttttgtacctgttacgaatggagattttgatagccaagcaaatccttcaagacatttggagatgtactttggtagcacaaatgatgattttgagtcacttctgtctgaaattgggaaagagataagcatggctgacattgtagccgagttaggttacggatttactgttgacagcactcactgtaaggaaatactttccattgtggagcctcttgatgatatcgccatatctaagttgcttggggctgttgtcggcactcatattggtcttggagaggcccataacacatatgcaacatttgtatctgctattcgtaatagccacacgaatgactcacctcagccgactaaatggaacacagatgtccttgtggactcaatcaatgaacttgccccaagtacaaactgggtgcgtgtaattgaatatcttgatcatgagggtttcaatatacctgatgaagcgagcttttatctattgatgtctatatacgagtgtgcttgcaaggatccatttccacttcatgctgtttgtgggtcattgtgggaaaacacagaaggccagatatcgttcttaaagcatgcagtttgtgctccatctgataaatttacatttgcacattcttctagacacctggcatttcaggacttggcaggccctagtcaaggcaatcatgcttggttctgccttgaccttctagaagttttatgccaactagctgaagttgggtacactgcatctgtacgatcaatgcttgagtatccactgggacattgccctgagctcttacttgttggtgttagccatatcagtaccgtgtataatcttctccaaaatgaagtactgtcctgcgtatttcctgctttactgaaggatccaacaaagcgcaatgtagtgaattatctctggcatacaaactcatatctcacacttcaaggttttgttgatgctcataatgatccagattgtttgctaagaattgttgatgtttgtcatgacttgaagattctgtcgactgtccttgattctactccatttgcattttccattaaattggctgctgcttccttgaggaaagactatagtaatcttgagaaatggctgactgaaaagctatctctttatggaaaaggttttgttgaggaatgtgtgaattttctgaaagcaactatgagcaacacagattacgtcttagagggcacgacacaacctcaatctattgtcagaaacatatattgggagtcttcttatgccttcataaagtctcactcggggcagctcttgtcagatgcaatattggatgaaataaggaaactgtgtgtttcgtttgaatcgaggaatcctagctctgctgtaagagagcttgctaattcagacggagggtcagatgacattgaagtagaggctaatgcatattttcaacacatgttctctggacagataagtgttgattccatgatacaaatgcttgggcgcttcaaagaatctacagataagagggaggtatcaattttcaactgtatgatctcaaatctttttaaagaatatacattcttccccaagtatcctgataagcagcttaagatagcagctgttctgtttgcatgtggcggctcttcatttgaaggcacctcatcattaccactgtcattacaactggagagccgggcaacaactgaagggtcgtgcgaaactggagagatgtttatgtttggtacatcagcactggaacagtttatggaccgtgtcatagagtggccacgatactgtaattacatattgcagatctcacatcttcgtggaacacatttagaaatggtttctgttattgagagagccctagccaaaatctcctcaagtcaaaatgagccaaatgttggcaacctgctttctgcagagcagcatgtttctggttcatcatccatggaaggcatagaggcatctgaatcatcatggttgatgggtaccatcccaagtcaactaggaaggcctctttcttctcctttgcaacataggcagcagggtcttctctcggagaggtctgaggtttctatgaattcactgaataagagcaatttatccagtcagcctccccttgcttcatcgtctgctgatttgactattaattcaaagacaactgctccaccctctttactagcttcacctcatcagtctatcagtgtgtcaacgagtgtgcatgttggatttctgcgttctcgaagtaccccaggattaccgaggcagccttcatatactactggatttgggactgctttgaatatagagacgcttgttgcagcagcggaacaaagagatataccaattgagacacctccacctgaagttcaggacaagattctttttatgatcaacaatatatccatctcaaacatggaagctaaggcaaaggaatttaatgaggtcatacaggaacaacattatccttggtttgcacaatacatggtcatgaaaagggcaagcattgaaccaaatttccatgatctgtatttgaagttctttgataaattaaactcaaaatccttgaacaaggaaatgctgaaggctacgtatgagaactgcaaggtcttgttaagatcagaccttatcaaatctagttctgaggagcgttccttgctaaaaaacttaggcagctggttgggcaagttcaccattggtaggaaccaggcactaagggctaaggagattgacccaaaatctcttattgtggaggcgtacgagaaaggattgatgattgcggtcataccattcacttcaaagattcttgaaccttgccagtcaagtatcgcatatcgtcctccaaatccctggaccattggaattctaagtctacttgctgaaatttataatcttccaaacctgaagatgaatctgaaatttgatatcgaggttctgtttaagaatcttacagttgacatgaaggatgtgaaaccaacttccctgcttaaagatcgtctgcgcgaggtcgaaggaaatccggatttttcaaataaagatgttactacctctcaaacccctgtggttccagaagttcttccagggactattccttcatcaactcatgttgaactgcagcctgagatcaatattacatcccgagctatgagtcttccaaatatactcaatcagtatgtggctcctgtccgtctacccacaaacagcacggtagaagctgacaaagttgctctgatgatgcctgagcaagtgtcctccttgacccaggttttgccagcacaaacacaatcaccatcaccatctccattctctgttaatcagcttatggcagctattccacgtgatgagatatgcttcaaaataaacccaaagcttggctcaattggtccacaattgcagtatagcaaaattatggatttggctttggataaggctaacagggagataatactccctgttattcaaagaagtgtgacaatagcaagccgaactacaaaagaacttatcctgaaggattatgcactggagtctgataacaatatgataactcgatctgcacatttgatggttggaacattagccggaagtcttgcccatgttacttgcaaggaacctcttcgtgtcgcactatattccaatcttcggaatctcattcaaaaccttatgagtggcagtgaaactatcgagcaaattattcacatgctagtcaacgataatctggatcttggctgtgccatcattgaggctgtggcaacacgtcaggctgttgaattgattgatgcagaaatagcccagtcattttcacaacaaaggaaacaaagagagggcggtggtcctacatatcatgaaacttttgcttatgctcaagggccgtttgctcgtgtacctgaagcattaagttctaagcctgggcatttatctgcttcccaacagagagtgtacgaggactttgttcatgtatggcatccccacaatcaaaatgtgggagctacaggttctggtctgtctggtgttgctactgtctcgagtactcttggtgtacttcgagcttacagtccaaattcgacatcagcatcctccagtaatttgtcaactgtccatatgggtggactaacatgtataactcagccgacagaactggggtctgaggatactgttatcgcacaatttttgagtaatcctgcccaagttggaccaagcgagtctcctgtcctatttagtggaacagttggtgctgcatctacattttctccattggcatctaatgaccttcctgaaataagtgctatggtgccccctccatcaacatctgctgatcgtctgggatctattttacctgaacctttgaatactggggatgctttggagagatacaaacaggttgctcagaagctggaagccttgattgctaatgatggtaaacatgtggaaattcagtctgttattgcagaagttcctgatatgttacgccggtgtgttagccgtgatgaggctgcattagtagtagcgcaaaaggttttcaaaagtttgtacgataatgcatcaaatagtgcttatgtctcctggcttctagcaaccttaattgcaatacgagatgtctgcaagcttgttgtcaaagagttaacaagttgggtaatatattcagatgaagagaagaagtttaacattgaaatcatttttggccttattcattccaagttgctgaatcttggggagtacaacgttcatttgacaaagctaattgatgggggaagaaataaggttgcaacggagtttgcaatgtctcttgtccaaacattgattacacaagatcctgttagcatatcagagcttcacaatgttgttgatgcaatatcgaaagttctagctgcccaggtaaacaaagaggaaagcattgctaatgaaactacactaattgatccaaatcag

SEQ ID NO: 85051 - DNA, 5689 bp, Zea Mays
cgaaactaacctttccaatctattcggcaggatctgctttgcgacgctgtcaaaggaactcgctcgaccaccgaaccccccttgccctagcgctccccgcctccgcctctcgccgccggcgagatgatccctgtcagcgccgatatccctgtggagctgcgcttccttctcgaatgcgccaccggctccaacttcgactccattcggctcgagctctgccagttagttgacagtggcttggatggatgcattttggtgctccgagtatgtctgaatcaaatgttgctaaatgctggggaggtcaagaacctccagttgcaacaaaagcttctatctgatgttttcagatattgtttacataagacctgcttcacaactagtttttgtgaggcgctggcaacgatagccttgacggatgattttcttgaaagcttgacaaatctgctggagctctcagttgctgagaaaattggtgttggacttgcgctgtcagattctgaggactcagagatgaagcaaaaaggtagtcatttctgtgtgagtctagtgacatcatatcttcttctcttattttcagatggtcattgatatcgcctcttctgttccagggcaatggttttcaattgctcaaattgaaaagctgtgtacgagtcatatccaatctctatcaaatggtcaaattcatgaaattgtcatgtttctgcatcagtctgatggcctgtcaaagcatatggacacttttaataatattatatctctactaaaagtcacggagaggccattttttgtacctgttacgaatggagattttgatagccaagcaaatccttcaagacatttggagatgtactttggtagcacaaatgatgattttgagtcacttctgtctgaaattgggaaagagataagcatggctgacattgtagccgagttaggttacggatttactgttgacagcactcactgtaaggaaatactttccattgtggagcctcttgatgatatcgccatatctaagttgcttggggctgttgtcggcactcatattggtcttggagaggcccataacacatatgcaacatttgtatctgctattcgtaatagccacacgaatgactcacctcagccgactaaatggaacacagatgtccttgtggactcaatcaatgaacttgccccaagtacaaactgggtgcgtgtaattgaatatcttgatcatgagggtttcaatatacctgatgaagcgagcttttatctattgatgtctatatacgagtgtgcttgcaaggatccatttccacttcatgctgtttgtgggtcattgtgggaaaacacagaaggccagatatcgttcttaaagcatgcagtttgtgctccatctgataaatttacatttgcacattcttctagacacctggcatttcaggacttggcaggccctagtcaaggcaatcatgcttggttctgccttgaccttctagaagttttatgccaactagctgaagttgggtacactgcatctgtacgatcaatgcttgagtatccactgggacattgccctgagctcttacttgttggtgttagccatatcagtaccgtgtataatcttctccaaaatgaagtactgtcctgcgtatttcctgctttactgaaggatccaacaaagcgcaatgtagtgaattatctctggcatacaaactcatatctcacacttcaaggttttgttgatgctcataatgatccagattgtttgctaagaattgttgatgtttgtcatgacttgaagattctgtcgactgtccttgattctactccatttgcattttccattaaattggctgctgcttccttgaggaaagactatagtaatcttgagaaatggctgactgaaaagctatctctttatggaaaaggttttgttgaggaatgtgtgaattttctgaaagcaactatgagcaacacagattacgtcttagagggcacgacacaacctcaatctattgtcagaaacatatattgggagtcttcttatgccttcataaaggttctccagtctcactcggggcagctcttgtcagatgcaatattggatgaaataaggaaactgtgtgtttcgtttgaatcgaggaatcctagctctgctgtaagagagcttgctaattcagacggagggtcagatgacattgaagtagaggctaatgcatattttcaacacatgttctctggacagataagtgttgattccatgatacaaatgcttgggcgcttcaaagaatctacagataagagggaggtatcaattttcaactgtatgatctcaaatctttttaaagaatatacattcttccccaagtatcctgataagcagcttaagatagcagctgttctgtttggatctcttattaaacatcaacttgtggctcactccgaacttggaattgctctgcgtggtgttcgtgatgccttacgcaaacctgttgattcaaagatgtttatgtttggtacatcagcactggaacagtttatggaccgtgtcatagagtggccacgatactgtaattacatattgcagatctcacatcttcgtggaacacatttagaaatggtttctgttattgagagagccctagccaaaatctcctcaagtcaaaatgagccaaatgttggcaacctgctttctgcagagcagcatgtttctggttcatcatccatggaaggcatagaggcatctgaatcatcatggttgatgggtaccatcccaagtcaactaggaaggcctctttcttctcctttgcaacataggcagcagggtcttctctcggagaggtctgaggtttctatgaattcactgaataagagcaatttatccagtcagcctccccttgcttcatcgtctgctgatttgactattaattcaaagacaactgctccaccctctttactagcttcacctcatcagtctatcagtgtgtcaacgagtgtgcatgttggatttctgcgttctcgaagtaccccaggattaccgaggcagccttcatatactactggatttgggactgctttgaatatagagacgcttgttgcagcagcggaacaaagagatataccaattgagacacctccacctgaagttcaggacaagattctttttatgatcaacaatatatccatctcaaacatggaagctaaggcaaaggaatttaatgaggtcatacaggaacaacattatccttggtttgcacaatacatggtcatgaaaagggcaagcattgaaccaaatttccatgatctgtatttgaagttctttgataaattaaactcaaaatccttgaacaaggaaatgctgaaggctacgtatgagaactgcaaggtcttgttaagatcagaccttatcaaatctagttctgaggagcgttccttgctaaaaaacttaggcagctggttgggcaagttcaccattggtaggaaccaggcactaagggctaaggagattgacccaaaatctcttattgtggaggcgtacgagaaaggattgatgattgcggtcataccattcacttcaaagattcttgaaccttgccagtcaagtatcgcatatcgtcctccaaatccctggaccattggaattctaagtctacttgctgaaatttataatcttccaaacctgaagatgaatctgaaatttgatatcgaggttctgtttaagaatcttacagttgacatgaaggatgtgaaaccaacttccctgcttaaagatcgtctgcgcgaggtcgaaggaaatccggatttttcaaataaagatgttactacctctcaaacccctgtggttccagaagttcttccagggactattccttcatcaactcatgttgaactgcagcctgagatcaatattacatcccgagctatgagtcttccaaatatactcaatcagtatgtggctcctgtccgtctacccacaaacagcacggtagaagctgacaaagttgctctgatgatgcctgagcaagtgtcctccttgacccaggttttgccagcacaaacacaatcaccatcaccatctccattctctgttaatcagcttatggcagctattccacgtgatgagatatgcttcaaaataaacccaaagcttggctcaattggtccacaattgcagtatagcaaaattatggatttggctttggataaggctaacagggagataatactccctgttattcaaagaagtgtgacaatagcaagccgaactacaaaagaacttatcctgaaggattatgcactggagtctgataacaatatgataactcgatctgcacatttgatggttggaacattagccggaagtcttgcccatgttacttgcaaggaacctcttcgtgtcgcactatattccaatcttcggaatctcattcaaaaccttatgagtggcagtgaaactatcgagcaaattattcacatgctagtcaacgataatctggatcttggctgtgccatcattgaggctgtggcaacacgtcaggctgttgaattgattgatgcagaaatagcccagtcattttcacaacaaaggaaacaaagagagggcggtggtcctacatatcatgaaacttttgcttatgctcaagggccgtttgctcgtgtacctgaagcattaagttctaagcctgggcatttatctgcttcccaacagagagtgtacgaggactttgttcatgtatggcatccccacaatcaaaatgtgggagctacaggttctggtctgtctggtgttgctactgtctcgagtactcttggtgtacttcgagcttacagtccaaattcgacatcagcatcctccagtaatttgtcaactgtccatatgggtggactaacatgtataactcagccgacagaactggggtctgaggatactgttatcgcacaatttttgagtaatcctgcccaagttggaccaagcgagtctcctgtcctatttagtggaacagttggtgctgcatctacattttctccattggcatctaatgaccttcctgaaataagtgctatggtgccccctccatcaacatctgctgatcgtctgggatctattttacctgaacctttgaatactggggatgctttggagagatacaaacaggttgctcagaagctggaagccttgattgctaatgatggtaaacatgtggaaattcagtctgttattgcagaagttcctgatatgttacgccggtgtgttagccgtgatgaggctgcattagtagtagcgcaaaaggttttcaaaagtttgtacgataatgcatcaaatagtgcttatgtctcctggcttctagcaaccttaattgcaatacgagatgtctgcaagcttgttgtcaaagagttaacaagttgggtaatatattcagatgaagagaagaagtttaacattgaaatcatttttggccttattcattccaagttgctgaatcttggggagtacaacgttcatttgacaaagctaattgatgggggaagaaataaggttgcaacggagtttgcaatgtctcttgtccaaacattgattacacaagatcctgttagcatatcagagcttcacaatgttgttgatgcaatatcgaaagttctagctgcccaggtaaacaaagaggaaagcattgctaatgaaactacactaattgatccaaatcag
